United States Patent Application Publication US 2017/0114356 A1 - sequence listing, part 61

SEQ ID NO: 82419 - DNA, 1718 bp, Zea Mays
cggcccgcgagaggggatggcgtccacggctcgcccgctccgctcttataacagccgcttcctacgtctctcgcgcatcccttccgagcggaagcggcagcccgtcaggttatagctcactcttgatcgcttcctggtttgctaagcgatttgcctctcgtggttcggtgacggatcggaggcgctgcgaattcgaagctggtttctctgggctaagtcgattcggacttacttgttcagtaggtgtagtgtaggcgtgtagctcgatagacgagaagaatatttggcgtcgaagtttcagctaagcaacgagatcaggaagtttcagcaaagctcctggattaaatatttggcatcatagaggattcaaatctgccggaaacctgtatcttcatccagtatcaaggggaagttctgttgttgtgtgttcggtgatggatacatccaaaagcaagcaaggaccagaacatctccttgttcttgtccatggtatcatggctagccccaaagactggacatatggggaagcagtgctgaagaggcggttgggtgatgattttttcatatatggtaaagcatgctagcatttgaattcttcattcactaggttcaatactagtcattatctaaccatttgttctagcttctacagtgccggtttatgaactaaatggatgttaaaaaaagtgtatgcaaacatctttgtctacagctagttcaacgaacagctacaccaaaacctttgatgggattgatgttgctggaagaagcttccgtttcttcaaggcctatcaatcctagaaaagcttgctgcgcctttggctcctttaattgttgggcgcaccggtgctcaactcttcctcactgatggtgatcctagcaaggcacctctcctgttacagatggcatccgactgtgatgacaaaaactacatatcagccttggcagcttttaagaaccgtgtcctgtatgccaacgtctcgtacgaccacatggtcggctggcgaacgtcttcactaaggagagagaagaatcttataaagccctcacatcgttcactggatggctataagcacattgtgaatgtggaatactgttcgcccgtgtcatcggagggcccacatttcccttccaaggctgccagagctaaagaagctgcacagcgatcgccaaaccgagaaaataccgaggagtaccaccaaatgatggaggaggagatgctccatggcttgcagaaggttggctggaagaaggtggacgtcaacttccattcgtcattctggccttactctgctcacaacaacatacacgtcaagaacgagtggcttcacaatgctggcgctggtgttatcgcgcacgttgcggacagcatcaagcagcaggagtcacggccatgtcttcctgccaatctatagcagtagcattcagcaatccatttgttcaaattatctgtcgctagcaaataaacccatgaccaaactctgttcgtcagcatccactgagcggcgaaatatttgggactgggacacacaataagctgtgtatcattatcggccgcctaggttttacattgtttgatgtcaattgtcaaatggcatgtgtttcctcatggaacagacgaagcattcgaagttgatataaagacaacctaaattgtcatatatgctaccgatggttcgtacccaatccagcgacgacgtcgatgagatttgggttag

SEQ ID NO: 82420 - DNA, 1852 bp, Zea Mays
cggcccgcgagaggggatggcgtccacggctcgcccgctccgctcttataacagccgcttcctacgtctctcgcgcatcccttccgagcggaagcggcagcccgtcaggttatagctcactcttgatcgcttcctggtttgctaagcgatttgcctctcgtggttcggtgacggatcggaggcgctgcgaattcgaagctggtttctctgggctaagtcgattcggacttacttgttcagtaggtgtagtgtaggcgtgtagctcgatagacgagaagaatatttggcgtcgaagtttcagctaagcaacgagatcaggaagtttcagcaaagctcctggattaaatatttggcatcatagaggattcaaatctgccggaaacctgtatcttcatccagtatcaaggggaagttctgttgttgtgtgttcggtgatggatacatccaaaagcaagcaaggaccagaacatctccttgttcttgtccatggtatcatggctagccccaaagactggacatatggggaagcagtgctgaagaggcggttgggtgatgattttttcatatatgctagttcaacgaacagctacaccaaaacctttgatgggattgatgttgctggaagaaggtcttggaagtggttaacaagatgcccagcttgagaaagatttccttcctagcgcattctctgggtggtttgtttgctagatatgttattgcaatactccactcagtctcagtggaaacaaagaatgcaggacagagtagtgcacttattgttcctacaacaagagggccagcaaaatcgagatgtgcttcaggattaggttctattgctggattgcggccaattaattttattaccttagcaaccccacaccttggggttagagggagaaatcagcttccgtttcttcaaggcctatcaatcctagaaaagcttgctgcgcctttggctcctttaattgttgggcgcaccggtgctcaactcttcctcactgatggtgatcctagcaaggcacctctcctgttacagatggcatccgactgtgatgacaaaaactacatatcagccttggcagcttttaagaaccgtgtcctgtatgccaacgtctcgtacgaccacatggtcggctggcgaacgtcttcactaaggagagagaagaatcttataaagccctcacatcgttcactggatggctataagcacattgtgaatgtggaatactgttcgcccgtgtcatcggagggcccacatttcccttccaaggctgccagagctaaagaagctgcacagcgatcgccaaaccgagaaaataccgaggagtaccaccaaatgatggaggaggagatgctccatggcttgcagaaggttggctggaagaaggtggacgtcaacttccattcgtcattctggccttactctgctcacaacaacatacacgtcaagaacgagtggcttcacaatgctggcgctggtgttatcgcgcacgttgcggacagcatcaagcagcaggagtcacggccatgtcttcctgccaatctatagcagtagcattcagcaatccatttgttcaaattatctgtcgctagcaaataaacccatgaccaaactctgttcgtcagcatccactgagcggcgaaatatttgggactgggacacacaataagctgtgtatcattatcggccgcctaggttttacattgtttgatgtcaattgtcaaatggcatgtgtttcctcatggaacagacgaagcattcgaagttgatataaagacaacctaaattgtcatatatgctaccgatggttcgtacccaatccagcgacgacgtcgatgagatttgggttag

SEQ ID NO: 82421 - DNA, 1660 bp, Zea Mays
cgacgccgccgcggcccgcgagaggggatggcgtccacggctcgcccgctccgctcttataacagccgcttcctacgtctctcgcgcatcccttccgagcggaagcggcagcccgtcaggattcaaatctgccggaaacctgtatcttcatccagtatcaaggggaagttctgttgttgtgtgttcggtgatggatacatccaaaagcaagcaaggaccagaacatctccttgttcttgtccatggtatcatggctagccccaaagactggacatatggggaagcagtgctgaagaggcggttgggtgatgattttttcatatatgtgccggtttatgaactaaatggatgttaaaaaaagtgtatgcaaacatctttgtctacagctagttcaacgaacagctacaccaaaacctttgatgggattgatgttgctggaagaaggtcttggaagtggttaacaagatgcccagcttgagaaagatttccttcctagcgcattctctgggtggtttgtttgctagatatgttattgcaatactccactcagtctcagtggaaacaaagaatgcaggacagagtagtgcacttattgttcctacaacaagagggccagcaaaatcgagatgtgcttcaggattaggttctattgctggattgcggccaattaattttattaccttagcaaccccacaccttggggttagagggagaaatcagcttccgtttcttcaaggcctatcaatcctagaaaagcttgctgcgcctttggctcctttaattgttgggcgcaccggtgctcaactcttcctcactgatggtgatcctagcaaggcacctctcctgttacagatggcatccgactgtgatgacaaaaactacatatcagccttggcagcttttaagaaccgtgtcctgtatgccaacgtctcacatggtcggctggcgaacgtcttcactaaggagagagaagaatcttataaagccctcacatcgttcactggatggctataagcacattgtgaatgtggaatactgttcgcccgtgtcatcggagggcccacatttcccttccaaggctgccagagctaaagaagctgcacagcgatcgccaaaccgagaaaataccgaggagtaccaccaaatgatggaggaggagatgctccatggcttgcagaaggttggctggaagaaggtggacgtcaacttccattcgtcattctggccttactctgctcacaacaacatacacgtcaagaacgagtggcttcacaatgctggcgctggtgttatcgcgcacgttgcggacagcatcaagcagcaggagtcacggccatgtcttcctgccaatctatagcagtagcattcagcaatccatttgttcaaattatctgtcgctagcaaataaacccatgaccaaactctgttcgtcagcatccactgagcggcgaaatatttgggactgggacacacaataagctgtgtatcattatcggccgcctaggttttacattgtttgatgtcaattgtcaaatggcatgtgtttcctcatggaacagacgaagcattcgaagttgatataaagacaacctaaattgtcatatatgctaccgatggttcgtacccaatccagcgacgacgtcgatgagatttgggttag

SEQ ID NO: 82422 - DNA, 1605 bp, Zea Mays
cactattcgacgccgccgcggcccgcgagaggggatggcgtccacggctcgcccgctccgctcttataacagccgcttcctacgtctctcgcgcatcccttccgagcggaagcggcagcccgtcaggattcaaatctgccggaaacctgtatcttcatccagtatcaaggggaagttctgttgttgtgtgttcggtgatggatacatccaaaagcaagcaaggaccagaacatctccttgttcttgtccatggtatcatggctagccccaaagactggacatatggggaagcagtgctgaagaggcggttgggtgatgattttttcatatatgctagttcaacgaacagctacaccaaaacctttgatgggattgatgttgctggaagaaggttagcaaatgaagtcttggaagtggttaacaagatgcccagcttgagaaagatttccttcctagcgcattctctgggtggtttgtttgctagatatgttattgcaatactccactcagtctcagtggaaacaaagaatgcaggacagagtagtgcacttattgttcctacaacaagagggccagcaaaatcgagatgtgcttcaggattaggttctattgctggattgcggccaattaattttattaccttagcaaccccacaccttggggttagagggagaaatcagcttccgtttcttcaaggcctatcaatcctagaaaagcttgctgcgcctttggctcctttaattgttgggcgcaccggtgctcaactcttcctcactgatggtgatcctagcaaggcacctctcctgttacagatggcatccgactgtgatgacaaaaactacatatcagccttggcagcttttaagaaccgtgtcctgtatgccaacgtctcgtacgaccacatggtcggctggcgaacgtcttcactaaggagagagaagaatcttataaagccctcacatcgttcactggatggctataagcacattgtgaatgtggaatactgttcgcccgtgtcatcggagggcccacatttcccttccaaggctgccagagctaaagaagctgcacagcgatcgccaaaccgagaaaataccgaggagtaccaccaaatgatggaggaaggttggctggaagaaggtggacgtcaacttccattcgtcattctggccttactctgctcacaacaacatacacgtcaagaacgagtggcttcacaatgctggcgctggtgttatcgcgcacgttgcggacagcatcaagcagcaggagtcacggccatgtcttcctgccaatctatagcagtagcattcagcaatccatttgttcaaattatctgtcgctagcaaataaacccatgaccaaactctgttcgtcagcatccactgagcggcgaaatatttgggactgggacacacaataagctgtgtatcattatcggccgcctaggttttacattgtttgatgtcaattgtcaaatggcatgtgtttcctcatggaacagacgaagcattcgaagttgatataaagacaacctaaattgtcatatatgctaccgatggttcgtacccaatccagcgacgacgtcgatgagatttgggttag

SEQ ID NO: 82423 - DNA, 1259 bp, Zea Mays
gcactattcgacgccgccgcggcccgcgagaggggatggcgtccacggctcgcccgctccgctcttataacagccgcttcctacgtctctcgcgcatcccttccgagcggaagcggcagcccgtcaggattcaaatctgccggaaacctgtatcttcatccagtatcaaggggaagttctgttgttgtgtgttcggtgatggatacatccaaaagcaagcaaggaccagaacatctccttgttcttgtccatggtatcatggctagccccaaagactggacatatggggaagcagtgctgaagaggcggttgggtgatgattttttcatatatgcttccgtttcttcaaggcctatcaatcctagaaaagcttgctgcgcctttggctcctttaattgttgggcgcaccggtgctcaactcttcctcactgatggtgatcctagcaaggcacctctcctgttacagatggcatccgactgtgatgacaaaaactacatatcagccttggcagcttttaagaaccgtgtcctgtatgccaacgtctcgtacgaccacatggtcggctggcgaacgtcttcactaaggagagagaagaatcttataaagccctcacatcgttcactggatggctataagcacattgtgaatgtggaatactgttcgcccgtgtcatcggagggcccacatttcccttccaaggctgccagagctaaagaagctgcacagcgatcgccaaaccgagaaaataccgaggagtaccaccaaatgatggaggaaggttggctggaagaaggtggacgtcaacttccattcgtcattctggccttactctgctcacaacaacatacacgtcaagaacgagtggcttcacaatgctggcgctggtgttatcgcgcacgttgcggacagcatcaagcagcaggagtcacggccatgtcttcctgccaatctatagcagtagcattcagcaatccatttgttcaaattatctgtcgctagcaaataaacccatgaccaaactctgttcgtcagcatccactgagcggcgaaatatttgggactgggacacacaataagctgtgtatcattatcggccgcctaggttttacattgtttgatgtcaattgtcaaatggcatgtgtttcctcatggaacagacgaagcattcgaagttgatataaagacaacctaaattgtcatatatgctaccgatggttcgtacccaatccagcgacgacgtcgatgagatttgggttag

SEQ ID NO: 82424 - DNA, 2010 bp, Zea Mays
tttttttttttgtcccgtcccgtcccgtgccgtgccgccgcactattcgacgccgccgcggcccgcgagaggggatggcgtccacggctcgcccgctccgctcttataacagccgcttcctacgtctctcgcgcatcccttccgagcggaagcggcagcccgtcaggattcaaatctgccggaaacctgtatcttcatccagtatcaaggggaagttctgttgttgtgtgttcggtgatggatacatccaaaagcaagcaaggaccagaacatctccttgttcttgtccatggtatcatggctagccccaaagactggacatatggggaagcagtgctgaagaggcggttgggtgatgattttttcatatatgtgccggtttatgaactaaatggatgttaaaaaaagtgtatgcaaacatctttgtctacagctagttcaacgaacagctacaccaaaacctttgatgggattgatgttgctggaagaaggtcttggaagtggttaacaagatgcccagcttgagaaagatttccttcctagcgcattctctgggtggtttgtttgctagatatgttattgcaatactccactcagtctcagtggaaacaaagaatgcaggacagagtagtgcacttattgttcctacaacaagagggccagcaaaatcgagatgtgcttcaggattaggttctattgctggattgcggccaattaattttattaccttagcaaccccacaccttggggttagagggagaaatcaggtgcatcaccaaaatgtttcggattacgtttacaaaatatactgcacattatccagcaaaggctcgattcctgggaaaacgaactctctatttgttattttgttcattcatgtagattttgaagttgcatggtatgatttttacaagcttggattatatcattgctgaagtggtcaataccaactagcatctataacttttgaggaaaaaacgacgaacttattgggacctgttcctgttagtgctgatcaatttctttgacacatgcttatatgtttttcccccgaattaccagcttccgtttcttcaaggcctatcaatcctagaaaagcttgctgcgcctttggctcctttaattgttgggcgcaccggtgctcaactcttcctcactgatggtgatcctagcaaggcacctctcctgttacagatggcatccgactgtgatgacaaaaactacatatcagccttggcagcttttaagaaccgtgtcctgtatgccaacgtctcgtacgaccacatggtcggctggcgaacgtcttcactaaggagagagaagaatcttataaagccctcacatcgttcactggatggctataagcacattgtgaatgtggaatactgttcgcccgtgtcatcggagggcccacatttcccttccaaggctgccagagctaaagaagctgcacagcgatcgccaaaccgagaaaataccgaggagtaccaccaaatgatggaggaggagatgctccatggcttgcagaaggttggctggaagaaggtggacgtcaacttccattcgtcattctggccttactctgctcacaacaacatacacgtcaagaacgagtggcttcacaatgctggcgctggtgttatcgcgcacgttgcggacagcatcaagcagcaggagtcacggccatgtcttcctgccaatctatagcagtagcattcagcaatccatttgttcaaattatctgtcgctagcaaataaacccatgaccaaactctgttcgtcagcatccactgagcggcgaaatatttgggactgggacacacaataagctgtgtatcattatcggccgcctaggttttacattgtttgatgtcaattgtcaaatggcatgtgtttcctcatggaacagacgaagcattcgaagttgatataaagacaacctaaattgtcatatatgctaccgatggttcgtacccaatccagcgacgacgtcgatgagatttgggttag

SEQ ID NO: 82425 - DNA, 1950 bp, Zea Mays
tttttttttttgtcccgtcccgtcccgtgccgtgccgccgcactattcgacgccgccgcggcccgcgagaggggatggcgtccacggctcgcccgctccgctcttataacagccgcttcctacgtctctcgcgcatcccttccgagcggaagcggcagcccgtcaggattcaaatctgccggaaacctgtatcttcatccagtatcaaggggaagttctgttgttgtgtgttcggtgatggatacatccaaaagcaagcaaggaccagaacatctccttgttcttgtccatggtatcatggctagccccaaagactggacatatggggaagcagtgctgaagaggcggttgggtgatgattttttcatatatgctagttcaacgaacagctacaccaaaacctttgatgggattgatgttgctggaagaaggtcttggaagtggttaacaagatgcccagcttgagaaagatttccttcctagcgcattctctgggtggtttgtttgctagatatgttattgcaatactccactcagtctcagtggaaacaaagaatgcaggacagagtagtgcacttattgttcctacaacaagagggccagcaaaatcgagatgtgcttcaggattaggttctattgctggattgcggccaattaattttattaccttagcaaccccacaccttggggttagagggagaaatcaggtgcatcaccaaaatgtttcggattacgtttacaaaatatactgcacattatccagcaaaggctcgattcctgggaaaacgaactctctatttgttattttgttcattcatgtagattttgaagttgcatggtatgatttttacaagcttggattatatcattgctgaagtggtcaataccaactagcatctataacttttgaggaaaaaacgacgaacttattgggacctgttcctgttagtgctgatcaatttctttgacacatgcttatatgtttttcccccgaattaccagcttccgtttcttcaaggcctatcaatcctagaaaagcttgctgcgcctttggctcctttaattgttgggcgcaccggtgctcaactcttcctcactgatggtgatcctagcaaggcacctctcctgttacagatggcatccgactgtgatgacaaaaactacatatcagccttggcagcttttaagaaccgtgtcctgtatgccaacgtctcgtacgaccacatggtcggctggcgaacgtcttcactaaggagagagaagaatcttataaagccctcacatcgttcactggatggctataagcacattgtgaatgtggaatactgttcgcccgtgtcatcggagggcccacatttcccttccaaggctgccagagctaaagaagctgcacagcgatcgccaaaccgagaaaataccgaggagtaccaccaaatgatggaggaggagatgctccatggcttgcagaaggttggctggaagaaggtggacgtcaacttccattcgtcattctggccttactctgctcacaacaacatacacgtcaagaacgagtggcttcacaatgctggcgctggtgttatcgcgcacgttgcggacagcatcaagcagcaggagtcacggccatgtcttcctgccaatctatagcagtagcattcagcaatccatttgttcaaattatctgtcgctagcaaataaacccatgaccaaactctgttcgtcagcatccactgagcggcgaaatatttgggactgggacacacaataagctgtgtatcattatcggccgcctaggttttacattgtttgatgtcaattgtcaaatggcatgtgtttcctcatggaacagacgaagcattcgaagttgatataaagacaacctaaattgtcatatatgctaccgatggttcgtacccaatccagcgacgacgtcgatgagatttgggttag

SEQ ID NO: 82426 - DNA, 1962 bp, Zea Mays
gggtttttttttttttttgtcccgtcccgtcccgtgccgtgccgccgcactattcgacgccgccgcggcccgcgagaggggatggcgtccacggctcgcccgctccgctcttataacagccgcttcctacgtctctcgcgcatcccttccgagcggaagcggcagcccgtcaggattcaaatctgccggaaacctgtatcttcatccagtatcaaggggaagttctgttgttgtgtgttcggtgatggatacatccaaaagcaagcaaggaccagaacatctccttgttcttgtccatggtatcatggctagccccaaagactggacatatggggaagcagtgctgaagaggcggttgggtgatgattttttcatatatgctagttcaacgaacagctacaccaaaacctttgatgggattgatgttgctggaagaaggttagcaaatgaagtcttggaagtggttaacaagatgcccagcttgagaaagatttccttcctagcgcattctctgggtggtttgtttgctagatatgttattgcaatactccactcagtctcagtggaaacaaagaatgcaggacagagtagtgcacttattgttcctacaacaagagggccagcaaaatcgagatgtgcttcaggattaggttctattgctggattgcggccaattaattttattaccttagcaaccccacaccttggggttagagggagaaatcaggtgcatcaccaaaatgtttcggattacgtttacaaaatatactgcacattatccagcaaaggctcgattcctgggaaaacgaactctctatttgttattttgttcattcatgtagattttgaagttgcatggtatgatttttacaagcttggattatatcattgctgaagtggtcaataccaactagcatctataacttttgaggaaaaaacgacgaacttattgggacctgttcctgttagtgctgatcaatttctttgacacatgcttatatgtttttcccccgaattaccagcttccgtttcttcaaggcctatcaatcctagaaaagcttgctgcgcctttggctcctttaattgttgggcgcaccggtgctcaactcttcctcactgatggtgatcctagcaaggcacctctcctgttacagatggcatccgactgtgatgacaaaaactacatatcagccttggcagcttttaagaaccgtgtcctgtatgccaacgtctcacatggtcggctggcgaacgtcttcactaaggagagagaagaatcttataaagccctcacatcgttcactggatggctataagcacattgtgaatgtggaatactgttcgcccgtgtcatcggagggcccacatttcccttccaaggctgccagagctaaagaagctgcacagcgatcgccaaaccgagaaaataccgaggagtaccaccaaatgatggaggaggagatgctccatggcttgcagaaggttggctggaagaaggtggacgtcaacttccattcgtcattctggccttactctgctcacaacaacatacacgtcaagaacgagtggcttcacaatgctggcgctggtgttatcgcgcacgttgcggacagcatcaagcagcaggagtcacggccatgtcttcctgccaatctatagcagtagcattcagcaatccatttgttcaaattatctgtcgctagcaaataaacccatgaccaaactctgttcgtcagcatccactgagcggcgaaatatttgggactgggacacacaataagctgtgtatcattatcggccgcctaggttttacattgtttgatgtcaattgtcaaatggcatgtgtttcctcatggaacagacgaagcattcgaagttgatataaagacaacctaaattgtcatatatgctaccgatggttcgtacccaatccagcgacgacgtcgatgagatttgggttag

SEQ ID NO: 82427 - DNA, 2128 bp, Zea Mays
ccggcattccggccaaacctatccgccactcggtcggcccatgccgcgcccctggacccgtcaataatcagcaccgcgccggcgctgatcccggcgcggggtttttttttttttttgtcccgtcccgtcccgtgccgtgccgccgcactattcgacgccgccgcggcccgcgagaggggatggcgtccacggctcgcccgctccgctcttataacagccgcttcctacgtctctcgcgcatcccttccgagcggaagcggcagcccgtcaggattcaaatctgccggaaacctgtatcttcatccagtatcaaggggaagttctgttgttgtgtgttcggtgatggatacatccaaaagcaagcaaggaccagaacatctccttgttcttgtccatggtatcatggctagccccaaagactggacatatggggaagcagtgctgaagaggcggttgggtgatgattttttcatatatgtgccggtttatgaactaaatggatgttaaaaaaagtgtatgcaaacatctttgtctacagctagttcaacgaacagctacaccaaaacctttgatgggattgatgttgctggaagaaggttagcaaatgaagtcttggaagtggttaacaagatgcccagcttgagaaagatttccttcctagcgcattctctgggtggtttgtttgctagatatgttattgcaatactccactcagtctcagtggaaacaaagaatgcaggacagagtagtgcacttattgttcctacaacaagagggccagcaaaatcgagatgtgcttcaggattaggttctattgctggattgcggccaattaattttattaccttagcaaccccacaccttggggttagagggagaaatcaggtgcatcaccaaaatgtttcggattacgtttacaaaatatactgcacattatccagcaaaggctcgattcctgggaaaacgaactctctatttgttattttgttcattcatgtagattttgaagttgcatggtatgatttttacaagcttggattatatcattgctgaagtggtcaataccaactagcatctataacttttgaggaaaaaacgacgaacttattgggacctgttcctgttagtgctgatcaatttctttgacacatgcttatatgtttttcccccgaattaccagcttccgtttcttcaaggcctatcaatcctagaaaagcttgctgcgcctttggctcctttaattgttgggcgcaccggtgctcaactcttcctcactgatggtgatcctagcaaggcacctctcctgttacagatggcatccgactgtgatgacaaaaactacatatcagccttggcagcttttaagaaccgtgtcctgtatgccaacgtctcgtacgaccacatggtcggctggcgaacgtcttcactaaggagagagaagaatcttataaagccctcacatcgttcactggatggctataagcacattgtgaatgtggaatactgttcgcccgtgtcatcggagggcccacatttcccttccaaggctgccagagctaaagaagctgcacagcgatcgccaaaccgagaaaataccgaggagtaccaccaaatgatggaggaggagatgctccatggcttgcagaaggttggctggaagaaggtggacgtcaacttccattcgtcattctggccttactctgctcacaacaacatacacgtcaagaacgagtggcttcacaatgctggcgctggtgttatcgcgcacgttgcggacagcatcaagcagcaggagtcacggccatgtcttcctgccaatctatagcagtagcattcagcaatccatttgttcaaattatctgtcgctagcaaataaacccatgaccaaactctgttcgtcagcatccactgagcggcgaaatatttgggactgggacacacaataagctgtgtatcattatcggccgcctaggttttacattgtttgatgtcaattgtcaaatggcatgtgtttcctcatggaacagacgaagcattcgaagttgatataaagacaacctaaattgtcatatatgctaccgatggttcgtacccaatccagcgacgacgtcgatgagatttgggttag

SEQ ID NO: 82428 - DNA, 2085 bp, Zea Mays
tcggccttgccattggcacagctttgggggagctgctggcgccttcgcgtgcgtgcgtgcatgcagtgcgcctttgcttttgccaagggttgccaaagctataggggggccaacccaacgtacgagaggagcgcgcgcacggccgagtcggcggaataacggcggattcaaatctgccggaaacctgtatcttcatccagtatcaaggggaagttctgttgttgtgtgttcggtgatggatacatccaaaagcaagcaaggaccagaacatctccttgttcttgtccatggtatcatggctagccccaaagactggacatatggggaagcagtgctgaagaggcggttgggtgatgattttttcatatatggtaaagcatgctagcatttgaattcttcattcactaggttcaatactagtcattatctaaccatttgttctagcttctacagtgccggtttatgaactaaatggatgttaaaaaaagtgtatgcaaacatctttgtctacagctagttcaacgaacagctacaccaaaacctttgatgggattgatgttgctggaagaaggtcttggaagtggttaacaagatgcccagcttgagaaagatttccttcctagcgcattctctgggtggtttgtttgctagatatgttattgcaatactccactcagtctcagtggaaacaaagaatgcaggacagagtagtgcacttattgttcctacaacaagagggccagcaaaatcgagatgtgcttcaggattaggttctattgctggattgcggccaattaattttattaccttagcaaccccacaccttggggttagagggagaaatcaggtgcatcaccaaaatgtttcggattacgtttacaaaatatactgcacattatccagcaaaggctcgattcctgggaaaacgaactctctatttgttattttgttcattcatgtagattttgaagttgcatggtatgatttttacaagcttggattatatcattgctgaagtggtcaataccaactagcatctataacttttgaggaaaaaacgacgaacttattgggacctgttcctgttagtgctgatcaatttctttgacacatgcttatatgtttttcccccgaattaccagcttccgtttcttcaaggcctatcaatcctagaaaagcttgctgcgcctttggctcctttaattgttgggcgcaccggtgctcaactcttcctcactgatggtgatcctagcaaggcacctctcctgttacagatggcatccgactgtgatgacaaaaactacatccttggcagcttttaagaaccgtgtcctgtatgccaacgtctcgtacgaccacatggtcggctggcgaacgtcttcactaaggagagagaagaatcttataaagccctcacatcgttcactggatggctataagcacattgtgaatgtggaatactgttcgcccgtgtcatcggagggcccacatttcccttccaaggctgccagagctaaagaagctgcacagcgatcgccaaaccgagaaaataccgaggagtaccaccaaatgatggaggaggagatgctccatggcttgcagaaggttggctggaagaaggtggacgtcaacttccattcgtcattctggccttactctgctcacaacaacatacacgtcaagaacgagtggcttcacaatgctggcgctggtgttatcgcgcacgttgcggacagcatcaagcagcaggagtcacggccatgtcttcctgccaatctatagcagtagcattcagcaatccatttgttcaaattatctgtcgctagcaaataaacccatgaccaaactctgttcgtcagcatccactgagcggcgaaatatttgggactgggacacacaataagctgtgtatcattatcggccgcctaggttttacattgtttgatgtcaattgtcaaatggcatgtgtttcctcatggaacagacgaagcattcgaagttgatataaagacaacctaaattgtcatatatgctaccgatggttcgtacccaatccagcgacgacgtcgatgagatttgggttag

SEQ ID NO: 82429 - DNA, 1703 bp, Zea Mays
tcggccttgccattggcacagctttgggggagctgctggcgccttcgcgtgcgtgcgtgcatgcagtgcgcctttgcttttgccaagggttgccaaagctataggggggccaacccaacgtacgagaggagcgcgcgcacggccgagtcggcggaataacggcggattcaaatctgccggaaacctgtatcttcatccagtatcaaggggaagttctgttgttgtgtgttcggtgatggatacatccaaaagcaagcaaggaccagaacatctccttgttcttgtccatggtatcatggctagccccaaagactggacatatggggaagcagtgctgaagaggcggttgggtgatgattttttcatatatgtgccggtttatgaactaaatggatgttaaaaaaagtgtatgcaaacatctttgtctacagctagttcaacgaacagctacaccaaaacctttgatgggattgatgttgctggaagaaggttagcaaatgaagtcttggaagtggttaacaagatgcccagcttgagaaagatttccttcctagcgcattctctgggtggtttgtttgctagatatgttattgcaatactccactcagtctcagtggaaacaaagaatgcaggacagagtagtgcacttattgttcctacaacaagagggccagcaaaatcgagatgtgcttcaggattaggttctattgctggattgcggccaattaattttattaccttagcaaccccacaccttggggttagagggagaaatcagcttccgtttcttcaaggcctatcaatcctagaaaagcttgctgcgcctttggctcctttaattgttgggcgcaccggtgctcaactcttcctcactgatggtgatcctagcaaggcacctctcctgttacagatggcatccgactgtgatgacaaaaactacatatcagccttggcagcttttaagaaccgtgtcctgtatgccaacgtctcgtacgaccacatggtcggctggcgaacgtcttcactaaggagagagaagaatcttataaagccctcacatcgttcactggatggctataagcacattgtgaatgtggaatactgttcgcccgtgtcatcggagggcccacatttcccttccaaggctgccagagctaaagaagctgcacagcgatcgccaaaccgagaaaataccgaggagtaccaccaaatgatggaggaaggttggctggaagaaggtggacgtcaacttccattcgtcattctggccttactctgctcacaacaacatacacgtcaagaacgagtggcttcacaatgctggcgctggtgttatcgcgcacgttgcggacagcatcaagcagcaggagtcacggccatgtcttcctgccaatctatagcagtagcattcagcaatccatttgttcaaattatctgtcgctagcaaataaacccatgaccaaactctgttcgtcagcatccactgagcggcgaaatatttgggactgggacacacaataagctgtgtatcattatcggccgcctaggttttacattgtttgatgtcaattgtcaaatggcatgtgtttcctcatggaacagacgaagcattcgaagttgatataaagacaacctaaattgtcatatatgctaccgatggttcgtacccaatccagcgacgacgtcgatgagatttgggttag

SEQ ID NO: 82430 - DNA, 1961 bp, Zea Mays
tcggccttgccattggcacagctttgggggagctgctggcgccttcgcgtgcgtgcgtgcatgcagtgcgcctttgcttttgccaagggttgccaaagctataggggggccaacccaacgtacgagaggagcgcgcgcacggccgagtcggcggaataacggcggattcaaatctgccggaaacctgtatcttcatccagtatcaaggggaagttctgttgttgtgtgttcggtgatggatacatccaaaagcaagcaaggaccagaacatctccttgttcttgtccatggtatcatggctagccccaaagactggacatatggggaagcagtgctgaagaggcggttgggtgatgattttttcatatatgctagttcaacgaacagctacaccaaaacctttgatgggattgatgttgctggaagaaggttagcaaatgaagtcttggaagtggttaacaagatgcccagcttgagaaagatttccttcctagcgcattctctgggtggtttgtttgctagatatgttattgcaatactccactcagtctcagtggaaacaaagaatgcaggacagagtagtgcacttattgttcctacaacaagagggccagcaaaatcgagatgtgcttcaggattaggttctattgctggattgcggccaattaattttattaccttagcaaccccacaccttggggttagagggagaaatcaggtgcatcaccaaaatgtttcggattacgtttacaaaatatactgcacattatccagcaaaggctcgattcctgggaaaacgaactctctatttgttattttgttcattcatgtagattttgaagttgcatggtatgatttttacaagcttggattatatcattgctgaagtggtcaataccaactagcatctataacttttgaggaaaaaacgacgaacttattgggacctgttcctgttagtgctgatcaatttctttgacacatgcttatatgtttttcccccgaattaccagcttccgtttcttcaaggcctatcaatcctagaaaagcttgctgcgcctttggctcctttaattgttgggcgcaccggtgctcaactcttcctcactgatggtgatcctagcaaggcacctctcctgttacagatggcatccgactgtgatgacaaaaactacatatcagccttggcagcttttaagaaccgtgtcctgtatgccaacgtctcgtacgaccacatggtcggctggcgaacgtcttcactaaggagagagaagaatcttataaagccctcacatcgttcactggatggctataagcacattgtgaatgtggaatactgttcgcccgtgtcatcggagggcccacatttcccttccaaggctgccagagctaaagaagctgcacagcgatcgccaaaccgagaaaataccgaggagtaccaccaaatgatggaggaggagatgctccatggcttgcagaaggttggctggaagaaggtggacgtcaacttccattcgtcattctggccttactctgctcacaacaacatacacgtcaagaacgagtggcttcacaatgctggcgctggtgttatcgcgcacgttgcggacagcatcaagcagcaggagtcacggccatgtcttcctgccaatctatagcagtagcattcagcaatccatttgttcaaattatctgtcgctagcaaataaacccatgaccaaactctgttcgtcagcatccactgagcggcgaaatatttgggactgggacacacaataagctgtgtatcattatcggccgcctaggttttacattgtttgatgtcaattgtcaaatggcatgtgtttcctcatggaacagacgaagcattcgaagttgatataaagacaacctaaattgtcatatatgctaccgatggttcgtacccaatccagcgacgacgtcgatgagatttgggttag

SEQ ID NO: 82431 - DNA, 2452 bp, Zea Mays
caacatgttcattcataactttcaggactgaaatctctgaaacacacaggcacatgaggatgggaccaatggagaattcataggtgcctggctgctcttgagtacttgtgaactgttaagcactaaggtcagactaaggaaaatcccagatctcaatcttttacaccaatctatcaacaatgcacccacttttctcactttcctcatggcccaatggtacagattctacaacatgtcctatattatatccattgccttcagattatcctatcaacataactttcagtggagtacttggtccgaaaataagtctccattttgcatttcgaggagtcaaacaatatcaactttgaccatatatacatacaaatactaatatttgtaataccatcattagattaatcacatcatatattttcaaagaaaacctatttggaaataaataaaaaaatgttgatataattttctgtaaatctagtcaaagttaagattagttgactcaaattacaagatgagaacttattttgggacagagggaatacagaatacatcatcttgtagtccctcagtttgaagaagagggcaccatatgattgtacaatgagtgggagcttcatgcgcgcccacacccacacacacacacacacacacacacacacacacacacacacagagagagagagagagagagagagagagagagagagagagatcaaagattacatcctcaccagataaatcaaggtaagaagctctccatctggttttagaagccgattaactgtctctgcccaagccacccttaagctcgggtcaagtgcacaaaagaacctgcgcacatcgatacatgtaatttgatctgctatataataataaagtgataatatgtgtgacacctacgtgtaatcaaatataaggtcgaattgttcacttggtatccacttgaagaaatcttcagccagaaaagtaaaataatctgcattgggcaaagaggatgaccactgtacaccaatggggaagacaatcagacacagttatcctaaaatcagaagacagtttttaagaaaaaaaaggtatagtacataagttgtattccagttgtgatggttggaataatctatattttatttgcagatgggctcaaaaccaattatctgtaaagtgggttcaatcaagcccatgcaatcaacattgataaaagaatacagtttcatttgattggggggagggggggtccttatcgatagagaacagaaaaactgtaaagttggcaagttgccatatatggttttctttttgtgattaacattattttggaatacattctatgacatatatcaagagcaccactaggaaaacaagaagaaattagttaacatatcaagcaggtcaattctcaaaacagcttctcttaactgataatcaacatcttgctcagctactagtcataaccatacctgcttagccttcttaacagccatatcagaaatatccaagccaacaacaaaacgttcagggcttgcaagagcgaccacatcgtatccctgttatacagaagcaactcaatctggtaataaaagctaaaatctaagttccagtttgtaatatattattataatgccagcaaagtggggtcctgcttacagtactgtcatgcactgtaaaatggtgtgtagtatagtacagttaggggtcgtaatgagctctaaattttacactataaaatctaaggatcgaatcggattaagattatgctctatttctattcatttttgaactaaaatttattaaggtccctaactttttgtgaagaaacatttgaatcgtgatcccttatcacccctaagtacagtttaccattacacataaaatctcaatcaaaaggctgatattgctaatgtcttgtactatggcaagttgggtactgttattgtcaaggcacatcacatcggctctcaatgactacaaaggatatatggagaaaactaggcacattataatttatactgactggtgtcctaaggtgaaagtaatagtcatattttagtcagacttggttactggagagaaactaggagggaaacagtagtatctggtggaaccatctgccagaagaatgaaataatttaccattccacatccaggaaccaaagctctcccttttgggagtgttcctgatctagcaagatgttcaatgacaggtgttggctttcccaaatcccatggggtcacaccaaactcccaggacttctcccacccatctgatgagcaataatttagaagagcaattcagaatcagcaaactcacatgcaatacaaatacaaagcatgaacaaagttgaagtggaaatgtggaatttatcaagaaactagacgctatgatgcgtccggcttgtgattttttctgctgacaaccactctaatttgagactgcaactgtgtagtatactca

SEQ ID NO: 82432 - DNA, 2564 bp, Zea Mays
gcccaaccgggcgcgggcgcgggcgcgggcgcgtccatccgccccccgacttcccattcccaccgcgcgcacccgccaaatcaaccaccccttcgtcgcccccgttccgtcccgtcccgttccggcaggcagccactcgcgaaggcgaagacgcaggcgccgagccgccgaccccacgggcccccaccccactcccgccgcgcctctccctccgcgtttccagatccccccgctcgcccgtgccgcggcattggcaccggcaccccgccgagcgcccgcaatgcgagccttctagcttcccgtagcacggacggaatcgcgagaggcatgcatcccaagcccgagggcggcgaagccaacggggccgccgcggaggcgggctccccgcggtccggcaacttccggcagcggagcatgcacgccgcccccgcggatccggaggcggcgcgccgggcgttcgatgtcgagaaccccccgccttgctccgccgccgcgggcggcgggctccggcccagcgagtccgtcaccaagctggagtcgctggagcgcgcggagcgcgccgcgctggcgcccgccgtcgtgctcaggaccgggttctacatcctggtgtggtacgcgttcagcacctgcctcaccctatataacaagacgctgctgggggacaagctcggcaagttcccggcgccgctgctgatgaacaccgtgcacttcgcgctgcaggcggggctctccaagctcataatcttcttacagtccaaggggccggaggccgccgtcgagatggggtggaaagactacttcatcagagtcgtgccaactgctctcgggacggccttggacataaacctgagcaacgcatctcttgtgttcatctcggtgacgtttgctactatgtgtaaatcagcctccccgatattccttttgctttttgcgtttgcatttaggttggagaatgctagcatcaagcttctaggaattatagttgttatttctactggagttctgttgacagtttccaaggagacggagtttgacttcttgggcttcatttttgtgacgcttgctgctgttatgtcgggattccgttggtccatgactcagattctactgcagaaagacacttacggcctgaagaatccaattaccttgatgagccatgttacgccagtgatggccatagccactatgatactatctctattactggacccttggagtgaatttaaaaaaaattcatatttcgataacccttggcatgtcatgcgcagttgcctacttatgcttataggaggaactttagcttttttcatggtgttaacagagtatatacttatttcagcaacaagtgccataaccgtcacaatagctggagtagtaaaagaatctgtaaccattttggttgcggtattttatttccatgatgaatttacttggttgaaaggggttggtcttttcaccattatggttggtgttagcttattcaattggtacaagtatgagaaattcaaaaggggtcatatagatgaggatgatgccaactctccttcatgtactggtgacgtcaagtacattattctagacgacttggagtatcaggatgaatttgaggaggaagatacataattttgtagtacagcgactttcaactgccacaggcttgttcatgcctgacccattgatacctgcccattgaaatattacttatggaggttttctctggaaaacatacatgaacacacctaaggctaggtgtgattatactatgctcgccaaaatctgatgcgatctgtgtgagctatgtttgtcacgatggatgttgaattctcatcttgattgaacagtcaggctaactacactgtcaagcactccatcggatcagaattcccattttgcgaagattagcagcggttacagaatgacatgcatgctatagcaggaactgctgagaatgctcgggatctgtatatttgttgttgtctttgcgttagtgcgcttgcacatattcattcttgaacctccacatttttggtgacgaggtgtactcattctctatataggcctgtttgtaaaactgaccagatgataccccacacgtgctgtttttcccttaaaacctagggagcggcatttggttttcgctgtatactgtttcggggcaccgaatatgttgtggcttgattgggaactggttataagaaaagcatgatagattgggaactgaatttctgttatgccgccaagtaaaggcacctagttcgaataattgccaaaatatctcttcggaggggaaaaaactttggttagcttttatgtttgggatttttctctgctcttgcttttcacaatcgccatgacttcagaattctaatgtttgagcgaaggaatgggacttctgggcattacgaacagtgtctaaggacccgaaagttttcctttactaaacttgttcggatgctaattagaagtatatattaaatctagtgtaaatataaaactaattatatataaggtctaagcgataagacgaatatattatactaattagttcatgattcgattttgca

SEQ ID NO: 82433 - DNA, 2973 bp, Zea Mays
gggaggagaagaacaaaccctagagcagacggcgtaaacggacggcggcgcggcgggacggatgaagaccacagccaggggcaggaagcgaatcagggagctgctaatggtcatcagccgcgcgcgttgccaaatcttcaaagggcggacgatgccaataatgcaattgacgtcttcggaagtccaagtatctgaagcccaatgtagacgatgccaaataagcaaaaaatctcaaaatctagttgccgagacgaccgccacccccccccccccccccccgccgccgccgccgccactggcgctactcctatcggcggggggctgaagaatatggcagccgcctccgcctccacgcgacaagcgacggcggaggcgtgcagtagccacgtccaccacgcgcacctcgcggctctcctcaacgcttccgcgcgcttgcctccgctccctctcagccgcctccacctcccgctctcgctccccacggcctcccgcctcgtcgcgtccttccctccactcccgctcctcgtctgcttcctccgcgcgctccgcctcctcccctcctcgccgccgcgcccctttgactcgctcatcaagtcatatgcctcgctccccaaccgcgcctccctcgctgctgcggcgctcgcgttcgccaggtcagccgggtacgtgccctctgtgctcgcctacaacgccgtcctcctcgcgctctctgacgcgtcgctcacctccgctaggcgcttcttcgactccatgcttagcgacggcgtggcgcccaacgtgtacacctacaacatcctcgtccgcgcgctgtgcggccgcggacaccggaaagaagcgctcagcatcttgcgtgacatgcgcggcgcaggctgcggccccaatgtcgtgacttacaacacgctcgtcgcggcgttcttcagagccggggaggtggatggcgcggagaggctggtcggcatgatgcgtgagggcggcttgaagcccaacctggtgaccttcaattcaatggtgaatgggatgtgcaaggctgggaagatggaggacgcacgcaaggtgttcgatgaaatggtgagggagggtttggcgccggatggggtcagttacaacaccttagtgggtgggtattgcaaggcagggtgctcgcacgaggcattgtctgtgtttgcagagatgacgcagaaagggatcatgccagacgtcgtgacatttacgtcattgatccatgtaatgtgcaaggctgggaacttggagcgggcagtgacattggtgaggcagatgagggagaggggcctccagatgaatgaggtcacttttacagccttgatagatgggttctgcaagaagggattcttggatgatgcattgcttgcagtaagggggatgaagcaatgcagaataaagccttcagtggtgtgttataatgcacttattaatggttattgtatggtaggaagaatggatgaagcaagagagttactccatgaaatggaagctaaaggactgaagcctgacgttgtgacatacagtacgattatcagtgcgtactgtaagaattgtgatacacattctgcatttgaattgaaccaacagatgcttgagaagggtgttcttccagatgcaatcacctactcatcactcataagggttctttgtggggagaaacgactcagtgacgctcatgtgctcttcaaaaatatgattaagcttggcctacaacctgatgaatttacatacacatctcttattgatggccactgcaaggagggtaatgtggagagtgctctttctctgcacgataaaatggtaaaggcaggagttcttcctgatgttgtgacttacagtgtgcttattaatgggcttagtaaatcagcacgtgctatggaagcacaacagttgctcttcaaattataccatgaagatccaattccagcaaatactaaatatgatgccctgatgcattgttgtagaaaagctgagcttaagagtgtgttagctctcttgaagggattttgcatgaaaggtttaatgaatgaagctgataaagtttatcaatcaatgttagacagaaactggaatcttgacgggtctgtctacagtgtgcttattcatgggcattgtagggcaggaaatgttatgaaggctctcagcttccataagcaaatgctgcagggtggttttgctccaaattcaacaagcacgatttccttgattaggggtctatttgaaaatgggatggttgtggaagcagatcaggtgattcagcagttgttgaactattgttcccttgctgatgcagaagcatcaaaggctcttattgacctcaacttaaatgaaggtaatgtggacgcagtcttagacgttctgcatggcatggcaaaggatggactgcttccaagtccaagatgagggtgattttcaacattcaagaaccaccctctctgtggaatactggagacctgatggtcatgtttggtacatattgtctcatgagtcataacacgagcatccgaatcagtgttatgtggatgaagaattgcacgtctaaagggacagagatagttcagtgcatggaaaaccaatgcatatggtatctacctgtatacctgatgattcaactttgagaattgggagtgaaaaaaaatataccgtgaaactggatgtcatattcgtttcttgcttctcacttgaagacagaaaaaggaaaatgaaaaatgaaagcgtgaaatccacggaaaatgaggagcttgaagaaagtggaacatcaatggcaatggatgtatacaggtggtttgcacttacagtaataagcccaaggaagaaggacacatgaagcgcgcgacggagagggaagcaacagtttgcctgaaagaagcagtgccttctgcacgtaggcaacgatgggggtgcacgtgttggcactggcaaagtggcaagctgccgataagacaaggccagagcgagagtgtgtctgtg

SEQ ID NO: 82434 - DNA, 2988 bp, Zea Mays
gggaggagaagaacaaaccctagagcagacggcgtaaacggacggcggcgcggcgggacggatgaagaccacagccaggggcaggaagcgaatcagggagctgctaatggtcatcagccgcgcgcgttgccaaatcttcaaagggcggacgatgccaataatgcaattgacgtcttcggaagtccaagtatctgaagcccaatgtagacgatgccaaataagcaaaaaatctcaaaatctagttgccgagacgaccgccacccccccccccccccccccgccgccgccgccgccactggcgctactcctatcggcggggggctgaagaatatggcagccgcctccgcctccacgcgacaagcgacggcggaggcgtgcagtagccacgtccaccacgcgcacctcgcggctctcctcaacgcttccgcgcgcttgcctccgctccctctcagccgcctccacctcccgctctcgctccccacggcctcccgcctcgtcgcgtccttccctccactcccgctcctcgtctgcttcctccgcgcgctccgcctcctcccctcctcgccgccgcgcccctttgactcgctcatcaagtcatatgcctcgctccccaaccgcgcctccctcgctgctgcggcgctcgcgttcgccaggtcagccgggtacgtgccctctgtgctcgcctacaacgccgtcctcctcgcgctctctgacgcgtcgctcacctccgctaggcgcttcttcgactccatgcttagcgacggcgtggcgcccaacgtgtacacctacaacatcctcgtccgcgcgctgtgcggccgcggacaccggaaagaagcgctcagcatcttgcgtgacatgcgcggcgcaggctgcggccccaatgtcgtgacttacaacacgctcgtcgcggcgttcttcagagccggggaggtggatggcgcggagaggctggtcggcatgatgcgtgagggcggcttgaagcccaacctggtgaccttcaattcaatggtgaatgggatgtgcaaggctgggaagatggaggacgcacgcaaggtgttcgatgaaatggtgagggagggtttggcgccggatggggtcagttacaacaccttagtgggtgggtattgcaaggcagggtgctcgcacgaggcattgtctgtgtttgcagagatgacgcagaaagggatcatgccagacgtcgtgacatttacgtcattgatccatgtaatgtgcaaggctgggaacttggagcgggcagtgacattggtgaggcagatgagggagaggggcctccagatgaatgaggtcacttttacagccttgatagatgggttctgcaagaagggattcttggatgatgcattgcttgcagtaagggggatgaagcaatgcagaataaagccttcagtggtgtgttataatgcacttattaatggttattgtatggtaggaagaatggatgaagcaagagagttactccatgaaatggaagctaaaggactgaagcctgacgttgtgacatacagtacgattatcagtgcgtactgtaagaattgtgatacacattctgcatttgaattgaaccaacagatgcttgagaagggtgttcttccagatgcaatcacctactcatcactcataagggttctttgtggggagaaacgactcagtgacgctcatgtgctcttcaaaaatatgattaagcttggcctacaacctgatgaatttacatacacatctcttattgatggccactgcaaggagggtaatgtggagagtgctctttctctgcacgataaaatggtaaaggcaggagttcttcctgatgttgtgacttacagtgtgcttattaatgggcttagtaaatcagcacgtgctatggaagcacaacagttgctcttcaaattataccatgaagatccaattccagcaaatactaaatatgatgccctgatgcattgttgtagaaaagctgagcttaagagtgtgttagctctcttgaagggattttgcatgaaaggtttaatgaatgaagctgataaagtttatcaatcaatgttagacagaaactggaatcttgacgggtctgtctacagtgtgcttattcatgggcattgtagggcaggaaatgttatgaaggctctcagcttccataagcaaatgctgcagggtggttttgctccaaattcaacaagcacgatttccttgattaggggtctatttgaaaatgggatggttgtggaagcagatcaggtgattcagcagttgttgaactattgttcccttgctgatgcagaagcatcaaaggctcttattgacctcaacttaaatgaaggtaatgtggacgcagtcttagacgttctgcatggcatggcaaaggatggactgcttccaagtccaagatgagggtgattttcaacattcaagaaccaccctctctgtggaatactggagacctgatggtcatgtttggtacatattgtctcatgagtcataacacgagcatccgaatcagtgttatgtggatgaagaattgcacgtctaaagggacagagatagttcagtgcatggaaaaccaatgcatatgacagaaaaaggaaaatgaaaaatgaaagcgtgaaatccacggaaaatgaggagcttgaagaaagtggaacatcaatggcaatggatgtatacaggtggtttgcacttacaggtccctgcacatggcgtgccagctgtgccttctctgtctttacttgcaccatggagccaactagttggtcatccaacatacaatttgcgtaccttgtcaccatcagtttagccagggttaaaaacttaaaaccatgtgactcggtggataggtcatttggaatatataattgttgaaataagttaattgccttatgcaaaactaattagcttgttctaagcgccgtataagtttatatagtatcttaacactatttatcaatgtattgcgcaagctaaggcagtaaagcc

SEQ ID NO: 82435 - DNA, 2723 bp, Zea Mays
gggaggagaagaacaaaccctagagcagacggcgtaaacggacggcggcgcggcgggacggatgaagaccacagccaggggcaggaagcgaatcagggagctgctaatggtcatcagccgcgcgcgttgccaaatcttcaaagggcggacgatgccaataatgcaattgacgtcttcggaagtccaagtatctgaagcccaatgtagacgatgccaaataagcaaaaaatctcaaaatctagttgccgagacgaccgccacccccccccccccccccccgccgccgccgccgccactggcgctactcctatcggcggggggctgaagaatatggcagccgcctccgcctccacgcgacaagcgacggcggaggcgtgcagtagccacgtccaccacgcgcacctcgcggctctcctcaacgcttccgcgcgcttgcctccgctccctctcagccgcctccacctcccgctctcgctccccacggcctcccgcctcgtcgcgtccttccctccactcccgctcctcgtctgcttcctccgcgcgctccgcctcctcccctcctcgccgccgcgcccctttgactcgctcatcaagtcatatgcctcgctccccaaccgcgcctccctcgctgctgcggcgctcgcgttcgccaggtcagccgggtacgtgccctctgtgctcgcctacaacgccgtcctcctcgcgctctctgacgcgtcgctcacctccgctaggcgcttcttcgactccatgcttagcgacggcgtggcgcccaacgtgtacacctacaacatcctcgtccgcgcgctgtgcggccgcggacaccggaaagaagcgctcagcatcttgcgtgacatgcgcggcgcaggctgcggccccaatgtcgtgacttacaacacgctcgtcgcggcgttcttcagagccggggaggtggatggcgcggagaggctggtcggcatgatgcgtgagggcggcttgaagcccaacctggtgaccttcaattcaatggtgaatgggatgtgcaaggctgggaagatggaggacgcacgcaaggtgttcgatgaaatggtgagggagggtttggcgccggatggggtcagttacaacaccttagtgggtgggtattgcaaggcagggtgctcgcacgaggcattgtctgtgtttgcagagatgacgcagaaagggatcatgccagacgtcgtgacatttacgtcattgatccatgtaatgtgcaaggctgggaacttggagcgggcagtgacattggtgaggcagatgagggagaggggcctccagatgaatgaggtcacttttacagccttgatagatgggttctgcaagaagggattcttggatgatgcattgcttgcagtaagggggatgaagcaatgcagaataaagccttcagtggtgtgttataatgcacttattaatggttattgtatggtaggaagaatggatgaagcaagagagttactccatgaaatggaagctaaaggactgaagcctgacgttgtgacatacagtacgattatcagtgcgtactgtaagaattgtgatacacattctgcatttgaattgaaccaacagatgcttgagaagggtgttcttccagatgcaatcacctactcatcactcataagggttctttgtggggagaaacgactcagtgacgctcatgtgctcttcaaaaatatgattaagcttggcctacaacctgatgaatttacatacacatctcttattgatggccactgcaaggagggtaatgtggagagtgctctttctctgcacgataaaatggtaaaggcaggagttcttcctgatgttgtgacttacagtgtgcttattaatgggcttagtaaatcagcacgtgctatggaagcacaacagttgctcttcaaattataccatgaagatccaattccagcaaatactaaatatgatgccctgatgcattgttgtagaaaagctgagcttaagagtgtgttagctctcttgaagggattttgcatgaaaggtttaatgaatgaagctgataaagtttatcaatcaatgttagacagaaactggaatcttgacgggtctgtctacagtgtgcttattcatgggcattgtagggcaggaaatgttatgaaggctctcagcttccataagcaaatgctgcagggtggttttgctccaaattcaacaagcacgatttccttgattaggggtctatttgaaaatgggatggttgtggaagcagatcaggtaatgtggacgcagtcttagacgttctgcatggcatggcaaaggatggactgcttccaagtccaagatgagggtgattttcaacattcaagaaccaccctctctgtggaatactggagacctgatggtcatgtttggtacatattgtctcatgagtcataacacgagcatccgaatcagtgttatgtggatgaagaattgcacgtctaaagggacagagatagttcagtgcatggaaaaccaatgcatatgacagaaaaaggaaaatgaaaaatgaaagcgtgaaatccacggaaaatgaggagcttgaagaaagtggaacatcaatggcaatggatgtatacaggtggtttgcacttacagatttcagctatctagcttgccgcctagtcctccatcttctctaccttcctcaagacctccgcttccctgtcggctattgccttggcctcctcgtcggtgaacggcgg

SEQ ID NO: 82436 - DNA, 3036 bp, Zea Mays
gggaggagaagaacaaaccctagagcagacggcgtaaacggacggcggcgcggcgggacggatgaagaccacagccaggggcaggaagcgaatcagggagctgctaatggtcatcagccgcgcgcgttgccaaatcttcaaagggcggacgatgccaataatgcaattgacgtcttcggaagtccaagtatctgaagcccaatgtagacgatgccaaataagcaaaaaatctcaaaatctagttgccgagacgaccgccacccccccccccccccccccgccgccgccgccgccactggcgctactcctatcggcggggggctgaagaatatggcagccgcctccgcctccacgcgacaagcgacggcggaggcgtgcagtagccacgtccaccacgcgcacctcgcggctctcctcaacgcttccgcgcgcttgcctccgctccctctcagccgcctccacctcccgctctcgctccccacggcctcccgcctcgtcgcgtccttccctccactcccgctcctcgtctgcttcctccgcgcgctccgcctcctcccctcctcgccgccgcgcccctttgactcgctcatcaagtcatatgcctcgctccccaaccgcgcctccctcgctgctgcggcgctcgcgttcgccaggtcagccgggtacgtgccctctgtgctcgcctacaacgccgtcctcctcgcgctctctgacgcgtcgctcacctccgctaggcgcttcttcgactccatgcttagcgacggcgtggcgcccaacgtgtacacctacaacatcctcgtccgcgcgctgtgcggccgcggacaccggaaagaagcgctcagcatcttgcgtgacatgcgcggcgcaggctgcggccccaatgtcgtgacttacaacacgctcgtcgcggcgttcttcagagccggggaggtggatggcgcggagaggctggtcggcatgatgcgtgagggcggcttgaagcccaacctggtgaccttcaattcaatggtgaatgggatgtgcaaggctgggaagatggaggacgcacgcaaggtgttcgatgaaatggtgagggagggtttggcgccggatggggtcagttacaacaccttagtgggtgggtattgcaaggcagggtgctcgcacgaggcattgtctgtgtttgcagagatgacgcagaaagggatcatgccagacgtcgtgacatttacgtcattgatccatgtaatgtgcaaggctgggaacttggagcgggcagtgacattggtgaggcagatgagggagaggggcctccagatgaatgaggtcacttttacagccttgatagatgggttctgcaagaagggattcttggatgatgcattgcttgcagtaagggggatgaagcaatgcagaataaagccttcagtggtgtgttataatgcacttattaatggttattgtatggtaggaagaatggatgaagcaagagagttactccatgaaatggaagctaaaggactgaagcctgacgttgtgacatacagtacgattatcagtgcgtactgtaagaattgtgatacacattctgcatttgaattgaaccaacagatgcttgagaagggtgttcttccagatgcaatcacctactcatcactcataagggttctttgtggggagaaacgactcagtgacgctcatgtgctcttcaaaaatatgattaagcttggcctacaacctgatgaatttacatacacatctcttattgatggccactgcaaggagggtaatgtggagagtgctctttctctgcacgataaaatggtaaaggcaggagttcttcctgatgttgtgacttacagtgtgcttattaatgggcttagtaaatcagcacgtgctatggaagcacaacagttgctcttcaaattataccatgaagatccaattccagcaaatactaaatatgatgccctgatgcattgttgtagaaaagctgagcttaagagtgtgttagctctcttgaagggattttgcatgaaaggtttaatgaatgaagctgataaagtttatcaatcaatgttagacagaaactggaatcttgacgggtctgtctacagtgtgcttattcatgggcattgtagggcaggaaatgttatgaaggctctcagcttccataagcaaatgctgcagggtggttttgctccaaattcaacaagcacgatttccttgattaggggtctatttgaaaatgggatggttgtggaagcagatcaggtaatgtggacgcagtcttagacgttctgcatggcatggcaaaggatggactgcttccaagtccaagatgagggtgattttcaacattcaagaaccaccctctctgtggaatactggagacctgatggtcatgtttggtacatattgtctcatgagtcataacacgagcatccgaatcagtgttatgtggtaagaacggtctgccctaaatcatgatgtgctccatatggaaaaggctgaaagaagttgcctcatgctgcattattgtgtaaactgagcaaccatttctatctcattaaccgctctgctcttaacaagtgaaatgaattttagttcttgataaatacttgattttgaagggcaggctggtttagtgatgagagttgtttcactaagtcaccggatcataggttcgaagcaacctctctgcatttgcagaggaaggctggtattgatttatcctttttctagaccccactcacgtgggagtctctggcactaggatgaagaattgcacgtctaaagggacagagatagttcagtgcatggaaaaccaatgcatatgacagaaaaaggaaaatgaaaaatgaaagcgtgaaatccacggaaaatgaggagcttgaagaaagtggaacatcaatggcaatggatgtatacaggtggtttgcacttacagatttcagctatctagcttgccgcctagtcctccatcttctctaccttcctcaagacctccgcttccctgtcggctattgccttggcctcctcgtcggtgaacggcgg

SEQ ID NO: 82437 - DNA, 3825 bp, Zea Mays
gggaggagaagaacaaaccctagagcagacggcgtaaacggacggcggcgcggcgggacggatgaagaccacagccaggggcaggaagcgaatcagggagctgctaatggtcatcagccgcgcgcgttgccaaatcttcaaagggcggacgatgccaataatgcaattgacgtcttcggaagtccaagtatctgaagcccaatgtagacgatgccaaataagcaaaaaatctcaaaatctagttgccgagacgaccgccacccccccccccccccccccgccgccgccgccgccactggcgctactcctatcggcggggggctgaagaatatggcagccgcctccgcctccacgcgacaagcgacggcggaggcgtgcagtagccacgtccaccacgcgcacctcgcggctctcctcaacgcttccgcgcgcttgcctccgctccctctcagccgcctccacctcccgctctcgctccccacggcctcccgcctcgtcgcgtccttccctccactcccgctcctcgtctgcttcctccgcgcgctccgcctcctcccctcctcgccgccgcgcccctttgactcgctcatcaagtcatatgcctcgctccccaaccgcgcctccctcgctgctgcggcgctcgcgttcgccaggtcagccgggtacgtgccctctgtgctcgcctacaacgccgtcctcctcgcgctctctgacgcgtcgctcacctccgctaggcgcttcttcgactccatgcttagcgacggcgtggcgcccaacgtgtacacctacaacatcctcgtccgcgcgctgtgcggccgcggacaccggaaagaagcgctcagcatcttgcgtgacatgcgcggcgcaggctgcggccccaatgtcgtgacttacaacacgctcgtcgcggcgttcttcagagccggggaggtggatggcgcggagaggctggtcggcatgatgcgtgagggcggcttgaagcccaacctggtgaccttcaattcaatggtgaatgggatgtgcaaggctgggaagatggaggacgcacgcaaggtgttcgatgaaatggtgagggagggtttggcgccggatggggtcagttacaacaccttagtgggtgggtattgcaaggcagggtgctcgcacgaggcattgtctgtgtttgcagagatgacgcagaaagggatcatgccagacgtcgtgacatttacgtcattgatccatgtaatgtgcaaggctgggaacttggagcgggcagtgacattggtgaggcagatgagggagaggggcctccagatgaatgaggtcacttttacagccttgatagatgggttctgcaagaagggattcttggatgatgcattgcttgcagtaagggggatgaagcaatgcagaataaagccttcagtggtgtgttataatgcacttattaatggttattgtatggtaggaagaatggatgaagcaagagagttactccatgaaatggaagctaaaggactgaagcctgacgttgtgacatacagtacgattatcagtgcgtactgtaagaattgtgatacacattctgcatttgaattgaaccaacagatgcttgagaagggtgttcttccagatgcaatcacctactcatcactcataagggttctttgtggggagaaacgactcagtgacgctcatgtgctcttcaaaaatatgattaagcttggcctacaacctgatgaatttacatacacatctcttattgatggccactgcaaggagggtaatgtggagagtgctctttctctgcacgataaaatggtaaaggcaggagttcttcctgatgttgtgacttacagtgtgcttattaatgggcttagtaaatcagcacgtgctatggaagcacaacagttgctcttcaaattataccatgaagatccaattccagcaaatactaaatatgatgccctgatgcattgttgtagaaaagctgagcttaagagtgtgttagctctcttgaagggattttgcatgaaaggtttaatgaatgaagctgataaagtttatcaatcaatgttagacagaaactggaatcttgacgggtctgtctacagtgtgcttattcatgggcattgtagggcaggaaatgttatgaaggctctcagcttccataagcaaatgctgcagggtggttttgctccaaattcaacaagcacgatttccttgattaggggtctatttgaaaatgggatggttgtggaagcagatcaggtgattcagcagttgttgaactattgttcccttgctgatgcagaagcatcaaaggctcttattgacctcaacttaaatgaaggtaatgtggacgcagtcttagacgttctgcatggcatggcaaaggatggactgcttccaagtccaagatgagggtgattttcaacattcaagaaccaccctctctgtggaatactggagacctgatggtcatgtttggtacatattgtctcatgagtcataacacgagcatccgaatcagtgttatgtggtaagaacggtctgccctaaatcatgatgtgctccatatggaaaaggctgaaagaagttgcctcatgctgcattattgtgtaaactgagcaaccatttctatctcattaaccgctctgctcttaacaagtgaaatgaattttagttcttgataaatacttgattttgaagggcaggctggtttagtgatgagagttgtttcactaagtcaccggatcataggttcgaagcaacctctctgcatttgcagaggaaggctggtattgatttatcctttttctagaccccactcacgtgggagtctctggcactaggtctgcccccttttataaatacttgattttgtattagcagctttttgtattgttgtttataataattattaggttagaaaaggttgtactgatattttatgatgtattacttattgtcttacttttagacactataataaaagatcttgatatatgtagttagtgaactcactaaggtggtctgatctttattcaacacacatttatcccttctgttacccgtctttttttaatacaagttttaaaaatcagtgctgtgtttgttatatttctaaaaaggatttacaattgcgcgatgagggtctacctaataatgtgaaactccatttcatagtcaacaataaatataatacatttgaaaagtaaaggctgacgaagcattgtcaaaggaaatgctgtaagtaactaattatttcatgaccagacgctggatatcttttttatgcctattgggttgacaactagtggcattcgcattcctgtggactacccgttgatttgtttgagcttttggtcatttttagactattagattttggactttccaaaagccaaactgctcccataagccaaatgccccaaagctcactgtactgagcttcttgtttttggcttccaggagctttttagcgtttaaaagcgttttgaaaggtctagaaacagaggtctaaaagcttccgggaagcccaaacaaacatgcctaacaggatgaagaattgcacgtctaaagggacagagatagttcagtgcatggaaaaccaatgcatatgacagaaaaaggaaaatgaaaaatgaaagcgtgaaatccacggaaaatgaggagcttgaagaaagtggaacatcaatggcaatggatgtatacaggtggtttgcacttacagatttcagctatctagcttgccgcctagtcctccatcttctctaccttcctcaagacctccgcttccctgtcggctattgccttggcctcctcgtcggtgaacggcgg

SEQ ID NO: 82438 - DNA, 3648 bp, Zea Mays
gggaggagaagaacaaaccctagagcagacggcgtaaacggacggcggcgcggcgggacggatgaagaccacagccaggggcaggaagcgaatcagggagctgctaatggtcatcagccgcgcgcgttgccaaatcttcaaagggcggacgatgccaataatgcaattgacgtcttcggaagtccaagtatctgaagcccaatgtagacgatgccaaataagcaaaaaatctcaaaatctagttgccgagacgaccgccacccccccccccccccccccgccgccgccgccgccactggcgctactcctatcggcggggggctgaagaatatggcagccgcctccgcctccacgcgacaagcgacggcggaggcgtgcagtagccacgtccaccacgcgcacctcgcggctctcctcaacgcttccgcgcgcttgcctccgctccctctcagccgcctccacctcccgctctcgctccccacggcctcccgcctcgtcgcgtccttccctccactcccgctcctcgtctgcttcctccgcgcgctccgcctcctcccctcctcgccgccgcgcccctttgactcgctcatcaagtcatatgcctcgctccccaaccgcgcctccctcgctgctgcggcgctcgcgttcgccaggtcagccgggcgcttcttcgactccatgcttagcgacggcgtggcgcccaacgtgtacacctacaacatcctcgtccgcgcgctgtgcggccgcggacaccggaaagaagcgctcagcatcttgcgtgacatgcgcggcgcaggctgcggccccaatgtcgtgacttacaacacgctcgtcgcggcgttcttcagagccggggaggtggatggcgcggagaggctggtcggcatgatgcgtgagggcggcttgaagcccaacctggtgaccttcaattcaatggtgaatgggatgtgcaaggctgggaagatggaggacgcacgcaaggtgttcgatgaaatggtgagggagggtttggcgccggatggggtcagttacaacaccttagtgggtgggtattgcaaggcagggtgctcgcacgaggcattgtctgtgtttgcagagatgacgcagaaagggatcatgccagacgtcgtgacatttacgtcattgatccatgtaatgtgcaaggctgggaacttggagcgggcagtgacattggtgaggcagatgagggagaggggcctccagatgaatgaggtcacttttacagccttgatagatgggttctgcaagaagggattcttggatgatgcattgcttgcagtaagggggatgaagcaatgcagaataaagccttcagtggtgtgttataatgcacttattaatggttattgtatggtaggaagaatggatgaagcaagagagttactccatgaaatggaagctaaaggactgaagcctgacgttgtgacatacagtacgattatcagtgcgtactgtaagaattgtgatacacattctgcatttgaattgaaccaacagatgcttgagaagggtgttcttccagatgcaatcacctactcatcactcataagggttctttgtggggagaaacgactcagtgacgctcatgtgctcttcaaaaatatgattaagcttggcctacaacctgatgaatttacatacacatctcttattgatggccactgcaaggagggtaatgtggagagtgctctttctctgcacgataaaatggtaaaggcaggagttcttcctgatgttgtgacttacagtgtgcttattaatgggcttagtaaatcagcacgtgctatggaagcacaacagttgctcttcaaattataccatgaagatccaattccagcaaatactaaatatgatgccctgatgcattgttgtagaaaagctgagcttaagagtgtgttagctctcttgaagggattttgcatgaaaggtttaatgaatgaagctgataaagtttatcaatcaatgttagacagaaactggaatcttgacgggtctgtctacagtgtgcttattcatgggcattgtagggcaggaaatgttatgaaggctctcagcttccataagcaaatgctgcagggtggttttgctccaaattcaacaagcacgatttccttgattaggggtctatttgaaaatgggatggttgtggaagcagatcaggtaatgtggacgcagtcttagacgttctgcatggcatggcaaaggatggactgcttccaagtccaagatgagggtgattttcaacattcaagaaccaccctctctgtggaatactggagacctgatggtcatgtttggtacatattgtctcatgagtcataacacgagcatccgaatcagtgttatgtggtaagaacggtctgccctaaatcatgatgtgctccatatggaaaaggctgaaagaagttgcctcatgctgcattattgtgtaaactgagcaaccatttctatctcattaaccgctctgctcttaacaagtgaaatgaattttagttcttgataaatacttgattttgaagggcaggctggtttagtgatgagagttgtttcactaagtcaccggatcataggttcgaagcaacctctctgcatttgcagaggaaggctggtattgatttatcctttttctagaccccactcacgtgggagtctctggcactaggtctgcccccttttataaatacttgattttgtattagcagctttttgtattgttgtttataataattattaggttagaaaaggttgtactgatattttatgatgtattacttattgtcttacttttagacactataataaaagatcttgatatatgtagttagtgaactcactaaggtggtctgatctttattcaacacacatttatcccttctgttacccgtctttttttaatacaagttttaaaaatcagtgctgtgtttgttatatttctaaaaaggatttacaattgcgcgatgagggtctacctaataatgtgaaactccatttcatagtcaacaataaatataatacatttgaaaagtaaaggctgacgaagcattgtcaaaggaaatgctgtaagtaactaattatttcatgaccagacgctggatatcttttttatgcctattgggttgacaactagtggcattcgcattcctgtggactacccgttgatttgtttgagcttttggtcatttttagactattagattttggactttccaaaagccaaactgctcccataagccaaatgccccaaagctcactgtactgagcttcttgtttttggcttccaggagctttttagcgtttaaaagcgttttgaaaggtctagaaacagaggtctaaaagcttccgggaagcccaaacaaacatgcctaacaggttcatcttacttcacagcaatacttgatttcatgatagggcagaagacactgcttcgtgccttctaactaattatatatattgttataaccaccttaaatctaatccatttgttttctaacggggcagtctactctctagtcttgtgcttccactatccttttttttccttagggactaaaacaaaatagcatgtttaacgtattctggtatcattctctgtatcatagatttatctagttaaagttgacaacacag

SEQ ID NO: 82439 - DNA, 2627 bp, Zea Mays
gatgatttctcactttgctagctgcggtggacaggtggtaaagtgaaccagctagaactggtaaaatgctggcatgtgattgggaaaacaaacagctgacatggtggtttcttttctgctacactcttgtttattaactatactcattacattctgtgttggagttattccagtcagtgcagttcttgcagacaaggatgtcatgctgtgtatcagaccatgggaacatggctgctgtttcaataatgcggaaggttgatcgacccccaaccaattcgaagtgtttaatcattgagtcaagtcaagaatgtttcagtgttgacattccatgctcgactgacatggcagaccctacaaatacgccttctgatggtgatcctccgcagcatagaaagacaagtgttgcagctgctgctaaaaacattgctatgcctaatgtggatgatgatgatgactttgagccacccaaaaagaagtgcaatatctcaatggatgccccaaataagacgcagaagctagaccccagggacatgactcttcgtattggtccagacaaagaactcaaaatcaccaagcagactgtccatcagatattgggtcttccaaatttgggtggtggaaagccccttaatattaatgaagcgaacgctgcggcaacacttcgggcctcattgaatattaccaaggatgagtttgttatttcaaagctccaagatagactgaggctaggccaggatgatgatctttctatcagatgtttttttctcattctcttcaaccggctgctattcccaacagctagctggtctatttctttcaatgaggttgtacttacagaagaaatggagcgattccctcaaattgattggtgccatctaatttttagtgacttatgtgaggctgcccagagatggcacaacaggagcattaacaatgtgtcggcgacgatatatggctgttccatcattgttcttctgtattatttggatcatttgcatcatgctgctgctccaaacaacaaaaatggcactccacgcataaagtattttaataagaatattataagggcgttgtcaatggccgataagcggaagcctcgccagggtggtgaaccatttggtgtttgcccttttcgtagcagcagtgagacatgttacgtctcaaaatcgccaactacttgccagattgagtttcctatgaggccagaaacttttgatgaagacccaaatcaacatgatcgacttcccaatataatcatccaactccctcttatgcaagacttgatggcaaataagattcagatgcttcctgtacatcaacgccagaagttccaagctacgttgattgattatgacttagaggttggcaaaatatttgcctctatcaagcaatgtttgaatactattggtacaaagcagtccaatctagccgctacatttggagaattgattgatgaggttcttcgggccgatgaatctgttacaccaaatactgttagtcagacagtggtaggtggcacagttgaaaatgattctggaccagtatttgacaagactcctattgggagtgtttctgcaccaggtctcttcttatctgaattagaatgtgctcgcgctcttcgggcatacttgtgttctaggttcattgaattggacagaaatataattgactttggtgaacatcgcgccaattgttgtgacatacaacaatcttttgctgatggcgcatgtctcgacaacgtgtttatgcaatgtgtcattgagtgtgtccgcgatgactggtctaaacatattcctccactcaatgctcaccagctcattctagatgttaatgttgggataatggtacccatgctacgatctggacattggacattgtatgttgttaatcttcagattggacgcatacatgtgttagattccaacccttatggaccagagatgggtgggactatctggaaaaattaccattgtatacctatggatttgggtgataggaaggtttcatgggccatgttaatgatgagtaggctcaatctagctattcaaaatgctcgaccaagatcagctctccctgcttttttgaagtaccctattgaactcatgaataactgcccaacaatgaaattggggtctaatgattgtggattctttgtcatgagatatatgcagaactacgactacatggttggagctatgaatgcagtcattgatccggataattcagaggacattcgctctcttgtactgcattacctaatattccatcgactaaatagaaacagcttcgtggtctcccatctggacagattcaagttctctcagtagtagcctagtatagtttactatcttaatattagtatgaacatcatggtctgatggcttttggtggcttcaagttatctcagttctagcttagtttagggtagtgtcactgaatggtgttcatgtacatattggtatgttggcttatgttaggattcagataatacttatgtccatatgcagctcttagcaaactcttatatatatcataccagatatgttttagatggttatatttatatatgatagttctgcactttatcatttgtcttatggtttttatatcttattcagtgatgttct

SEQ ID NO: 82440 - DNA, 3048 bp, Zea Mays
atttcttcttcttattaaaacctacacgggattgctgctcggagagcgatccacgaaaaacatttcgcagaaaggtccttggatttgtaggaaaacaacccgccatcacctgtactgtactcaagtgtagatgtcagttatagcactccggacctaactccatcatatttgatccactttcatacacatctccatacttattatgaatgaaaaactcattttatactaagtattgtatgaatctattaataatataaaacaaattttaatttagtactgagggagtaggtgttagtgcaaacacatagataataagtccatgtttttaatcactataaactcataaagttttatgaatttttttcctgaaatttggtttaacgtattttaactaactattgtatgtttggttcgtctagtttggatgatttctcactttgctagctgcggtggacaggtggtaaagtgaaccaggtagtaatcccatcacatggctatttgaaaggtgtgagagacttttgttctaaacacaacgttttgatgattgctgatgagatccaaattggcgtagctagaactggtaaaatgctggcatgtgattgggaaaacaaacagctgacatggtggtttcttttctgctacactcttgtttattaactatactcattacattctgtgttggagttattccagtcagtgcagttcttgcagacaaggatgtcatgctgtgtatcagaccatgggaacatggtagtatgaccaaatctctatacttttctctgctctcttttcttctttccaacttttctccgcttcaaggttttccaatcaaggaaaaaaaatgcttacgtgctgacgtcaaaacttagaattaggggcatgttgatgttcaaattgaagcatcaaagaaccatatagtgccgccggccaacagcagcatcaaagaacaatattgattgtcttgcaaagtgccgccggccaacagcagcatccaagattctcttcttctttttttttgtgagagggcctctagccgagttagttaggtggtctgacattcttcgggttctgggttcgacttgttgtggaagcgaattttagctgtggttaaaaaatcacctcaactgtctcacgccaaatcctatgtgaggaaatcttttcttaatataatactcggggctatcttatctcgtagatcgatttttttaatttctttttctcaatatattccttttttttgtctccacggagtgaactaatttagataaagtttgtgttaaatcactaacatgttgtttttactgtatttaccccatctttgatgttcgccagcctcgtgaagacagacaccctcgcagacgtcatttctttatgaatagtaagatgcatgcatcatcatgtatgatttaatcacagcctcaaggaaggactgaacggtcacagaaagtaccctcagtccataaatatatgacacgttgactttttaaaaaaactttgaccactcgtctcatttaaaaaagaatgagttattatttatttttatgatttattttatcacttaaggttgtttgtgtttgacttaaaattttatattttaaataaatattttgaataagggagtgactaaagtttttttaaaaaaagtcaacggtgtcatatatttgtgaatgaagttagtactggtttgtagatgtttaagtgccatatgaacttttgaacacaacacacatcttattaggtttttatgacagttaaaccctgtttggttagagggactaatctttagtccctaatttttagtccctattttgccaaacgaaggactgaattagggactaattagctttagtctttatgctctcacatgggtgctaaaagggaccaaatgacaatatttactccaattatccttgccttgcctagaaagctaacgtcatacacaataaacaagaaaatagatattttagtctttatgtgttgtatttaatgtatttagaatcttttttacaaccaaacaagatagtgactaaactttagtctatgactaatggagccaaacggggccttaatatagcgatctcattcatgattcgtggcactctgggttggacagcttgcaacatcttgaagccactgtagccctttaggtccttggtcatggccttatgctcagcaggttcagtttcatcggtggacgttcatgttccgttcctctttcaatcttcatacatatcaacgtcgagttgatgcagaacacaaatcggtaaaggcctctactgacgaatgcaggaaaccttggaaacctgctactgatcattgtcccggctgtatgcgttgaaagaagggaacccgtttgggaacgatcccaagcatttgctgctcatgcagtctcctactcgtccttgtccatgggccatggctgatggctgtagtgtaggttctgctctcttttagttccaaaaaggggcaacctgtcttgtttattcaaagatgttgttgtgtcaaaggtttagattactgagggggttaattattagggatccgctgtgtggagataagatttcagggaaatatttttagtggagcccctgtacatagtttttgaggaaaaaaatccttgaaagacttttgggcacggatcttaaaaccttttttagactacatctttgaacatcattgttgcacacagagtgcaaataactccagcttcatgttgtatcaaaattaaatagacataatatgtaatggtctactagttatatgtccgtgcattgcttcgtttatatatatatatatagtttatctattaagagccctgggctctatataactgtagagagccccagcccacgtccgatcactttttacgcaagcgaacagatttagcgtaaacggaaacccattttagcgtaaacagagtaacaaccgcgagccctacatgtttacgttattccattcttccgtttatacataatagtgatttagcataactacttcagccgacccacgttccagaaataaaggaatgggcccactaccccacttccc

SEQ ID NO: 82441 - DNA, 2951 bp, Zea Mays
atttcttcttcttattaaaacctacacgggattgctgctcggagagcgatccacgaaaaacatttcgcagaaaggtccttggatttgtaggaaaacaacccgccatcacctgtactgtactcaagtgtagatgtcagttatagcactccggacctaactccatcatatttgatccactttcatacacatctccatacttattatgaatgaaaaactcattttatactaagtattgtatgaatctattaataatataaaacaaattttaatttagtactgagggagtaggtgttagtgcaaacacatagataataagtccatgtttttaatcactataaactcataaagttttatgaatttttttcctgaaatttggtttaacgtattttaactaactattgtatgtttggttcgtctagtttggatgatttctcactttgctagctgcggtggacaggtggtaaagtgaaccagctagaactggtaaaatgctggcatgtgattgggaaaacaaacagctgacatggtggtttcttttctgctacactcttgtttattaactatactcattacattctgtgttggagttattccagtcagtgcagttcttgcagacaaggatgtcatgctgtgtatcagaccatgggaacatggtagtatgaccaaatctctatacttttctctgctctcttttcttctttccaacttttctccgcttcaaggttttccaatcaaggaaaaaaaatgcttacgtgctgacgtcaaaacttagaattaggggcatgttgatgttcaaattgaagcatcaaagaaccatatagtgccgccggccaacagcagcatcaaagaacaatattgattgtcttgcaaagtgccgccggccaacagcagcatccaagattctcttcttctttttttttgtgagagggcctctagccgagttagttaggtggtctgacattcttcgggttctgggttcgacttgttgtggaagcgaattttagctgtggttaaaaaatcacctcaactgtctcacgccaaatcctatgtgaggaaatcttttcttaatataatactcggggctatcttatctcgtagatcgatttttttaatttctttttctcaatatattccttttttttgtctccacggagtgaactaatttagataaagtttgtgttaaatcactaacatgttgtttttactgtatttaccccatctttgatgttcgccagcctcgtgaagacagacaccctcgcagacgtcatttctttatgaatagtaagatgcatgcatcatcatgtatgatttaatcacagcctcaaggaaggactgaacggtcacagaaagtaccctcagtccataaatatatgacacgttgactttttaaaaaaactttgaccactcgtctcatttaaaaaagaatgagttattatttatttttatgatttattttatcacttaaggttgtttgtgtttgacttaaaattttatattttaaataaatattttgaataagggagtgactaaagtttttttaaaaaaagtcaacggtgtcatatatttgtgaatgaagttagtactggtttgtagatgtttaagtgccatatgaacttttgaacacaacacacatcttattaggtttttatgacagttaaaccctgtttggttagagggactaatctttagtccctaatttttagtccctattttgccaaacgaaggactgaattagggactaattagctttagtctttatgctctcacatgggtgctaaaagggaccaaatgacaatatttactccaattatccttgccttgcctagaaagctaacgtcatacacaataaacaagaaaatagatattttagtctttatgtgttgtatttaatgtatttagaatcttttttacaaccaaacaagatagtgactaaactttagtctatgactaatggagccaaacggggccttaatatagcgatctcattcatgattcgtggcactctgggttggacagcttgcaacatcttgaagccactgtagccctttaggtccttggtcatggccttatgctcagcaggttcagtttcatcggtggacgttcatgttccgttcctctttcaatcttcatacatatcaacgtcgagttgatgcagaacacaaatcggtaaaggcctctactgacgaatgcaggaaaccttggaaacctgctactgatcattgtcccggctgtatgcgttgaaagaagggaacccgtttgggaacgatcccaagcatttgctgctcatgcagtctcctactcgtccttgtccatgggccatggctgatggctgtagtgtaggttctgctctcttttagttccaaaaaggggcaacctgtcttgtttattcaaagatgttgttgtgtcaaaggtttagattactgagggggttaattattagggatccgctgtgtggagataagatttcagggaaatatttttagtggagcccctgtacatagtttttgaggaaaaaaatccttgaaagacttttgggcacggatcttaaaaccttttttagactacatctttgaacatcattgttgcacacagagtgcaaataactccagcttcatgttgtatcaaaattaaatagacataatatgtaatggtctactagttatatgtccgtgcattgcttcgtttatatatatatatatagtttatctattaagagccctgggctctatataactgtagagagccccagcccacgtccgatcactttttacgcaagcgaacagatttagcgtaaacggaaacccattttagcgtaaacagagtaacaaccgcgagccctacatgtttacgttattccattcttccgtttatacataatagtgatttagcataactacttcagccgacccacgttccagaaataaaggaatgggcccactaccccacttccc

SEQ ID NO: 82442 - DNA, 2947 bp, Zea Mays
atttcttcttcttattaaaacctacacgggattgctgctcggagagcgatccacgaaaaacatttcgcagaaaggtccttggatttgtaggaaaacaacccgccatcacctgtactgtactcaagtgtagatgtcagttatagcactccggacctaactccatcatatttgatccactttcatacacatctccatacttattatgaatgaaaaactcattttatactaagtattgtatgaatctattaataatataaaacaaattttaatttagtactgagggagtaggtgttagtgcaaacacatagataataagtccatgtttttaatcactataaactcataaagttttatgaatttttttcctgaaatttggtttaacgtattttaactaactattgtatgtttggttcgtctagtttggatgatttctcactttgctagctgcggtggacaggtggtaaagtgaaccagaactggtaaaatgctggcatgtgattgggaaaacaaacagctgacatggtggtttcttttctgctacactcttgtttattaactatactcattacattctgtgttggagttattccagtcagtgcagttcttgcagacaaggatgtcatgctgtgtatcagaccatgggaacatggtagtatgaccaaatctctatacttttctctgctctcttttcttctttccaacttttctccgcttcaaggttttccaatcaaggaaaaaaaatgcttacgtgctgacgtcaaaacttagaattaggggcatgttgatgttcaaattgaagcatcaaagaaccatatagtgccgccggccaacagcagcatcaaagaacaatattgattgtcttgcaaagtgccgccggccaacagcagcatccaagattctcttcttctttttttttgtgagagggcctctagccgagttagttaggtggtctgacattcttcgggttctgggttcgacttgttgtggaagcgaattttagctgtggttaaaaaatcacctcaactgtctcacgccaaatcctatgtgaggaaatcttttcttaatataatactcggggctatcttatctcgtagatcgatttttttaatttctttttctcaatatattccttttttttgtctccacggagtgaactaatttagataaagtttgtgttaaatcactaacatgttgtttttactgtatttaccccatctttgatgttcgccagcctcgtgaagacagacaccctcgcagacgtcatttctttatgaatagtaagatgcatgcatcatcatgtatgatttaatcacagcctcaaggaaggactgaacggtcacagaaagtaccctcagtccataaatatatgacacgttgactttttaaaaaaactttgaccactcgtctcatttaaaaaagaatgagttattatttatttttatgatttattttatcacttaaggttgtttgtgtttgacttaaaattttatattttaaataaatattttgaataagggagtgactaaagtttttttaaaaaaagtcaacggtgtcatatatttgtgaatgaagttagtactggtttgtagatgtttaagtgccatatgaacttttgaacacaacacacatcttattaggtttttatgacagttaaaccctgtttggttagagggactaatctttagtccctaatttttagtccctattttgccaaacgaaggactgaattagggactaattagctttagtctttatgctctcacatgggtgctaaaagggaccaaatgacaatatttactccaattatccttgccttgcctagaaagctaacgtcatacacaataaacaagaaaatagatattttagtctttatgtgttgtatttaatgtatttagaatcttttttacaaccaaacaagatagtgactaaactttagtctatgactaatggagccaaacggggccttaatatagcgatctcattcatgattcgtggcactctgggttggacagcttgcaacatcttgaagccactgtagccctttaggtccttggtcatggccttatgctcagcaggttcagtttcatcggtggacgttcatgttccgttcctctttcaatcttcatacatatcaacgtcgagttgatgcagaacacaaatcggtaaaggcctctactgacgaatgcaggaaaccttggaaacctgctactgatcattgtcccggctgtatgcgttgaaagaagggaacccgtttgggaacgatcccaagcatttgctgctcatgcagtctcctactcgtccttgtccatgggccatggctgatggctgtagtgtaggttctgctctcttttagttccaaaaaggggcaacctgtcttgtttattcaaagatgttgttgtgtcaaaggtttagattactgagggggttaattattagggatccgctgtgtggagataagatttcagggaaatatttttagtggagcccctgtacatagtttttgaggaaaaaaatccttgaaagacttttgggcacggatcttaaaaccttttttagactacatctttgaacatcattgttgcacacagagtgcaaataactccagcttcatgttgtatcaaaattaaatagacataatatgtaatggtctactagttatatgtccgtgcattgcttcgtttatatatatatatatagtttatctattaagagccctgggctctatataactgtagagagccccagcccacgtccgatcactttttacgcaagcgaacagatttagcgtaaacggaaacccattttagcgtaaacagagtaacaaccgcgagccctacatgtttacgttattccattcttccgtttatacataatagtgatttagcataactacttcagccgacccacgttccagaaataaaggaatgggcccactaccccacttccc

SEQ ID NO: 82443 - DNA, 2611 bp, Zea Mays
cacaaagtccattattagcaagacaagactacaagatgaaatgggaatggttctgcagtttgtaggctatgctctgttcacagtttggatgatttctcactttgctagctgcggtggacaggtggtaaagtgaaccagaactggtaaaatgctggcatgtgattgggaaaacaaacagctgacatggtggtttcttttctgctacactcttgtttattaactatactcattacattctgtgttggagttattccagtcagtgcagttcttgcagacaaggatgtcatgctgtgtatcagaccatgggaacatggtagtatgaccaaatctctatacttttctctgctctcttttcttctttccaacttttctccgcttcaaggttttccaatcaaggaaaaaaaatgcttacgtgctgacgtcaaaacttagaattaggggcatgttgatgttcaaattgaagcatcaaagaaccatatagtgccgccggccaacagcagcatcaaagaacaatattgattgtcttgcaaagtgccgccggccaacagcagcatccaagattctcttcttctttttttttgtgagagggcctctagccgagttagttaggtggtctgacattcttcgggttctgggttcgacttgttgtggaagcgaattttagctgtggttaaaaaatcacctcaactgtctcacgccaaatcctatgtgaggaaatcttttcttaatataatactcggggctatcttatctcgtagatcgatttttttaatttctttttctcaatatattccttttttttgtctccacggagtgaactaatttagataaagtttgtgttaaatcactaacatgttgtttttactgtatttaccccatctttgatgttcgccagcctcgtgaagacagacaccctcgcagacgtcatttctttatgaatagtaagatgcatgcatcatcatgtatgatttaatcacagcctcaaggaaggactgaacggtcacagaaagtaccctcagtccataaatatatgacacgttgactttttaaaaaaactttgaccactcgtctcatttaaaaaagaatgagttattatttatttttatgatttattttatcacttaaggttgtttgtgtttgacttaaaattttatattttaaataaatattttgaataagggagtgactaaagtttttttaaaaaaagtcaacggtgtcatatatttgtgaatgaagttagtactggtttgtagatgtttaagtgccatatgaacttttgaacacaacacacatcttattaggtttttatgacagttaaaccctgtttggttagagggactaatctttagtccctaatttttagtccctattttgccaaacgaaggactgaattagggactaattagctttagtctttatgctctcacatgggtgctaaaagggaccaaatgacaatatttactccaattatccttgccttgcctagaaagctaacgtcatacacaataaacaagaaaatagatattttagtctttatgtgttgtatttaatgtatttagaatcttttttacaaccaaacaagatagtgactaaactttagtctatgactaatggagccaaacggggccttaatatagcgatctcattcatgattcgtggcactctgggttggacagcttgcaacatcttgaagccactgtagccctttaggtccttggtcatggccttatgctcagcaggttcagtttcatcggtggacgttcatgttccgttcctctttcaatcttcatacatatcaacgtcgagttgatgcagaacacaaatcggtaaaggcctctactgacgaatgcaggaaaccttggaaacctgctactgatcattgtcccggctgtatgcgttgaaagaagggaacccgtttgggaacgatcccaagcatttgctgctcatgcagtctcctactcgtccttgtccatgggccatggctgatggctgtagtgtaggttctgctctcttttagttccaaaaaggggcaacctgtcttgtttattcaaagatgttgttgtgtcaaaggtttagattactgagggggttaattattagggatccgctgtgtggagataagatttcagggaaatatttttagtggagcccctgtacatagtttttgaggaaaaaaatccttgaaagacttttgggcacggatcttaaaaccttttttagactacatctttgaacatcattgttgcacacagagtgcaaataactccagcttcatgttgtatcaaaattaaatagacataatatgtaatggtctactagttatatgtccgtgcattgcttcgtttatatatatatatatagtttatctattaagagccctgggctctatataactgtagagagccccagcccacgtccgatcactttttacgcaagcgaacagatttagcgtaaacggaaacccattttagcgtaaacagagtaacaaccgcgagccctacatgtttacgttattccattcttccgtttatacataatagtgatttagcataactacttcagccgacccacgttccagaaataaaggaatgggcccactaccccacttccc

SEQ ID NO: 82444 - DNA, 2712 bp, Zea Mays
cacaaagtccattattagcaagacaagactacaagatgaaatgggaatggttctgcagtttgtaggctatgctctgttcacagtttggatgatttctcactttgctagctgcggtggacaggtggtaaagtgaaccaggtagtaatcccatcacatggctatttgaaaggtgtgagagacttttgttctaaacacaacgttttgatgattgctgatgagatccaaattggcgtagctagaactggtaaaatgctggcatgtgattgggaaaacaaacagctgacatggtggtttcttttctgctacactcttgtttattaactatactcattacattctgtgttggagttattccagtcagtgcagttcttgcagacaaggatgtcatgctgtgtatcagaccatgggaacatggtagtatgaccaaatctctatacttttctctgctctcttttcttctttccaacttttctccgcttcaaggttttccaatcaaggaaaaaaaatgcttacgtgctgacgtcaaaacttagaattaggggcatgttgatgttcaaattgaagcatcaaagaaccatatagtgccgccggccaacagcagcatcaaagaacaatattgattgtcttgcaaagtgccgccggccaacagcagcatccaagattctcttcttctttttttttgtgagagggcctctagccgagttagttaggtggtctgacattcttcgggttctgggttcgacttgttgtggaagcgaattttagctgtggttaaaaaatcacctcaactgtctcacgccaaatcctatgtgaggaaatcttttcttaatataatactcggggctatcttatctcgtagatcgatttttttaatttctttttctcaatatattccttttttttgtctccacggagtgaactaatttagataaagtttgtgttaaatcactaacatgttgtttttactgtatttaccccatctttgatgttcgccagcctcgtgaagacagacaccctcgcagacgtcatttctttatgaatagtaagatgcatgcatcatcatgtatgatttaatcacagcctcaaggaaggactgaacggtcacagaaagtaccctcagtccataaatatatgacacgttgactttttaaaaaaactttgaccactcgtctcatttaaaaaagaatgagttattatttatttttatgatttattttatcacttaaggttgtttgtgtttgacttaaaattttatattttaaataaatattttgaataagggagtgactaaagtttttttaaaaaaagtcaacggtgtcatatatttgtgaatgaagttagtactggtttgtagatgtttaagtgccatatgaacttttgaacacaacacacatcttattaggtttttatgacagttaaaccctgtttggttagagggactaatctttagtccctaatttttagtccctattttgccaaacgaaggactgaattagggactaattagctttagtctttatgctctcacatgggtgctaaaagggaccaaatgacaatatttactccaattatccttgccttgcctagaaagctaacgtcatacacaataaacaagaaaatagatattttagtctttatgtgttgtatttaatgtatttagaatcttttttacaaccaaacaagatagtgactaaactttagtctatgactaatggagccaaacggggccttaatatagcgatctcattcatgattcgtggcactctgggttggacagcttgcaacatcttgaagccactgtagccctttaggtccttggtcatggccttatgctcagcaggttcagtttcatcggtggacgttcatgttccgttcctctttcaatcttcatacatatcaacgtcgagttgatgcagaacacaaatcggtaaaggcctctactgacgaatgcaggaaaccttggaaacctgctactgatcattgtcccggctgtatgcgttgaaagaagggaacccgtttgggaacgatcccaagcatttgctgctcatgcagtctcctactcgtccttgtccatgggccatggctgatggctgtagtgtaggttctgctctcttttagttccaaaaaggggcaacctgtcttgtttattcaaagatgttgttgtgtcaaaggtttagattactgagggggttaattattagggatccgctgtgtggagataagatttcagggaaatatttttagtggagcccctgtacatagtttttgaggaaaaaaatccttgaaagacttttgggcacggatcttaaaaccttttttagactacatctttgaacatcattgttgcacacagagtgcaaataactccagcttcatgttgtatcaaaattaaatagacataatatgtaatggtctactagttatatgtccgtgcattgcttcgtttatatatatatatatagtttatctattaagagccctgggctctatataactgtagagagccccagcccacgtccgatcactttttacgcaagcgaacagatttagcgtaaacggaaacccattttagcgtaaacagagtaacaaccgcgagccctacatgtttacgttattccattcttccgtttatacataatagtgatttagcataactacttcagccgacccacgttccagaaataaaggaatgggcccactaccccacttccc

SEQ ID NO: 82445 - DNA, 2502 bp, Zea Mays
cacaaagtccattattagcaagacaagactacaagatgaaatgggaatggttctgcagtttgtaggctatgctctgttcacagtttggatgatttctcactttgctagctgcggtggacaggtggtaaagtgaaccagctagaactggtaaaatgctggcatgtgattgggaaaacaaacagctgacatggtggtttcttttctgctacactcttgtttattaactatactcattacattctgtgttggagttattccagtcagtgcagttcttgcagacaaggatgtcatgctgtgtatcagaccatgggaacatggtagtatgaccaaatctctatacttttctctgctctcttttcttctttccaacttttctccgcttcaaggttttccaatcaaggaaaaaaaatgcttacgtgctgacgtcaaaacttagaattaggggcatgttgatgttcaaattgaagcatcaaagaaccatatagtgccgccggccaacagcagcatcaaagaacaatattgattgtcttgcaaagtgccgccggccaacagcagcatccaagattctcttcttctttttttttgtgagagggcctctagccgagttagttaggtggtctgacattcttcgggttctgggttcgacttgttgtggaagcgaattttagctgtggttaaaaaatcacctcaactgtctcacgccaaatcctatgtgaggaaatcttttcttaatataatactcggggctatcttatctcgtagatcgatttttttaatttctttttctcaatatattccttttttttgtctccacggagtgaactaatttagataaagtttgtgttaaatcactaacatgttgtttttactgtatttaccccatctttgatgttcgccagcctcgtgaagacagacaccctcgcagacgtcatttctttatgaatagtaagatgcatgcatcatcatgtatgatttaatcacagcctcaaggaaggactgaacggtcacagaaagtaccctcagtccataaatatatgacacgttgactttttaaaaaaactttgaccactcgtctcatttaaaaaagaatgagttattatttatttttatgatttattttatcacttaaggttgtttgtgtttgacttaaaattttatattttaaataaatattttgaataagggagtgactaaagtttttttaaaaaaagtcaacggtgtcatatatttgtgaatgaagttagtactggtttgtagatgtttaagtgccatatgaacttttgaacacaacacacatcttattaggtttttatgacagttaaaccctgtttggttagagggactaatctttagtccctaatttttagtccctattttgccaaacgaaggactgaattagggactaattagctttagtctttatgctctcacatgggtgctaaaagggaccaaatgacaatatttactccaattatccttgccttgcctagaaagctaacgtcatacacaataaacaagaaaatagatattttagtctttatgtgttgtatttaatgtatttagaatcttttttacaaccaaacaagatagtgactaaactttagtctatgactaatggagccaaacggggccttaatatagcgatctcattcatgattcgtggcactctgggttggacagcttgcaacatcttgaagccactgtagccctttaggtccttggtcatggccttatgctcagcaggaaaccttggaaacctgctactgatcattgtcccggctgtatgcgttgaaagaagggaacccgtttgggaacgatcccaagcatttgctgctcatgcagtctcctactcgtccttgtccatgggccatggctgatggctgtagtgtaggttctgctctcttttagttccaaaaaggggcaacctgtcttgtttattcaaagatgttgttgtgtcaaaggtttagattactgagggggttaattattagggatccgctgtgtggagataagatttcagggaaatatttttagtggagcccctgtacatagtttttgaggaaaaaaatccttgaaagacttttgggcacggatcttaaaaccttttttagactacatctttgaacatcattgttgcacacagagtgcaaataactccagcttcatgttgtatcaaaattaaatagacataatatgtaatggtctactagttatatgtccgtgcattgcttcgtttatatatatatatatagtttatctattaagagccctgggctctatataactgtagagagccccagcccacgtccgatcactttttacgcaagcgaacagatttagcgtaaacggaaacccattttagcgtaaacagagtaacaaccgcgagccctacatgtttacgttattccattcttccgtttatacataatagtgatttagcataactacttcagccgacccacgttccagaaataaaggaatgggcccactaccccacttccc

SEQ ID NO: 82446 - DNA, 2777 bp, Zea Mays
atgggcccttcctcccccgcgctcgcccctacggcgaccgagctccaaagcagcgccaccgccagatccgcccgcctccggccgtccccggctcctgccggctgcaccaagtcagatccaaccccgcccccccctccagcaccaccagctcgccctcctgtgtcccagctcccaccgccaccgccctcacatctaccgccggcccgcccttctgatccaactgcatgccgtgcgccggcggccccctaccaaaccaagcggtttggatgatttctcactttgctagctgcggtggacaggtggtaaagtgaaccaggtagtaatcccatcacatggctatttgaaaggtgtgagagacttttgttctaaacacaacgttttgatgattgctgatgagatccaaattggcgtagctagaactggtaaaatgctggcatgtgattgggaaaacaaacagctgacatggtggtttcttttctgctacactcttgtttattaactatactcattacattctgtgttggagttattccagtcagtgcagttcttgcagacaaggatgtcatgctgtgtatcagaccatgggaacatggtagtatgaccaaatctctatacttttctctgctctcttttcttctttccaacttttctccgcttcaaggttttccaatcaaggaaaaaaaatgcttacgtgctgacgtcaaaacttagaattaggggcatgttgatgttcaaattgaagcatcaaagaaccatatagtgccgccggccaacagcagcatcaaagaacaatattgattgtcttgcaaagtgccgccggccaacagcagcatccaagattctcttcttctttttttttgtgagagggcctctagccgagttagttaggtggtctgacattcttcgggttctgggttcgacttgttgtggaagcgaattttagctgtggttaaaaaatcacctcaactgtctcacgccaaatcctatgtgaggaaatcttttcttaatataatactcggggctatcttatctcgtagatcgatttttttaatttctttttctcaatatattccttttttttgtctccacggagtgaactaatttagataaagtttgtgttaaatcactaacatgttgtttttactgtatttaccccatctttgatgttcgccagcctcgtgaagacagacaccctcgcagacgtcatttctttatgaatagtaagatgcatgcatcatcatgtatgatttaatcacagcctcaaggaaggactgaacggtcacagaaagtaccctcagtccataaatatatgacacgttgactttttaaaaaaactttgaccactcgtctcatttaaaaaagaatgagttattatttatttttatgatttattttatcacttaaggttgtttgtgtttgacttaaaattttatattttaaataaatattttgaataagggagtgactaaagtttttttaaaaaaagtcaacggtgtcatatatttgtgaatgaagttagtactggtttgtagatgtttaagtgccatatgaacttttgaacacaacacacatcttattaggtttttatgacagttaaaccctgtttggttagagggactaatctttagtccctaatttttagtccctattttgccaaacgaaggactgaattagggactaattagctttagtctttatgctctcacatgggtgctaaaagggaccaaatgacaatatttactccaattatccttgccttgcctagaaagctaacgtcatacacaataaacaagaaaatagatattttagtctttatgtgttgtatttaatgtatttagaatcttttttacaaccaaacaagatagtgactaaactttagtctatgactaatggagccaaacggggccttaatatagcgatctcattcatgattcgtggcactctgggttggacagcttgcaacatcttgaagccactgtagccctttaggtccttggtcatggccttatgctcagcaggaaaccttggaaacctgctactgatcattgtcccggctgtatgcgttgaaagaagggaacccgtttgggaacgatcccaagcatttgctgctcatgcagtctcctactcgtccttgtccatgggccatggctgatggctgtagtgtaggttctgctctcttttagttccaaaaaggggcaacctgtcttgtttattcaaagatgttgttgtgtcaaaggtttagattactgagggggttaattattagggatccgctgtgtggagataagatttcagggaaatatttttagtggagcccctgtacatagtttttgaggaaaaaaatccttgaaagacttttgggcacggatcttaaaaccttttttagactacatctttgaacatcattgttgcacacagagtgcaaataactccagcttcatgttgtatcaaaattaaatagacataatatgtaatggtctactagttatatgtccgtgcattgcttcgtttatatatatatatatagtttatctattaagagccctgggctctatataactgtagagagccccagcccacgtccgatcactttttacgcaagcgaacagatttagcgtaaacggaaacccattttagcgtaaacagagtaacaaccgcgagccctacatgtttacgttattccattcttccgtttatacataatagtgatttagcataactacttcagccgacccacgttccagaaataaaggaatgggcccactaccccacttccc

SEQ ID NO: 82447 - DNA, 3148 bp, Zea Mays
atgggcccttcctcccccgcgctcgcccctacggcgaccgagctccaaagcagcgccaccgccagatccgcccgcctccggccgtccccggctcctgccggctgcaccaagtcagatccaaccccgcccccccctccagcaccaccagctcgccctcctgtgtcccagctcccaccgccaccgccctcacatctaccgccggcccgcccttctgatccaactgcatgccgtgcgccggcggccccctaccaaaccaagcgggtgaggtttgcattcactgcaagcaccacgccgccccgcattcactacccctccgccgtatcccgcagccacagtgccacccccgccccgacagctggttcgaagcccccgtctggaagctgcgaccgcattgaagatgaggatcttgaaggatggacgacgattcggcgcaggcgtggacgcgccgcccgcgcaggcctaggctgcgccccagcggcgcctcgccttctctcagcccatgcccctagccgtctgatgtttggatgatttctcactttgctagctgcggtggacaggtggtaaagtgaaccaggtagtaatcccatcacatggctatttgaaaggtgtgagagacttttgttctaaacacaacgttttgatgattgctgatgagatccaaattggcgtagctagaactggtaaaatgctggcatgtgattgggaaaacaaacagctgacatggtggtttcttttctgctacactcttgtttattaactatactcattacattctgtgttggagttattccagtcagtgcagttcttgcagacaaggatgtcatgctgtgtatcagaccatgggaacatggtagtatgaccaaatctctatacttttctctgctctcttttcttctttccaacttttctccgcttcaaggttttccaatcaaggaaaaaaaatgcttacgtgctgacgtcaaaacttagaattaggggcatgttgatgttcaaattgaagcatcaaagaaccatatagtgccgccggccaacagcagcatcaaagaacaatattgattgtcttgcaaagtgccgccggccaacagcagcatccaagattctcttcttctttttttttgtgagagggcctctagccgagttagttaggtggtctgacattcttcgggttctgggttcgacttgttgtggaagcgaattttagctgtggttaaaaaatcacctcaactgtctcacgccaaatcctatgtgaggaaatcttttcttaatataatactcggggctatcttatctcgtagatcgatttttttaatttctttttctcaatatattccttttttttgtctccacggagtgaactaatttagataaagtttgtgttaaatcactaacatgttgtttttactgtatttaccccatctttgatgttcgccagcctcgtgaagacagacaccctcgcagacgtcatttctttatgaatagtaagatgcatgcatcatcatgtatgatttaatcacagcctcaaggaaggactgaacggtcacagaaagtaccctcagtccataaatatatgacacgttgactttttaaaaaaactttgaccactcgtctcatttaaaaaagaatgagttattatttatttttatgatttattttatcacttaaggttgtttgtgtttgacttaaaattttatattttaaataaatattttgaataagggagtgactaaagtttttttaaaaaaagtcaacggtgtcatatatttgtgaatgaagttagtactggtttgtagatgtttaagtgccatatgaacttttgaacacaacacacatcttattaggtttttatgacagttaaaccctgtttggttagagggactaatctttagtccctaatttttagtccctattttgccaaacgaaggactgaattagggactaattagctttagtctttatgctctcacatgggtgctaaaagggaccaaatgacaatatttactccaattatccttgccttgcctagaaagctaacgtcatacacaataaacaagaaaatagatattttagtctttatgtgttgtatttaatgtatttagaatcttttttacaaccaaacaagatagtgactaaactttagtctatgactaatggagccaaacggggccttaatatagcgatctcattcatgattcgtggcactctgggttggacagcttgcaacatcttgaagccactgtagccctttaggtccttggtcatggccttatgctcagcaggttcagtttcatcggtggacgttcatgttccgttcctctttcaatcttcatacatatcaacgtcgagttgatgcagaacacaaatcggtaaaggcctctactgacgaatgcaggaaaccttggaaacctgctactgatcattgtcccggctgtatgcgttgaaagaagggaacccgtttgggaacgatcccaagcatttgctgctcatgcagtctcctactcgtccttgtccatgggccatggctgatggctgtagtgtaggttctgctctcttttagttccaaaaaggggcaacctgtcttgtttattcaaagatgttgttgtgtcaaaggtttagattactgagggggttaattattagggatccgctgtgtggagataagatttcagggaaatatttttagtggagcccctgtacatagtttttgaggaaaaaaatccttgaaagacttttgggcacggatcttaaaaccttttttagactacatctttgaacatcattgttgcacacagagtgcaaataactccagcttcatgttgtatcaaaattaaatagacataatatgtaatggtctactagttatatgtccgtgcattgcttcgtttatatatatatatatagtttatctattaagagccctgggctctatataactgtagagagccccagcccacgtccgatcactttttacgcaagcgaacagatttagcgtaaacggaaacccattttagcgtaaacagagtaacaaccgcgagccctacatgtttacgttattccattcttccgtttatacataatagtgatttagcataactacttcagccgacccacgttccagaaataaaggaatgggcccactaccccacttccc

SEQ ID NO: 82448 - DNA, 3047 bp, Zea Mays
atgggcccttcctcccccgcgctcgcccctacggcgaccgagctccaaagcagcgccaccgccagatccgcccgcctccggccgtccccggctcctgccggctgcaccaagtcagatccaaccccgcccccccctccagcaccaccagctcgccctcctgtgtcccagctcccaccgccaccgccctcacatctaccgccggcccgcccttctgatccaactgcatgccgtgcgccggcggccccctaccaaaccaagcgggtgaggtttgcattcactgcaagcaccacgccgccccgcattcactacccctccgccgtatcccgcagccacagtgccacccccgccccgacagctggttcgaagcccccgtctggaagctgcgaccgcattgaagatgaggatcttgaaggatggacgacgattcggcgcaggcgtggacgcgccgcccgcgcaggcctaggctgcgccccagcggcgcctcgccttctctcagcccatgcccctagccgtctgatgtttggatgatttctcactttgctagctgcggtggacaggtggtaaagtgaaccagaactggtaaaatgctggcatgtgattgggaaaacaaacagctgacatggtggtttcttttctgctacactcttgtttattaactatactcattacattctgtgttggagttattccagtcagtgcagttcttgcagacaaggatgtcatgctgtgtatcagaccatgggaacatggtagtatgaccaaatctctatacttttctctgctctcttttcttctttccaacttttctccgcttcaaggttttccaatcaaggaaaaaaaatgcttacgtgctgacgtcaaaacttagaattaggggcatgttgatgttcaaattgaagcatcaaagaaccatatagtgccgccggccaacagcagcatcaaagaacaatattgattgtcttgcaaagtgccgccggccaacagcagcatccaagattctcttcttctttttttttgtgagagggcctctagccgagttagttaggtggtctgacattcttcgggttctgggttcgacttgttgtggaagcgaattttagctgtggttaaaaaatcacctcaactgtctcacgccaaatcctatgtgaggaaatcttttcttaatataatactcggggctatcttatctcgtagatcgatttttttaatttctttttctcaatatattccttttttttgtctccacggagtgaactaatttagataaagtttgtgttaaatcactaacatgttgtttttactgtatttaccccatctttgatgttcgccagcctcgtgaagacagacaccctcgcagacgtcatttctttatgaatagtaagatgcatgcatcatcatgtatgatttaatcacagcctcaaggaaggactgaacggtcacagaaagtaccctcagtccataaatatatgacacgttgactttttaaaaaaactttgaccactcgtctcatttaaaaaagaatgagttattatttatttttatgatttattttatcacttaaggttgtttgtgtttgacttaaaattttatattttaaataaatattttgaataagggagtgactaaagtttttttaaaaaaagtcaacggtgtcatatatttgtgaatgaagttagtactggtttgtagatgtttaagtgccatatgaacttttgaacacaacacacatcttattaggtttttatgacagttaaaccctgtttggttagagggactaatctttagtccctaatttttagtccctattttgccaaacgaaggactgaattagggactaattagctttagtctttatgctctcacatgggtgctaaaagggaccaaatgacaatatttactccaattatccttgccttgcctagaaagctaacgtcatacacaataaacaagaaaatagatattttagtctttatgtgttgtatttaatgtatttagaatcttttttacaaccaaacaagatagtgactaaactttagtctatgactaatggagccaaacggggccttaatatagcgatctcattcatgattcgtggcactctgggttggacagcttgcaacatcttgaagccactgtagccctttaggtccttggtcatggccttatgctcagcaggttcagtttcatcggtggacgttcatgttccgttcctctttcaatcttcatacatatcaacgtcgagttgatgcagaacacaaatcggtaaaggcctctactgacgaatgcaggaaaccttggaaacctgctactgatcattgtcccggctgtatgcgttgaaagaagggaacccgtttgggaacgatcccaagcatttgctgctcatgcagtctcctactcgtccttgtccatgggccatggctgatggctgtagtgtaggttctgctctcttttagttccaaaaaggggcaacctgtcttgtttattcaaagatgttgttgtgtcaaaggtttagattactgagggggttaattattagggatccgctgtgtggagataagatttcagggaaatatttttagtggagcccctgtacatagtttttgaggaaaaaaatccttgaaagacttttgggcacggatcttaaaaccttttttagactacatctttgaacatcattgttgcacacagagtgcaaataactccagcttcatgttgtatcaaaattaaatagacataatatgtaatggtctactagttatatgtccgtgcattgcttcgtttatatatatatatatagtttatctattaagagccctgggctctatataactgtagagagccccagcccacgtccgatcactttttacgcaagcgaacagatttagcgtaaacggaaacccattttagcgtaaacagagtaacaaccgcgagccctacatgtttacgttattccattcttccgtttatacataatagtgatttagcataactacttcagccgacccacgttccagaaataaaggaatgggcccactaccccacttccc

SEQ ID NO: 82449 - DNA, 3051 bp, Zea Mays
atgggcccttcctcccccgcgctcgcccctacggcgaccgagctccaaagcagcgccaccgccagatccgcccgcctccggccgtccccggctcctgccggctgcaccaagtcagatccaaccccgcccccccctccagcaccaccagctcgccctcctgtgtcccagctcccaccgccaccgccctcacatctaccgccggcccgcccttctgatccaactgcatgccgtgcgccggcggccccctaccaaaccaagcgggtgaggtttgcattcactgcaagcaccacgccgccccgcattcactacccctccgccgtatcccgcagccacagtgccacccccgccccgacagctggttcgaagcccccgtctggaagctgcgaccgcattgaagatgaggatcttgaaggatggacgacgattcggcgcaggcgtggacgcgccgcccgcgcaggcctaggctgcgccccagcggcgcctcgccttctctcagcccatgcccctagccgtctgatgtttggatgatttctcactttgctagctgcggtggacaggtggtaaagtgaaccagctagaactggtaaaatgctggcatgtgattgggaaaacaaacagctgacatggtggtttcttttctgctacactcttgtttattaactatactcattacattctgtgttggagttattccagtcagtgcagttcttgcagacaaggatgtcatgctgtgtatcagaccatgggaacatggtagtatgaccaaatctctatacttttctctgctctcttttcttctttccaacttttctccgcttcaaggttttccaatcaaggaaaaaaaatgcttacgtgctgacgtcaaaacttagaattaggggcatgttgatgttcaaattgaagcatcaaagaaccatatagtgccgccggccaacagcagcatcaaagaacaatattgattgtcttgcaaagtgccgccggccaacagcagcatccaagattctcttcttctttttttttgtgagagggcctctagccgagttagttaggtggtctgacattcttcgggttctgggttcgacttgttgtggaagcgaattttagctgtggttaaaaaatcacctcaactgtctcacgccaaatcctatgtgaggaaatcttttcttaatataatactcggggctatcttatctcgtagatcgatttttttaatttctttttctcaatatattccttttttttgtctccacggagtgaactaatttagataaagtttgtgttaaatcactaacatgttgtttttactgtatttaccccatctttgatgttcgccagcctcgtgaagacagacaccctcgcagacgtcatttctttatgaatagtaagatgcatgcatcatcatgtatgatttaatcacagcctcaaggaaggactgaacggtcacagaaagtaccctcagtccataaatatatgacacgttgactttttaaaaaaactttgaccactcgtctcatttaaaaaagaatgagttattatttatttttatgatttattttatcacttaaggttgtttgtgtttgacttaaaattttatattttaaataaatattttgaataagggagtgactaaagtttttttaaaaaaagtcaacggtgtcatatatttgtgaatgaagttagtactggtttgtagatgtttaagtgccatatgaacttttgaacacaacacacatcttattaggtttttatgacagttaaaccctgtttggttagagggactaatctttagtccctaatttttagtccctattttgccaaacgaaggactgaattagggactaattagctttagtctttatgctctcacatgggtgctaaaagggaccaaatgacaatatttactccaattatccttgccttgcctagaaagctaacgtcatacacaataaacaagaaaatagatattttagtctttatgtgttgtatttaatgtatttagaatcttttttacaaccaaacaagatagtgactaaactttagtctatgactaatggagccaaacggggccttaatatagcgatctcattcatgattcgtggcactctgggttggacagcttgcaacatcttgaagccactgtagccctttaggtccttggtcatggccttatgctcagcaggttcagtttcatcggtggacgttcatgttccgttcctctttcaatcttcatacatatcaacgtcgagttgatgcagaacacaaatcggtaaaggcctctactgacgaatgcaggaaaccttggaaacctgctactgatcattgtcccggctgtatgcgttgaaagaagggaacccgtttgggaacgatcccaagcatttgctgctcatgcagtctcctactcgtccttgtccatgggccatggctgatggctgtagtgtaggttctgctctcttttagttccaaaaaggggcaacctgtcttgtttattcaaagatgttgttgtgtcaaaggtttagattactgagggggttaattattagggatccgctgtgtggagataagatttcagggaaatatttttagtggagcccctgtacatagtttttgaggaaaaaaatccttgaaagacttttgggcacggatcttaaaaccttttttagactacatctttgaacatcattgttgcacacagagtgcaaataactccagcttcatgttgtatcaaaattaaatagacataatatgtaatggtctactagttatatgtccgtgcattgcttcgtttatatatatatatatagtttatctattaagagccctgggctctatataactgtagagagccccagcccacgtccgatcactttttacgcaagcgaacagatttagcgtaaacggaaacccattttagcgtaaacagagtaacaaccgcgagccctacatgtttacgttattccattcttccgtttatacataatagtgatttagcataactacttcagccgacccacgttccagaaataaaggaatgggcccactaccccacttccc

SEQ ID NO: 82450 - DNA, 3161 bp, Zea Mays
atgggcccttcctcccccgcgctcgcccctacggcgaccgagctccaaagcagcgccaccgccagatccgcccgcctccggccgtccccggctcctgccggctgcaccaagtcagatccaaccccgcccccccctccagcaccaccagctcgccctcctgtgtcccagctcccaccgccaccgccctcacatctaccgccggcccgcccttctgatccaactgcatgccgtgcgccggcggccccctaccaaaccaagcgggtgaggtttgcattcactgcaagcaccacgccgccccgcattcactacccctccgccgtatcccgcagccacagtgccacccccgccccgacagctggttcgaagcccccgtctggaagctgcgaccgcattgaagatgaggatcttgaaggatggacgacgattcggcgcaggcgtggacgcgccgcccgcgcaggcctaggctgcgccccagcggcgcctcgccttctctcagcccatgcccctagccgtctgatggtaagcctacgagtttggatgatttctcactttgctagctgcggtggacaggtggtaaagtgaaccaggtagtaatcccatcacatggctatttgaaaggtgtgagagacttttgttctaaacacaacgttttgatgattgctgatgagatccaaattggcgtagctagaactggtaaaatgctggcatgtgattgggaaaacaaacagctgacatggtggtttcttttctgctacactcttgtttattaactatactcattacattctgtgttggagttattccagtcagtgcagttcttgcagacaaggatgtcatgctgtgtatcagaccatgggaacatggtagtatgaccaaatctctatacttttctctgctctcttttcttctttccaacttttctccgcttcaaggttttccaatcaaggaaaaaaaatgcttacgtgctgacgtcaaaacttagaattaggggcatgttgatgttcaaattgaagcatcaaagaaccatatagtgccgccggccaacagcagcatcaaagaacaatattgattgtcttgcaaagtgccgccggccaacagcagcatccaagattctcttcttctttttttttgtgagagggcctctagccgagttagttaggtggtctgacattcttcgggttctgggttcgacttgttgtggaagcgaattttagctgtggttaaaaaatcacctcaactgtctcacgccaaatcctatgtgaggaaatcttttcttaatataatactcggggctatcttatctcgtagatcgatttttttaatttctttttctcaatatattccttttttttgtctccacggagtgaactaatttagataaagtttgtgttaaatcactaacatgttgtttttactgtatttaccccatctttgatgttcgccagcctcgtgaagacagacaccctcgcagacgtcatttctttatgaatagtaagatgcatgcatcatcatgtatgatttaatcacagcctcaaggaaggactgaacggtcacagaaagtaccctcagtccataaatatatgacacgttgactttttaaaaaaactttgaccactcgtctcatttaaaaaagaatgagttattatttatttttatgatttattttatcacttaaggttgtttgtgtttgacttaaaattttatattttaaataaatattttgaataagggagtgactaaagtttttttaaaaaaagtcaacggtgtcatatatttgtgaatgaagttagtactggtttgtagatgtttaagtgccatatgaacttttgaacacaacacacatcttattaggtttttatgacagttaaaccctgtttggttagagggactaatctttagtccctaatttttagtccctattttgccaaacgaaggactgaattagggactaattagctttagtctttatgctctcacatgggtgctaaaagggaccaaatgacaatatttactccaattatccttgccttgcctagaaagctaacgtcatacacaataaacaagaaaatagatattttagtctttatgtgttgtatttaatgtatttagaatcttttttacaaccaaacaagatagtgactaaactttagtctatgactaatggagccaaacggggccttaatatagcgatctcattcatgattcgtggcactctgggttggacagcttgcaacatcttgaagccactgtagccctttaggtccttggtcatggccttatgctcagcaggttcagtttcatcggtggacgttcatgttccgttcctctttcaatcttcatacatatcaacgtcgagttgatgcagaacacaaatcggtaaaggcctctactgacgaatgcaggaaaccttggaaacctgctactgatcattgtcccggctgtatgcgttgaaagaagggaacccgtttgggaacgatcccaagcatttgctgctcatgcagtctcctactcgtccttgtccatgggccatggctgatggctgtagtgtaggttctgctctcttttagttccaaaaaggggcaacctgtcttgtttattcaaagatgttgttgtgtcaaaggtttagattactgagggggttaattattagggatccgctgtgtggagataagatttcagggaaatatttttagtggagcccctgtacatagtttttgaggaaaaaaatccttgaaagacttttgggcacggatcttaaaaccttttttagactacatctttgaacatcattgttgcacacagagtgcaaataactccagcttcatgttgtatcaaaattaaatagacataatatgtaatggtctactagttatatgtccgtgcattgcttcgtttatatatatatatatagtttatctattaagagccctgggctctatataactgtagagagccccagcccacgtccgatcactttttacgcaagcgaacagatttagcgtaaacggaaacccattttagcgtaaacagagtaacaaccgcgagccctacatgtttacgttattccattcttccgtttatacataatagtgatttagcataactacttcagccgacccacgttccagaaataaaggaatgggcccactaccccacttccc

SEQ ID NO: 82451 - DNA, 1240 bp, Zea Mays
atcgcatctcgtgcagtgacacaagtgagctcagtaaagccagccaaagttcagacttcagaagaagcgagcgagcaggaggaggacaggaagtatggcgcactaccagcaggggaggcggcagcaagtggacgagtacggcaacccggtccctgggggccacggtgtccagggccagcagctgggtgaagccgccggcgggtacggcgtcgcaggcaccggcagctacggcggccagcagcaggccgggtatggccccacgggcaccggcacgcatgacgccgggggctacgacggctcggaccatccgggttacggggctaccggaacgggcgtcgacgacgccggtggcccaggcatggggacgactaccggtactggcgcgcacggtgccaccggaatgctcgacacgggggtcttgggcggcggagggcacgcggccaccggcatgcccgccggccacggcacgcgtcccggcgccacaggcgtagctggaaccggcggcgcgttcccccatgcagctgagcacaagacgggcggcggcatccttcgccgctccggcagcagctccagctccagcagctcgtcatctgaagacgacggcatgggtgggcgccggaagaagggcctgaaggagaagatcaaggagaaaatgccaggaggccacagggaaggccagggccaggcgacggccaccggtgcgtacggcgggacagggtacgtggctgggccgacgaccggaggcccccacgagaagaagggtgtggtggagaagatcaaggagaagatcccaggcggccacaaggactacgaccagcatcagcacaccaccgcggcaaccggtggcggcggtggctatggcggaaccaccgacaccacgtatgggacgacgaccactgaaggcactcacgagaagaagggcttcatggacaaaatcaaggagaaactccccggtcagcactaagcactaagcagctgcctctttcctcttccggctagctgcctctttcctcttccggttggcgactgcctgtaagtacatgtatacagaataaataaagcaataaagaataagcggcagctacgtatgtgtgtgtttttgtgtgtttgcattgtaaggcagctacgtatgtgtgtgtgtttgcattgtaaccacctcagtaatcctgtgcgttcatgatccttctatgtgacttcatgtgacgaagtagaaggaataagaaagtcaaatcttactatt

SEQ ID NO: 82452 - DNA, 838 bp, Zea Mays
  misc_feature (336)..(336): n is a, c, g, or t
tcttttccattgacaccatactttgatagggactggtaaaagagaaaaggctgtttgatgctgtaatttctcttgaggtgattgagcatgtcgccaatcctttggagttctgtgaatccctctcggctttgacaattcctaatggtgccactgtgatttccacaatcaaccgatcaatgcgagcatatgccactgcaatagttgctgctgaatatatcctcagatggcttcctagaggcacacatgagtggtccaaactggttaccccggaggagcttgtcctaatgctgcaaaaggcttccgtctccgtcgaagagatggcagggttcgtttacnatccgttgagcggagaatggtccctgtcagaaagatatcagtgtgaactacattgcttttggcgtcaagaagggcgaggcatcattgacaaatgacagagaagcaagtttatcatagcgaagaaaaacacgtgaccttgaattgtcgggcatcattttcagaggaccaattcatgtcactgaaatctattgctaagtatgcaaccaagtagcagaagagaattctcttgccctttgttagtcttggaaactggagcttgtggagtgatgcttcctggaagcgccattgagaagtcaagttgacaacaagtgactgctaacaagtagagctatctgccttttttgggtaatgtttcaggcagtttttctcaattttgtggcagtcactgatctaaataaaaatactactacactgctgtacgtgaaaactgaacagatttgctgtctggaaatgtaactatttttaacagttaaggggggagttaaggggtgttttaatgcac

SEQ ID NO: 82453 - DNA, 890 bp, Zea Mays
  misc_feature (388)..(388): n is a, c, g, or t
caaaatcttgatcatgtaatatgaatttaggcatctgatccaacaactgcttctattgagtattgttgtgcaacagctgagggactggtaaaagagaaaaggctgtttgatgctgtaatttctcttgaggtgattgagcatgtcgccaatcctttggagttctgtgaatccctctcggctttgacaattcctaatggtgccactgtgatttccacaatcaaccgatcaatgcgagcatatgccactgcaatagttgctgctgaatatatcctcagatggcttcctagaggcacacatgagtggtccaaactggttaccccggaggagcttgtcctaatgctgcaaaaggcttccgtctccgtcgaagagatggcagggttcgtttacnatccgttgagcggagaatggtccctgtcagaaagatatcagtgtgaactacattgcttttggcgtcaagaagggcgaggcatcattgacaaatgacagagaagcaagtttatcatagcgaagaaaaacacgtgaccttgaattgtcgggcatcattttcagaggaccaattcatgtcactgaaatctattgctaagtatgcaaccaagtagcagaagagaattctcttgccctttgttagtcttggaaactggagcttgtggagtgatgcttcctggaagcgccattgagaagtcaagttgacaacaagtgactgctaacaagtagagctatctgccttttttgggtaatgtttcaggcagtttttctcaattttgtggcagtcactgatctaaataaaaatactactacactgctgtacgtgaaaactgaacagatttgctgtctggaaatgtaactatttttaacagttaaggggggagttaaggggtgttttaatgcac

SEQ ID NO: 82454 - DNA, 1147 bp, Zea Mays
  misc_feature (645)..(645): n is a, c, g, or t
tgaataccggcaaggaatcacgcaattagacctgagtaaggtgggattctagtggcccattcaaacctttgcatgtgatgaatccaacccgactgtcttttatccgctccactctctgtagacatttcaggagggatccaaattcatctaagccacttgaaggtctcaaagttattgatgttggatgtggaggtggcattctgtcagagcctcttgctcgaatgggtgctaccggtactgcaattgatgctgttgacaagaatataaagattgcaagtattcatgcggcatctgatccaacaactgcttctattgagtattgttgtgcaacagctgagggactggtaaaagagaaaaggctgtttgatgctgtaatttctcttgaggtgattgagcatgtcgccaatcctttggagttctgtgaatccctctcggctttgacaattcctaatggtgccactgtgatttccacaatcaaccgatcaatgcgagcatatgccactgcaatagttgctgctgaatatatcctcagatggcttcctagaggcacacatgagtggtccaaactggttaccccggaggagcttgtcctaatgctgcaaaaggcttccgtctccgtcgaagagatggcagggttcgtttacnatccgttgagcggagaatggtccctgtcagaaagatatcagtgtgaactacattgcttttggcgtcaagaagggcgaggcatcattgacaaatgacagagaagcaagtttatcatagcgaagaaaaacacgtgaccttgaattgtcgggcatcattttcagaggaccaattcatgtcactgaaatctattgctaagtatgcaaccaagtagcagaagagaattctcttgccctttgttagtcttggaaactggagcttgtggagtgatgcttcctggaagcgccattgagaagtcaagttgacaacaagtgactgctaacaagtagagctatctgccttttttgggtaatgtttcaggcagtttttctcaattttgtggcagtcactgatctaaataaaaatactactacactgctgtacgtgaaaactgaacagatttgctgtctggaaatgtaactatttttaacagttaaggggggagttaaggggtgttttaatgcac

SEQ ID NO: 82455 - DNA, 1336 bp, Zea Mays
  misc_feature (834)..(834): n is a, c, g, or t
gaaaatcgatttgtccacatttcagccggacaccaccgtgtcgcccccgcgtcctaaacctctcacctcgccggggtccggtagccacgaacgatgttccgccgcgcgctcctctcctccgtctccccactccacggaacggtccatcgaggtcgagcggtggaggtcccacttcctcgtcgctgaaccctgcagaggtcgccaagttcgcctccatcgccgagacctggtgggattctagtggcccattcaaacctttgcatgtgatgaatccaacccgactgtcttttatccgctccactctctgtagacatttcaggagggatccaaattcatctaagccacttgaaggtctcaaagttattgatgttggatgtggaggtggcattctgtcagagcctcttgctcgaatgggtgctaccggtactgcaattgatgctgttgacaagaatataaagattgcaagtattcatgcggcatctgatccaacaactgcttctattgagtattgttgtgcaacagctgagggactggtaaaagagaaaaggctgtttgatgctgtaatttctcttgaggtgattgagcatgtcgccaatcctttggagttctgtgaatccctctcggctttgacaattcctaatggtgccactgtgatttccacaatcaaccgatcaatgcgagcatatgccactgcaatagttgctgctgaatatatcctcagatggcttcctagaggcacacatgagtggtccaaactggttaccccggaggagcttgtcctaatgctgcaaaaggcttccgtctccgtcgaagagatggcagggttcgtttacnatccgttgagcggagaatggtccctgtcagaaagatatcagtgtgaactacattgcttttggcgtcaagaagggcgaggcatcattgacaaatgacagagaagcaagtttatcatagcgaagaaaaacacgtgaccttgaattgtcgggcatcattttcagaggaccaattcatgtcactgaaatctattgctaagtatgcaaccaagtagcagaagagaattctcttgccctttgttagtcttggaaactggagcttgtggagtgatgcttcctggaagcgccattgagaagtcaagttgacaacaagtgactgctaacaagtagagctatctgccttttttgggtaatgtttcaggcagtttttctcaattttgtggcagtcactgatctaaataaaaatactactacactgctgtacgtgaaaactgaacagatttgctgtctggaaatgtaactatttttaacagttaaggggggagttaaggggtgttttaatgcac

SEQ ID NO: 82456 - DNA, 1257 bp, Zea Mays
  misc_feature (755)..(755): n is a, c, g, or t
gaaaatcgatttgtccacatttcagccggacaccaccgtgtcgcccccgcgtcctaaacctctcacctcgccggggtccggtagccacgaacgatgttccgccgcgcgctcctctcctccgtctccccactccacggaacggtccatcgaggtcgagcggtggaggtcccacttcctcgtcgctgaaccctgcagaggtcgccaagttcgcctccatcgccgagacctggtgggattctagtggcccattcaaacctttgcatgtgatgaatccaacccgactgtcttttatccgctccactctctgtagacatttcagcctcttgctcgaatgggtgctaccggtactgcaattgatgctgttgacaagaatataaagattgcaagtattcatgcggcatctgatccaacaactgcttctattgagtattgttgtgcaacagctgagggactggtaaaagagaaaaggctgtttgatgctgtaatttctcttgaggtgattgagcatgtcgccaatcctttggagttctgtgaatccctctcggctttgacaattcctaatggtgccactgtgatttccacaatcaaccgatcaatgcgagcatatgccactgcaatagttgctgctgaatatatcctcagatggcttcctagaggcacacatgagtggtccaaactggttaccccggaggagcttgtcctaatgctgcaaaaggcttccgtctccgtcgaagagatggcagggttcgtttacnatccgttgagcggagaatggtccctgtcagaaagatatcagtgtgaactacattgcttttggcgtcaagaagggcgaggcatcattgacaaatgacagagaagcaagtttatcatagcgaagaaaaacacgtgaccttgaattgtcgggcatcattttcagaggaccaattcatgtcactgaaatctattgctaagtatgcaaccaagtagcagaagagaattctcttgccctttgttagtcttggaaactggagcttgtggagtgatgcttcctggaagcgccattgagaagtcaagttgacaacaagtgactgctaacaagtagagctatctgccttttttgggtaatgtttcaggcagtttttctcaattttgtggcagtcactgatctaaataaaaatactactacactgctgtacgtgaaaactgaacagatttgctgtctggaaatgtaactatttttaacagttaaggggggagttaaggggtgttttaatgcac

SEQ ID NO: 82457 - DNA, 1270 bp, Zea Mays
cacatgtttacttacagaagttcatgaaaagacacgtgcacttgaggcttctggatacttcttctgcctagaggaccgtgcactactttgtagagactgtgatgttgctatacacacagtgaattcctttgtttcagtacatcagagattcctgctaactggagttcagtgaatcaaccagtgagacatcagccaaggagaagcccgacagttcaattttcagttgaagggagtgcttctgttcctaccaaaaatgtaacaaatggagattgttcaaggcagaattttgtcccaacagccagggcagaagtggttgattggactatgaataatagtacaattcgatcagtagaatctccgcctaagtacatttcagaggaaagccccacacttctgcaatctagccagaccacaacagtcttctccaaccaaattaatggcaatagtgatggggcctaccacttgtcattctcaggtggtaatgtgacagacagcctaccagattggcccgtggatgagttcttcagtaactcagaatatggtccaaactttggcttctccgagaatggttcttctaagggtgataccgctaagctggggggcgctggtggatctccacaatgccgtttggctgaaggctcagttgctgaggaactattagggcaggtgcctggattgatcaccgatgaatatatgggccgagtacctgagaattcatggacagtgcctgaggttccctctccaccaacagcctcggggctcaactggcatgggaatttgtgtttccctgcgtatgacagcaccatgtttgttcctgaaattacctccctccagaactcccaaagtcacttcaccgtaccttccagtttcaagcgccggagaagagagtactaagaggcgacaagaagatcactagacaccactgtccggtctaggccatcttgagaaaggcttcttggtgggccaaatgacgaaagaaaatatccaggactgagtggtcattcaaacatcaactgagctatccagtagccaggttttaagtgtgttgtaatgcttcaatgtgtttcattttctaaagacctgagcttcgcttgtgatttgttccgagctgtacggtgtcgattttgtgtatataatataatataccgaaataaagggtacccattatgagtatatgatcattccgaaataaagggtatcccgtatgagtatgatcattcgcgagtacatcgcacactggtggtggcacattaagttacttctgcaatac

SEQ ID NO: 82458 - DNA, 1652 bp, Zea Mays
ttgatggtagctttgttagactacattgcaatttttacttgaatgacatgtatgtttaaaggacaatggtgaagatcattctaaatgcatgcatatagaagctttctcttcatttggtcatatattcttcaaggcctgaaatattagagagttacatagctaaatgtactacatgccacgtgaaatggtacatttaactagagtgcaccccaataggctttacattgcacttgcgcaagttttctccttttcaccagcacctaatttaccacaggtggaacaaataggtaatcttcaagatgaaagacaagatcgctacacaatggacaatgcacacaatagctcaagctcatgtgaggcttctggatacttcttctgcctagaggaccgtgcactactttgtagagactgtgatgttgctatacacacagtgaattcctttgtttcagtacatcagagattcctgctaactggagttcaggtgggtcttgatcctgctgatccagttccacctattgctgaaaagcatgttaatgctgttggtggatcagtgaatcaaccagtgagacatcagccaaggagaagcccgacagttcaattttcagttgaagggagtgcttctgttcctaccaaaaatgtaacaaatggagattgttcaaggcagaattttgtcccaacagccagggcagaagtggttgattggactatgaataatagtacaattcgatcagtagaatctccgcctaagtacatttcagaggaaagccccacacttctgcaatctagccagaccacaacagtcttctccaaccaaattaatggcaatagtgatggggcctaccacttgtcattctcaggtggtaatgtgacagacagcctaccagattggcccgtggatgagttcttcagtaactcagaatatggtccaaactttggcttctccgagaatggttcttctaagggtgataccgctaagctggggggcgctggtggatctccacaatgccgtttggctgaaggctcagttgctgaggaactattagggcaggtgcctggattgatcaccgatgaatatatgggccgagtacctgagaattcatggacagtgcctgaggttccctctccaccaacagcctcggggctcaactggcatgggaatttgtgtttccctgcgtatgacagcaccatgtttgttcctgaaattacctccctccagaactcccaaagtcacttcaccgtaccttccagtttcaagcgccggagaagagagtactaagaggcgacaagaagatcactagacaccactgtccggtctaggccatcttgagaaaggcttcttggtgggccaaatgacgaaagaaaatatccaggactgagtggtcattcaaacatcaactgagctatccagtagccaggttttaagtgtgttgtaatgcttcaatgtgtttcattttctaaagacctgagcttcgcttgtgatttgttccgagctgtacggtgtcgattttgtgtatataatataatataccgaaataaagggtacccattatgagtatatgatcattccgaaataaagggtatcccgtatgagtatgatcattcgcgagtacatcgcacactggtggtggcacattaagttacttctgcaatac

SEQ ID NO: 82459 - DNA, 663 bp, Zea Mays
cgtggttgctgctgctgcggttctctgggcatttgatgcgattaaagcctgaggaggttgctgggatgataaaggactttgatgaacctggaactcttgcaccaactggtctttttgttggaggtacgaagtacatggtgatccaaggtgaacctggagttgtcatccgaggaaagaagggcactggaggcattactatcaagaaaactggcatgtccttgattatcggtatctatgatgagccaatgactccagggcaatgcaatatggtggtggagaggctcggcgattacctgatcgaacagggcttctaagtttgtcataatgctattttggtcattgggcacttaagtttgcacctcatttggttctgtaatatgtgggcttgtgcatgtgcttggcgtattgcatgcagtgaataatttatcttcgcgttgggttggtgacaatgttgggaacggatttgaattggggtttatgcttgccatctcctcatatctcgaactcagctgctgtttcactgagtaatgtacatttccctggtaatggtacttgtgcactctgctgctttatggaaaagagtgcattttactgatgtgcttggccgtgttgttgaatatttcccgtagttattttcaactccctctctgttccaatttataa

SEQ ID NO: 82460 - DNA, 1114 bp, Zea Mays
caattcgctcgatctccaatctggcaaatcccctcatctctcacacaacctccgaatcaaacgctgaatcgcgccaaatttactcttgatctatctccaaacccgccgctatctctcatcctgctattgcaatttcatccaaaacttgctccctcggaagccatcaccatggccgcggaggcgggcagtcggcgcggggcggcggcgcggaggaaggcgaaggaggcggcggtgggcgccgccgcgagggttctcttctacccgacactgctgtacaacgtggtgcggagcaaggtccaggccgagttccggtggtgggacgaggtcgatccgttcgttttgctcggagcggttccattccgcagcgatgtaacacgcttacagaagcttgggatatgtggtgtgataaccttaaatgaaccatttgagactttggtaccatcatctatgtataaggaaatgcgtcttgtgggaaaataacatatattcactgcaaagctggaaggggccggagtacaacagtcgtcttgtgctatctggtcaaatacaagaatatgacacctgctgcagctttcgagcatgtacggtctaaaagggctcgagtgctgttgacacattcgcaatggaaggctgttcaagaattcagcaagaagaacacggaccgtcctgctctcacgagcggtcccgcaacagcatctccagcacgggacgcggcaccggtaacagtagcggatctgaacggcaataatgctccagagtttcttgcggaggatgccagcttgtctagacgcaacaccacaccgtcgaggccaacgattaagatgctgtcatgcttgtttccttctcgcgtctgatgaatggtcgctggacgtcgggtgtccgaggcgcatgcgtggtagcccccggtcgatctgtccgcgaagcggtgtgcagtgcaggacggcggcagcatacctttccgaaaagaaaacggcatcagcattggcgttagtcatatacttgtccatattcacccgatttgcctgtatatatatataccttcgtcatgtggaaattcgttgttgagaattgagatgcatctcttacccgcacttgaatgaatggcctgtgaatc

SEQ ID NO: 82461 - DNA, 1967 bp, Zea Mays
caattcgctcgatctccaatctggcaaatcccctcatctctcacacaacctccgaatcaaacgctgaatcgcgccaaatttactcttgatctatctccaaacccgccgctatctctcatcctgctattgcaatttcatccaaaacttgctccctcggaagccatcaccatggccgcggaggcgggcagtcggcgcggggcggcggcgcggaggaaggcgaaggaggcggcggtgggcgccgccgcgagggttctcttctacccgacactgctgtacaacgtggtgcggagcaaggtccaggccgagttccggtggtgggacgagttcgttttgctcggagcggttccattccgcagcgatgtaacacgcttacagaagcttgggatatgtggtgtgataaccttaaatgaaccatttgagactttggtaccatcatctatgtataaggcaagtgacattcacgtgggatcgatcaccttgttattcctacaagagattatatgtttgctccttcacttgtggatattaatcaagctactgatttcattcatagaaatgcgtcttgtgggaaaataacatatattcactgcaaagctggaaggggccggagtacaacagtcgtcttgtgctatctggtcaaatacaagaatatgacacctgctgcagctttcgagcatgtacggtctaaaagggctcgagtgctgttgacacattcgcaatggaaggtactgaaaagaccataagtcggttcctccatcctaaaacacgaagactcgcaatggaatttatgatctttcatgatgtcaccttctgtgattttaatgaacttgggaagctggaagagttagcctccctcaaatatttttgcttacgctggtagatattggaacacaaactctaaccctaaactgtgttgagagatatatttataatagagatgttgggccaaagcccattacacatggccctattacaacgcaatcattatatctctaacaatcataatggtatagctaactaggaaagcatatgctactttttagcaacatttccctttcttagtaaggaaataaatccactttgcaccaaatatttgcagagcacctacatctatttttttttagtttttcgtggaaaaagaacacactagtgatattcggagttgatgtaaagttgtaaacatgacattatcagagcaatgctgcagcccattaggtgtttagattgcgacatccaggctccagctactcttttctggtgatcaatgatgaaccattttatacagctgggaccaaatcgacccttaatggacccagtacatcccattaattagagcaagagtaaacgctgggttgtcactggtggattctgaatgtttctggatggtcctgatagccctgtagttagtttcttgatgtggaagcttgaataattgctcatatgaaaactatcatgtattctaggtggctttgattgttgcaggctgttcaagaattcagcaagaagaacacggaccgtcctgctctcacgagcggtcccgcaacagcatctccagcacgggacgcggcaccggtaacagtagcggatctgaacggcaataatgctccagagtttcttgcggaggatgccagcttgtctagacgcaacaccacaccgtcgaggccaacgattaagatgctgtcatgcttgtttccttctcgcgtctgatgaatggtcgctggacgtcgggtgtccgaggcgcatgcgtggtagcccccggtcgatctgtccgcgaagcggtgtgcagtgcaggacggcggcagcatacctttccgaaaagaaaacggcatcagcattggcgttagtcatatacttgtccatattcacccgatttgcctgtatatatatataccttcgtcatgtggaaattcgttgttgagaattgagatgcatctcttacccgcacttgaatgaatggcctgtgaatc

SEQ ID NO: 82462 - DNA, 1227 bp, Zea Mays
caattcgctcgatctccaatctggcaaatcccctcatctctcacacaacctccgaatcaaacgctgaatcgcgccaaatttactcttgatctatctccaaacccgccgctatctctcatcctgctattgcaatttcatccaaaacttgctccctcggaagccatcaccatggccgcggaggcgggcagtcggcgcggggcggcggcgcggaggaaggcgaaggaggcggcggtgggcgccgccgcgagggttctcttctacccgacactgctgtacaacgtggtgcggagcaaggtccaggccgagttccggtggtgggacgaggtcgatccgttcgttttgctcggagcggttccattccgcagcgatgtaacacgcttacagaagcttgggatatgtggtgtgataaccttaaatgaaccatttgagactttggtaccatcatctatgtataagtcacgtgggatcgatcaccttgttattcctacaagagattatatgtttgctccttcacttgtggatattaatcaagctactgatttcattcatagaaatgcgtcttgtgggaaaataacatatattcactgcaaagctggaaggggccggagtacaacagtcgtcttgtgctatctggtcaaatacaagaatatgacacctgctgcagctttcgagcatgtacggtctaaaagggctcgagtgctgttgacacattcgcaatggaaggtggctttgattgttgcaggctgttcaagaattcagcaagaagaacacggaccgtcctgctctcacgagcggtcccgcaacagcatctccagcacgggacgcggcaccggtaacagtagcggatctgaacggcaataatgctccagagtttcttgcggaggatgccagcttgtctagacgcaacaccacaccgtcgaggccaacgattaagatgctgtcatgcttgtttccttctcgcgtctgatgaatggtcgctggacgtcgggtgtccgaggcgcatgcgtggtagcccccggtcgatctgtccgcgaagcggtgtgcagtgcaggacggcggcagcatacctttccgaaaagaaaacggcatcagcattggcgttagtcatatacttgtccatattcacccgatttgcctgtatatatatataccttcgtcatgtggaaattcgttgttgagaattgagatgcatctcttacccgcacttgaatgaatggcctgtgaatc

SEQ ID NO: 82463 - DNA, 1882 bp, Zea Mays
caattcgctcgatctccaatctggcaaatcccctcatctctcacacaacctccgaatcaaacgctgaatcgcgccaaatttactcttgatctatctccaaacccgccgctatctctcatcctgctattgcaatttcatccaaaacttgctccctcggaagccatcaccatggccgcggaggcgggcagtcggcgcggggcggcggcgcggaggaaggcgaaggaggcggcggtgggcgccgccgcgagggttctcttctacccgacactgctgtacaacgtggtgcggagcaaggtccaggccgagttccggtggtgggacgaggtcgatccgttcgttttgctcggagcggttccattccgcagcgatgtaacacgcttacagaagcttgggatatgtggtgtgataaccttaaatgaaccatttgagactttggtaccatcatctatgtataaggcaagtgacatgaaatgcgtcttgtgggaaaataacatatattcactgcaaagctggaaggggccggagtacaacagtcgtcttgtgctatctggtcaaatacaagaatatgacacctgctgcagctttcgagcatgtacggtctaaaagggctcgagtgctgttgacacattcgcaatggaaggtactgaaaagaccataagtcggttcctccatcctaaaacacgaagactcgcaatggaatttatgatctttcatgatgtcaccttctgtgattttaatgaacttgggaagctggaagagttagcctccctcaaatatttttgcttacgctggtagatattggaacacaaactctaaccctaaactgtgttgagagatatatttataatagagatgttgggccaaagcccattacacatggccctattacaacgcaatcattatatctctaacaatcataatggtatagctaactaggaaagcatatgctactttttagcaacatttccctttcttagtaaggaaataaatccactttgcaccaaatatttgcagagcacctacatctatttttttttagtttttcgtggaaaaagaacacactagtgatattcggagttgatgtaaagttgtaaacatgacattatcagagcaatgctgcagcccattaggtgtttagattgcgacatccaggctccagctactcttttctggtgatcaatgatgaaccattttatacagctgggaccaaatcgacccttaatggacccagtacatcccattaattagagcaagagtaaacgctgggttgtcactggtggattctgaatgtttctggatggtcctgatagccctgtagttagtttcttgatgtggaagcttgaataattgctcatatgaaaactatcatgtattctaggtggctttgattgttgcaggctgttcaagaattcagcaagaagaacacggaccgtcctgctctcacgagcggtcccgcaacagcatctccagcacgggacgcggcaccggtaacagtagcggatctgaacggcaataatgctccagagtttcttgcggaggatgccagcttgtctagacgcaacaccacaccgtcgaggccaacgattaagatgctgtcatgcttgtttccttctcgcgtctgatgaatggtcgctggacgtcgggtgtccgaggcgcatgcgtggtagcccccggtcgatctgtccgcgaagcggtgtgcagtgcaggacggcggcagcatacctttccgaaaagaaaacggcatcagcattggcgttagtcatatacttgtccatattcacccgatttgcctgtatatatatataccttcgtcatgtggaaattcgttgttgagaattgagatgcatctcttacccgcacttgaatgaatggcctgtgaatc

SEQ ID NO: 82464 - DNA, 1219 bp, Zea Mays
caattcgctcgatctccaatctggcaaatcccctcatctctcacacaacctccgaatcaaacgctgaatcgcgccaaatttactcttgatctatctccaaacccgccgctatctctcatcctgctattgcaatttcatccaaaacttgctccctcggaagccatcaccatggccgcggaggcgggcagtcggcgcggggcggcggcgcggaggaaggcgaaggaggcggcggtgggcgccgccgcgagggttctcttctacccgacactgctgtacaacgtggtgcggagcaaggtccaggccgagttccggtggtgggacgaggtcgatccgttcgttttgctcggagcggttccattccgcagcgatgtaacacgcttacagaagcttgggatatgtggtgtgataaccttaaatgaaccatttgagactttggtaccatcatctatgtataaggcaagtgacattcacgtgggatcgatcaccttgttattcctacaagagattatatgtttgctccttcacttgtggatattaatcaagctactgatttcattcatagaaatgcgtcttgtgggaaaataacatatattcactgcaaagctggaaggggccggagtacaacagtcgtcttgtgctatctggtcaaatacaagaatatgacacctgctgcagctttcgagcatgtacggtctaaaagggctcgagtgctgttgacacattcgcaatggaaggctgttcaagaattcagcaagaagaacacggaccgtcctgctctcacgagcggtcccgcaacagcatctccagcacgggacgcggcaccggtaacagtagcggatctgaacggcaataatgctccagagtttcttgcggaggatgccagcttgtctagacgcaacaccacaccgtcgaggccaacgattaagatgctgtcatgcttgtttccttctcgcgtctgatgaatggtcgctggacgtcgggtgtccgaggcgcatgcgtggtagcccccggtcgatctgtccgcgaagcggtgtgcagtgcaggacggcggcagcatacctttccgaaaagaaaacggcatcagcattggcgttagtcatatacttgtccatattcacccgatttgcctgtatatatatataccttcgtcatgtggaaattcgttgttgagaattgagatgcatctcttacccgcacttgaatgaatggcctgtgaatc

SEQ ID NO: 82465 - DNA, 1132 bp, Zea Mays
cgccaattcgctcgatctccaatctggcaaatcccctcatctctcacacaacctccgaatcaaacgctgaatcgcgccaaatttactcttgatctatctccaaacccgccgctatctctcatcctgctattgcaatttcatccaaaacttgctccctcggaagccatcaccatggccgcggaggcgggcagtcggcgcggggcggcggcgcggaggaaggcgaaggaggcggcggtgggcgccgccgcgagggttctcttctacccgacactgctgtacaacgtggtgcggagcaaggtccaggccgagttccggtggtgggacgaggtcgatccgttcgttttgctcggagcggttccattccgcagcgatgtaacacgcttacagaagcttgggatatgtggtgtgataaccttaaatgaaccatttgagactttggtaccatcatctatgtataaggcaagtgacattcacgtgggatcgatcaccttgttattcctacaagagattatatgtttgctccttcacttgtggatattaatcaagctactgatttcattcatagaaatgcgtcttgtgggaaaataacatatattcactgcaaagctggaaggggccggagtacaacagtcgtcttgtgctatctggctgttcaagaattcagcaagaagaacacggaccgtcctgctctcacgagcggtcccgcaacagcatctccagcacgggacgcggcaccggtaacagtagcggatctgaacggcaataatgctccagagtttcttgcggaggatgccagcttgtctagacgcaacaccacaccgtcgaggccaacgattaagatgctgtcatgcttgtttccttctcgcgtctgatgaatggtcgctggacgtcgggtgtccgaggcgcatgcgtggtagcccccggtcgatctgtccgcgaagcggtgtgcagtgcaggacggcggcagcatacctttccgaaaagaaaacggcatcagcattggcgttagtcatatacttgtccatattcacccgatttgcctgtatatatatataccttcgtcatgtggaaattcgttgttgagaattgagatgcatctcttacccgcacttgaatgaatggcctgtgaatc

SEQ ID NO: 82466 - DNA, 1140 bp, Zea Mays
cgccaattcgctcgatctccaatctggcaaatcccctcatctctcacacaacctccgaatcaaacgctgaatcgcgccaaatttactcttgatctatctccaaacccgccgctatctctcatcctgctattgcaatttcatccaaaacttgctccctcggaagccatcaccatggccgcggaggcgggcagtcggcgcggggcggcggcgcggaggaaggcgaaggaggcggcggtgggcgccgccgcgagggttctcttctacccgacactgctgtacaacgtggtgcggagcaaggtccaggccgagttccggtggtgggacgaggtcgatccgttcgttttgctcggagcggttccattccgcagcgatgtaacacgcttacagaagcttgggatatgtggtgtgataaccttaaatgaaccatttgagactttggtaccatcatctatgtataagtcacgtgggatcgatcaccttgttattcctacaagagattatatgtttgctccttcacttgtggatattaatcaagctactgatttcattcatagaaatgcgtcttgtgggaaaataacatatattcactgcaaagctggaaggggccggagtacaacagtcgtcttgtgctatctggtggctttgattgttgcaggctgttcaagaattcagcaagaagaacacggaccgtcctgctctcacgagcggtcccgcaacagcatctccagcacgggacgcggcaccggtaacagtagcggatctgaacggcaataatgctccagagtttcttgcggaggatgccagcttgtctagacgcaacaccacaccgtcgaggccaacgattaagatgctgtcatgcttgtttccttctcgcgtctgatgaatggtcgctggacgtcgggtgtccgaggcgcatgcgtggtagcccccggtcgatctgtccgcgaagcggtgtgcagtgcaggacggcggcagcatacctttccgaaaagaaaacggcatcagcattggcgttagtcatatacttgtccatattcacccgatttgcctgtatatatatataccttcgtcatgtggaaattcgttgttgagaattgagatgcatctcttacccgcacttgaatgaatggcctgtgaatc

SEQ ID NO: 82467 - DNA, 1211 bp, Zea Mays
cgccaattcgctcgatctccaatctggcaaatcccctcatctctcacacaacctccgaatcaaacgctgaatcgcgccaaatttactcttgatctatctccaaacccgccgctatctctcatcctgctattgcaatttcatccaaaacttgctccctcggaagccatcaccatggccgcggaggcgggcagtcggcgcggggcggcggcgcggaggaaggcgaaggaggcggcggtgggcgccgccgcgagggttctcttctacccgacactgctgtacaacgtggtgcggagcaaggtccaggccgagttccggtggtgggacgaggtcgatccgttcgttttgctcggagcggttccattccgcagcgatgtaacacgcttacagaagcttgggatatgtggtgtgataaccttaaatgaaccatttgagactttggtaccatcatctatgtataagtcacgtgggatcgatcaccttgttattcctacaagagattatatgtttgctccttcacttgtggatattaatcaagctactgatttcattcatagaaatgcgtcttgtgggaaaataacatatattcactgcaaagctggaaggggccggagtacaacagtcgtcttgtgctatctggtcaaatacaagaatatgacacctgctgcagctttcgagcatgtacggtctaaaagggctcgagtgctgttgacacattcgcaatggaaggctgttcaagaattcagcaagaagaacacggaccgtcctgctctcacgagcggtcccgcaacagcatctccagcacgggacgcggcaccggtaacagtagcggatctgaacggcaataatgctccagagtttcttgcggaggatgccagcttgtctagacgcaacaccacaccgtcgaggccaacgattaagatgctgtcatgcttgtttccttctcgcgtctgatgaatggtcgctggacgtcgggtgtccgaggcgcatgcgtggtagcccccggtcgatctgtccgcgaagcggtgtgcagtgcaggacggcggcagcatacctttccgaaaagaaaacggcatcagcattggcgttagtcatatacttgtccatattcacccgatttgcctgtatatatatataccttcgtcatgtggaaattcgttgttgagaattgagatgcatctcttacccgcacttgaatgaatggcctgtgaatc

SEQ ID NO: 82468 - DNA, 1968 bp, Zea Mays
cgccaattcgctcgatctccaatctggcaaatcccctcatctctcacacaacctccgaatcaaacgctgaatcgcgccaaatttactcttgatctatctccaaacccgccgctatctctcatcctgctattgcaatttcatccaaaacttgctccctcggaagccatcaccatggccgcggaggcgggcagtcggcgcggggcggcggcgcggaggaaggcgaaggaggcggcggtgggcgccgccgcgagggttctcttctacccgacactgctgtacaacgtggtgcggagcaaggtccaggccgagttccggtggtgggacgaggtcgatccgttcgttttgctcggagcggttccattccgcagcgatgtaacacgcttacagaagcttgggatatgtggtgtgataaccttaaatgaaccatttgagactttggtaccatcatctatgtataagtcacgtgggatcgatcaccttgttattcctacaagagattatatgtttgctccttcacttgtggatattaatcaagctactgatttcattcatagaaatgcgtcttgtgggaaaataacatatattcactgcaaagctggaaggggccggagtacaacagtcgtcttgtgctatctggtcaaatacaagaatatgacacctgctgcagctttcgagcatgtacggtctaaaagggctcgagtgctgttgacacattcgcaatggaaggtactgaaaagaccataagtcggttcctccatcctaaaacacgaagactcgcaatggaatttatgatctttcatgatgtcaccttctgtgattttaatgaacttgggaagctggaagagttagcctccctcaaatatttttgcttacgctggtagatattggaacacaaactctaaccctaaactgtgttgagagatatatttataatagagatgttgggccaaagcccattacacatggccctattacaacgcaatcattatatctctaacaatcataatggtatagctaactaggaaagcatatgctactttttagcaacatttccctttcttagtaaggaaataaatccactttgcaccaaatatttgcagagcacctacatctatttttttttagtttttcgtggaaaaagaacacactagtgatattcggagttgatgtaaagttgtaaacatgacattatcagagcaatgctgcagcccattaggtgtttagattgcgacatccaggctccagctactcttttctggtgatcaatgatgaaccattttatacagctgggaccaaatcgacccttaatggacccagtacatcccattaattagagcaagagtaaacgctgggttgtcactggtggattctgaatgtttctggatggtcctgatagccctgtagttagtttcttgatgtggaagcttgaataattgctcatatgaaaactatcatgtattctaggtggctttgattgttgcaggctgttcaagaattcagcaagaagaacacggaccgtcctgctctcacgagcggtcccgcaacagcatctccagcacgggacgcggcaccggtaacagtagcggatctgaacggcaataatgctccagagtttcttgcggaggatgccagcttgtctagacgcaacaccacaccgtcgaggccaacgattaagatgctgtcatgcttgtttccttctcgcgtctgatgaatggtcgctggacgtcgggtgtccgaggcgcatgcgtggtagcccccggtcgatctgtccgcgaagcggtgtgcagtgcaggacggcggcagcatacctttccgaaaagaaaacggcatcagcattggcgttagtcatatacttgtccatattcacccgatttgcctgtatatatatataccttcgtcatgtggaaattcgttgttgagaattgagatgcatctcttacccgcacttgaatgaatggcctgtgaatc

SEQ ID NO: 82469 - DNA, 1882 bp, Zea Mays
tttccactcgccaattcgctcgatctccaatctggcaaatcccctcatctctcacacaacctccgaatcaaacgctgaatcgcgccaaatttactcttgatctatctccaaacccgccgctatctctcatcctgctattgcaatttcatccaaaacttgctccctcggaagccatcaccatggccgcggaggcgggcagtcggcgcggggcggcggcgcggaggaaggcgaaggaggcggcggtgggcgccgccgcgagggttctcttctacccgacactgctgtacaacgtggtgcggagcaaggtccaggccgagttccggtggtgggacgaggtcgatccgttcgttttgctcggagcggttccattccgcagcgatgtaacacgcttacagaagcttgggatatgtggtgtgataaccttaaatgaaccatttgagactttggtaccatcatctatgtataaggaaatgcgtcttgtgggaaaataacatatattcactgcaaagctggaaggggccggagtacaacagtcgtcttgtgctatctggtcaaatacaagaatatgacacctgctgcagctttcgagcatgtacggtctaaaagggctcgagtgctgttgacacattcgcaatggaaggtactgaaaagaccataagtcggttcctccatcctaaaacacgaagactcgcaatggaatttatgatctttcatgatgtcaccttctgtgattttaatgaacttgggaagctggaagagttagcctccctcaaatatttttgcttacgctggtagatattggaacacaaactctaaccctaaactgtgttgagagatatatttataatagagatgttgggccaaagcccattacacatggccctattacaacgcaatcattatatctctaacaatcataatggtatagctaactaggaaagcatatgctactttttagcaacatttccctttcttagtaaggaaataaatccactttgcaccaaatatttgcagagcacctacatctatttttttttagtttttcgtggaaaaagaacacactagtgatattcggagttgatgtaaagttgtaaacatgacattatcagagcaatgctgcagcccattaggtgtttagattgcgacatccaggctccagctactcttttctggtgatcaatgatgaaccattttatacagctgggaccaaatcgacccttaatggacccagtacatcccattaattagagcaagagtaaacgctgggttgtcactggtggattctgaatgtttctggatggtcctgatagccctgtagttagtttcttgatgtggaagcttgaataattgctcatatgaaaactatcatgtattctaggtggctttgattgttgcaggctgttcaagaattcagcaagaagaacacggaccgtcctgctctcacgagcggtcccgcaacagcatctccagcacgggacgcggcaccggtaacagtagcggatctgaacggcaataatgctccagagtttcttgcggaggatgccagcttgtctagacgcaacaccacaccgtcgaggccaacgattaagatgctgtcatgcttgtttccttctcgcgtctgatgaatggtcgctggacgtcgggtgtccgaggcgcatgcgtggtagcccccggtcgatctgtccgcgaagcggtgtgcagtgcaggacggcggcagcatacctttccgaaaagaaaacggcatcagcattggcgttagtcatatacttgtccatattcacccgatttgcctgtatatatatataccttcgtcatgtggaaattcgttgttgagaattgagatgcatctcttacccgcacttgaatgaatggcctgtgaatc

SEQ ID NO: 82470 - DNA, 1986 bp, Zea Mays
tttccactcgccaattcgctcgatctccaatctggcaaatcccctcatctctcacacaacctccgaatcaaacgctgaatcgcgccaaatttactcttgatctatctccaaacccgccgctatctctcatcctgctattgcaatttcatccaaaacttgctccctcggaagccatcaccatggccgcggaggcgggcagtcggcgcggggcggcggcgcggaggaaggcgaaggaggcggcggtgggcgccgccgcgagggttctcttctacccgacactgctgtacaacgtggtgcggagcaaggtccaggccgagttccggtggtgggacgaggtcgatccgttcgttttgctcggagcggttccattccgcagcgatgtaacacgcttacagaagcttgggatatgtggtgtgataaccttaaatgaaccatttgagactttggtaccatcatctatgtataaggcaagtgacattcacgtgggatcgatcaccttgttattcctacaagagattatatgtttgctccttcacttgtggatattaatcaagctactgatttcattcatgaaatgcgtcttgtgggaaaataacatatattcactgcaaagctggaaggggccggagtacaacagtcgtcttgtgctatctggtcaaatacaagaatatgacacctgctgcagctttcgagcatgtacggtctaaaagggctcgagtgctgttgacacattcgcaatggaaggtactgaaaagaccataagtcggttcctccatcctaaaacacgaagactcgcaatggaatttatgatctttcatgatgtcaccttctgtgattttaatgaacttgggaagctggaagagttagcctccctcaaatatttttgcttacgctggtagatattggaacacaaactctaaccctaaactgtgttgagagatatatttataatagagatgttgggccaaagcccattacacatggccctattacaacgcaatcattatatctctaacaatcataatggtatagctaactaggaaagcatatgctactttttagcaacatttccctttcttagtaaggaaataaatccactttgcaccaaatatttgcagagcacctacatctatttttttttagtttttcgtggaaaaagaacacactagtgatattcggagttgatgtaaagttgtaaacatgacattatcagagcaatgctgcagcccattaggtgtttagattgcgacatccaggctccagctactcttttctggtgatcaatgatgaaccattttatacagctgggaccaaatcgacccttaatggacccagtacatcccattaattagagcaagagtaaacgctgggttgtcactggtggattctgaatgtttctggatggtcctgatagccctgtagttagtttcttgatgtggaagcttgaataattgctcatatgaaaactatcatgtattctaggtggctttgattgttgcaggctgttcaagaattcagcaagaagaacacggaccgtcctgctctcacgagcggtcccgcaacagcatctccagcacgggacgcggcaccggtaacagtagcggatctgaacggcaataatgctccagagtttcttgcggaggatgccagcttgtctagacgcaacaccacaccgtcgaggccaacgattaagatgctgtcatgcttgtttccttctcgcgtctgatgaatggtcgctggacgtcgggtgtccgaggcgcatgcgtggtagcccccggtcgatctgtccgcgaagcggtgtgcagtgcaggacggcggcagcatacctttccgaaaagaaaacggcatcagcattggcgttagtcatatacttgtccatattcacccgatttgcctgtatatatatataccttcgtcatgtggaaattcgttgttgagaattgagatgcatctcttacccgcacttgaatgaatggcctgtgaatc

SEQ ID NO: 82471 - DNA, 1386 bp, Zea Mays
ccaatctttccactcgccaattcgctcgatctccaatctggcaaatcccctcatctctcacacaacctccgaatcaaacgctgaatcgcgccaaatttactcttgatctatctccaaacccgccgctatctctcatcctgctattgcaatttcatccaaaacttgctccctcggaagccatcaccatggccgcggaggcgggcagtcggcgcggggcggcggcgcggaggaaggcgaaggaggcggcggtgggcgccgccgcgagggttctcttctacccgacactgctgtacaacgtggtgcggagcaaggtccaggccgagttccggtggtgggacgagttcgttttgctcggagcggttccattccgcagcgatgtaacacgcttacagaagcttgggatatgtggtgtgataaccttaaatgaaccatttgagactttggtaccatcatctatgtataagtcacgtgggatcgatcaccttgttattcctacaagagattatatgtttgctccttcacttgtggatattaatcaagctactgatttcattcatagaaatgcgtcttgtgggaaaataacatatattcactgcaaagctggaaggggccggagtacaacagtcgtcttgtgctatctggtaaatttaattatttatctcttgttaagaataataacatgctagaacctgagctgagaacttcagttcataatgagaagaaaagttatagcatactacctgcttggaatgggtttcaaattgtgtcaggggcaatccatgttttatcgtggttcttaaattttcatcaggtcaaatacaagaatatgacacctgctgcagctttcgagcatgtacggtctaaaagggctcgagtgctgttgacacattcgcaatggaaggctgttcaagaattcagcaagaagaacacggaccgtcctgctctcacgagcggtcccgcaacagcatctccagcacgggacgcggcaccggtaacagtagcggatctgaacggcaataatgctccagagtttcttgcggaggatgccagcttgtctagacgcaacaccacaccgtcgaggccaacgattaagatgctgtcatgcttgtttccttctcgcgtctgatgaatggtcgctggacgtcgggtgtccgaggcgcatgcgtggtagcccccggtcgatctgtccgcgaagcggtgtgcagtgcaggacggcggcagcatacctttccgaaaagaaaacggcatcagcattggcgttagtcatatacttgtccatattcacccgatttgcctgtatatatatataccttcgtcatgtggaaattcgttgttgagaattgagatgcatctcttacccgcacttgaatgaatggcctgtgaatc

SEQ ID NO: 82472 - DNA, 1305 bp, Zea Mays
gcgaatcccaatctttccactcgccaattcgctcgatctccaatctggcaaatcccctcatctctcacacaacctccgaatcaaacgctgaatcgcgccaaatttactcttgatctatctccaaacccgccgctatctctcatcctgctattgcaatttcatccaaaacttgctccctcggaagccatcaccatggccgcggaggcgggcagtcggcgcggggcggcggcgcggaggaaggcgaaggaggcggcggtgggcgccgccgcgagggttctcttctacccgacactgctgtacaacgtggtgcggagcaaggtccaggccgagttccggtggtgggacgagttcgttttgctcggagcggttccattccgcagcgatgtaacacgcttacagaagcttgggatatgtggtgtgataaccttaaatgaaccatttgagactttggtaccatcatctatgtataaggcaagtgacataactgctgacccaatctattttcaatcagaaatacgctgtgacctaaatgctcctctgctgaaatttacagtcacgtgggatcgatcaccttgttattcctacaagagattatatgtttgctccttcacttgtggatattaatcaagctactgatttcattcatagaaatgcgtcttgtgggaaaataacatatattcactgcaaagctggaaggggccggagtacaacagtcgtcttgtgctatctggtcaaatacaagaatatgacacctgctgcagctttcgagcatgtacggtctaaaagggctcgagtgctgttgacacattcgcaatggaaggctgttcaagaattcagcaagaagaacacggaccgtcctgctctcacgagcggtcccgcaacagcatctccagcacgggacgcggcaccggtaacagtagcggatctgaacggcaataatgctccagagtttcttgcggaggatgccagcttgtctagacgcaacaccacaccgtcgaggccaacgattaagatgctgtcatgcttgtttccttctcgcgtctgatgaatggtcgctggacgtcgggtgtccgaggcgcatgcgtggtagcccccggtcgatctgtccgcgaagcggtgtgcagtgcaggacggcggcagcatacctttccgaaaagaaaacggcatcagcattggcgttagtcatatacttgtccatattcacccgatttgcctgtatatatatataccttcgtcatgtggaaattcgttgttgagaattgagatgcatctcttacccgcacttgaatgaatggcctgtgaatc

SEQ ID NO: 82473 - DNA, 548 bp, Zea Mays
agggagctctgcagcacaggcagccgaacaccggcaagtcaactcttctgcgcgtcccattcacgacttgctgatatctttttgctttgcctgcatccggatctccttctccaactggtctctcattcagcccagcttcgcctttgacccgaggaacaagacagatcctcaggagaagatcgcagttctcacaattctaatcagattacaatttggagttggagatatttggtgacacctacctcgctgaagatattcatgctcctcaatatttaagtttaatctgagtaaggcaagaaaatttgtgatcatgttgaggccacaaagatacattgactgtgttatttggttccccctattacacaagctattcttgattaaacaagcagttgaaatgtttgatgttcagttgtttcccatccatcaagtgttttgaaactctcttgttgttgaatgcctactccacttcggtttggacaagccattttgctgattacagtactgttagttgccttgtttaccttgaacatgcctagcaacacttaagg

SEQ ID NO: 82474 - DNA, 5114 bp, Zea Mays
ctgaattagccacagccacagggagctctgcagcacaggcagccgaacaccggcaagtcaactcttctgcgcgtcccattcacgacttgctgatatctttttgctttgcctgcatccggatctccttctccaactggtctctcattcagcccagcttcgcctttgacccgaggaacaagacagatcctcaggagaagatcgcagttctcacaattctaatcaggcaagtgttgtacttgttagttaccatacacgtttatgtttcgtcctgcgacctagcttgaagtcaattttcattggatccgtgatctcgtttccaaaaaaaagtttgaaactggatctgagttgaagatcttggtccgtagttaccccagtaccccacctttacttagatctgagcatgtaaggaatattcttgattccatggctggcacaacaactgttgtaggatgggttgtttcacctattcttaggaaaatgctttctctggtgcagtcctatgtatcaagtcagtacaactggaagtctaatatggtgtccgacctcaagaatttggaggctacattaatggaggtactcctggtagttgatgaagctgaaaggcgacatttaaaggacaggaatcaggtagcattgttgtgccaaatgagagaagcagtttgtgacacagaagatgtgttagataagtttgactataaacttataagagaaaaagttgagcaccaaagcatggctaggagcatagttgcctcttcgctttctcttggtaagcgtttagttggccttgacaagttgagatcagaactacatatggttatcaaaagcatggccagagttaaatcttgtgcagagatgtttgcaagtgttatggcagttgagagcactaactccattaagccttctgattgtgttggaactagagtcactgggtcttttccacgtgaaggaaccatttttggacgaaaggaggaggttgatgaactagtcagttggttgctgcacagaaggaatataaatccatcaaatgatgaaggatcattcactatacaactgcattctatacattcaaaaaaaaatatagagttgcattctattgttggtattggaggcatcggcaagactacagtagctcaaagcatctataacgatcagagaatagtaaacgcttttgataagaggatgtgggtttctgtttcacataactttgacaagattaatctaattaaggagataattgcgcatgcatctgatgataagaacatcaaattgatacatttcaatttcaatatgctccaagaagaacttcaaagaataatttctaacaagaaatttctattagtgttggatgatgtgtggtatgacgagagttatggggaacacattaacagagagaagtggtgggaactgatagctcccatggaaaatgcagtggcaggaagcaagatactagtaacaacaaggatggaattagtagcaaaagtgctggacagcagcagatcattcttacatggccttggacaggatgatagctgggcactcttcagacattgccacaattctattttaagttcttcaacactagagagcattggaatgcaaattgttcggaaacttaatggttcacctctagctctgaatgtcataggaaggcatttatacggcagacacaaagtggcagagtggaatgaagttcttcatagcaatatcctcaattcagacgacatgttaacgatattgcggccaagctatgaaggtttaccagtacatctccagcgctgcttttcttattgcagtttattcccaaaaggttatcacattgatccggaaaagctgatatatatgtggatagctcaggattttattgacactaaaggaagcacaaacaagtctttgaaagattctggaagaagctacttcgatgaattgctgtctagatcattttttcaaatgcttaaacctggcagcgaaacattttacgttatgcatgatataatgagtgacctggcacttcatgtttctcagggtgaatgccttagggttgagtgtgagtctatggagccaatgcctctttatactcaacatttgtccatttatagtgaaaacctggaaaatcttgtgaattgtgatctgccaaaattgcgttcattgatagttttgaacaaatcctggttttgctccaaaatctgtctgaatcatgctatacttggcaagcttaagagtgtccgggtgttggatataaccggttgttgtttagaacaattacccgatgctgtcaatcggttgattcaccttcgttacctaggtatacgctgaactttgcacccgttaccaagaaagatgttaatgtatcatttacaggcattgtttgtgcagtatcactcatgttattcccaaaggggatataacagttcttcaatgcaaattgcaaagacttttagaggccatttccatcttccagaaagcatcaataaacttgtcaatctggtccatgttgacgtagagaaggcatatgttcttatgttatccagcactctcaagcttccatttgttgagtgtgctggagaattccatgtcaatgatgagggaagtctactaggtctgaaggaccttaacatgatccgaggacatctcacacttctgtccctagataaggtgcaaaacaaagaggaagcttctaaggctcatctacaccataaggagcacataatgaagttggagctacaatggggatcgcttaattttgctagttctaccaaacagggtgttgaggtgctcgatgtcctgaaaccacactctgatcttgaggagctaactataagtggatatcctggtgctaggtctccttcttggctggagtctggttggctgagcagactacaatttatttgcctacgtgattgcaacagatgggaggtacttccacctttaggggatctgccattactgaaaactgtcgaaatacggcgaatgcaagggcttagaacacttggtcagaaattctttggccgtgctggatttccatctttggagagattgctactagagcggttaccagaattggaatggtgttgtgtcgataacgaccaagtgtttcagaatctaagacatctatcagttgctggatgtccgaagttaagagaatatcctacatatccttggacacttgaacatatagctattctggacgaggaacgaattcaagttaagacttttattcctagtgctagagtatcaagaactttttgtatcttggtatcaagcttcttccatgtcttacgtgcacatcacctagaatttgtcgaagatatggagatctatgttaaccatgtggtatgcatgtccagagaagtgctagaaaatctgaaatctctccagaatttgaaaatatatggcatacatagggccaacacttgctctgtgattgcaaaattgtgggatgagaatgggtcagctgtgtttccttcatcacttaggagccttcagttagtgcagtgctacctgaaaccatcctatttctccaagcagttgaataacctctcatcacttgagactttgcgcctaataaattgtgacaccattgagatgccctgtccaccagtaaacatgtggcacttgaggatactaaaacagttggtcctttataaatgtgattggatcacctttttggaggggtcagaagcattggtttccctggaagaaatggccataagtgactgttatgacttgaaatatgtaccagatttaaacaatatgccatctcttgagaaattgcatttgagacgttgccctcaagttatgcgtttgtccagtgctgattaccagacaagattgaaggaactggtcatagaatcttgtgatgcactatcatcacttagagagttgcaaggccttgtctcccttactaagcttatcgttgcaaactgctctaagttggaattgctgcctggtatggattccttctgtgcacttgggattctgattattgaggattgccgtcttctgaggtcactaccagagagaggtcttcctgtatcgcttagaacttttgtattggatggatgccatcaagcattagacgagcaatttcagaagggggaaggtccagactggaacaaggttgctgcacttccaggatgcatgcgctatgaacatatggcagatgtcgaagatgagtctgtctggcattcattctataacctttattacttctagtatagcagctctcagctgtgcttattttcaattgttgtggcatacctatacgtcaagtttttttcaaacactggactgaattagatgtaaattacttcttttctgtaccttgtatttgtatattgaggcaaattccagtttagaaactaaccaagatttttctgtaaattcagaaacttttcaagcatttctgaagttttgaaatatagagacatctcatgaatttccaaacaaaacataaagttggcatagcaagtgtaaaaccacaaactctgacacaccaacatagttcattttatttatgcggtatattctagaagatttggagttggtttgttgttttctaaaaaataatctacatacctctgaattctttaaaattttgcaaataagtgaacttttcttgaatgaatgaatattcctctcacacctaccaattatatgtgccctcattttctgccccctctaccattttgttagggctagtttgggagccataaaaccggatgtgattggaggggctaaaatcgccttctgaaaactagcccttagtgatcaattacaatttggagttggagatatttggtgacacctacctcgctgaagatattcatgctcctcaatatttaagtttaatctgagtaaggcaagaaaatttgtgatcatgttgaggccacaaagatacattgactgtgttatttggttccccctattacacaagctattcttgattaaacaagcagttgaaatgtttgatgttcagttgtttcccatccatcaagtgttttgaaactctcttgttgttgaatgcctactccacttcggtttggacaagccattttgctgattacagtactgttagttgccttgtttaccttgaacatgcctagcaacacttaagg

SEQ ID NO: 82475 - DNA, 4843 bp, Zea Mays
gctgaattagccacagccacagggagctctgcagcacaggcagccgaacaccggcaagtcaactcttctgcgcgtcccattcacgacttgctgatatctttttgctttgcctgcatccggatctccttctccaactggtctctcattcagcccagcttcgcctttgacccgaggaacaagacagatcctcaggagaagatcgcagttctcacaattctaatcagtcctatgtatcaagtcagtacaactggaagtctaatatggtgtccgacctcaagaatttggaggctacattaatggaggtactcctggtagttgatgaagctgaaaggcgacatttaaaggacaggaatcaggtagcattgttgtgccaaatgagagaagcagtttgtgacacagaagatgtgttagataagtttgactataaacttataagagaaaaagttgagcaccaaagcatggctaggagcatagttgcctcttcgctttctcttggtaagcgtttagttggccttgacaagttgagatcagaactacatatggttatcaaaagcatggccagagttaaatcttgtgcagagatgtttgcaagtgttatggcagttgagagcactaactccattaagccttctgattgtgttggaactagagtcactgggtcttttccacgtgaaggaaccatttttggacgaaaggaggaggttgatgaactagtcagttggttgctgcacagaaggaatataaatccatcaaatgatgaaggatcattcactatacaactgcattctatacattcaaaaaaaaatatagagttgcattctattgttggtattggaggcatcggcaagactacagtagctcaaagcatctataacgatcagagaatagtaaacgcttttgataagaggatgtgggtttctgtttcacataactttgacaagattaatctaattaaggagataattgcgcatgcatctgatgataagaacatcaaattgatacatttcaatttcaatatgctccaagaagaacttcaaagaataatttctaacaagaaatttctattagtgttggatgatgtgtggtatgacgagagttatggggaacacattaacagagagaagtggtgggaactgatagctcccatggaaaatgcagtggcaggaagcaagatactagtaacaacaaggatggaattagtagcaaaagtgctggacagcagcagatcattcttacatggccttggacaggatgatagctgggcactcttcagacattgccacaattctattttaagttcttcaacactagagagcattggaatgcaaattgttcggaaacttaatggttcacctctagctctgaatgtcataggaaggcatttatacggcagacacaaagtggcagagtggaatgaagttcttcatagcaatatcctcaattcagacgacatgttaacgatattgcggccaagctatgaaggtttaccagtacatctccagcgctgcttttcttattgcagtttattcccaaaaggttatcacattgatccggaaaagctgatatatatgtggatagctcaggattttattgacactaaaggaagcacaaacaagtctttgaaagattctggaagaagctacttcgatgaattgctgtctagatcattttttcaaatgcttaaacctggcagcgaaacattttacgttatgcatgatataatgagtgacctggcacttcatgtttctcagggtgaatgccttagggttgagtgtgagtctatggagccaatgcctctttatactcaacatttgtccatttatagtgaaaacctggaaaatcttgtgaattgtgatctgccaaaattgcgttcattgatagttttgaacaaatcctggttttgctccaaaatctgtctgaatcatgctatacttggcaagcttaagagtgtccgggtgttggatataaccggttgttgtttagaacaattacccgatgctgtcaatcggttgattcaccttcgttacctaggtatacgctgaactttgcacccgttaccaagaaagatgttaatgtatcatttacaggcattgtttgtgcagtatcactcatgttattcccaaaggggatataacagttcttcaatgcaaattgcaaagacttttagaggccatttccatcttccagaaagcatcaataaacttgtcaatctggtccatgttgacgtagagaaggcatatgttcttatgttatccagcactctcaagcttccatttgttgagtgtgctggagaattccatgtcaatgatgagggaagtctactaggtctgaaggaccttaacatgatccgaggacatctcacacttctgtccctagataaggtgcaaaacaaagaggaagcttctaaggctcatctacaccataaggagcacataatgaagttggagctacaatggggatcgcttaattttgctagttctaccaaacagggtgttgaggtgctcgatgtcctgaaaccacactctgatcttgaggagctaactataagtggatatcctggtgctaggtctccttcttggctggagtctggttggctgagcagactacaatttatttgcctacgtgattgcaacagatgggaggtacttccacctttaggggatctgccattactgaaaactgtcgaaatacggcgaatgcaagggcttagaacacttggtcagaaattctttggccgtgctggatttccatctttggagagattgctactagagcggttaccagaattggaatggtgttgtgtcgataacgaccaagtgtttcagaatctaagacatctatcagttgctggatgtccgaagttaagagaatatcctacatatccttggacacttgaacatatagctattctggacgaggaacgaattcaagttaagacttttattcctagtgctagagtatcaagaactttttgtatcttggtatcaagcttcttccatgtcttacgtgcacatcacctagaatttgtcgaagatatggagatctatgttaaccatgtggtatgcatgtccagagaagtgctagaaaatctgaaatctctccagaatttgaaaatatatggcatacatagggccaacacttgctctgtgattgcaaaattgtgggatgagaatgggtcagctgtgtttccttcatcacttaggagccttcagttagtgcagtgctacctgaaaccatcctatttctccaagcagttgaataacctctcatcacttgagactttgcgcctaataaattgtgacaccattgagatgccctgtccaccagtaaacatgtggcacttgaggatactaaaacagttggtcctttataaatgtgattggatcacctttttggaggggtcagaagcattggtttccctggaagaaatggccataagtgactgttatgacttgaaatatgtaccagatttaaacaatatgccatctcttgagaaattgcatttgagacgttgccctcaagttatgcgtttgtccagtgctgattaccagacaagattgaaggaactggtcatagaatcttgtgatgcactatcatcacttagagagttgcaaggccttgtctcccttactaagcttatcgttgcaaactgctctaagttggaattgctgcctggtatggattccttctgtgcacttgggattctgattattgaggattgccgtcttctgaggtcactaccagagagaggtcttcctgtatcgcttagaacttttgtattggatggatgccatcaagcattagacgagcaatttcagaagggggaaggtccagactggaacaaggttgctgcacttccaggatgcatgcgctatgaacatatggcagatgtcgaagatgagtctgtctggcattcattctataacctttattacttctagtatagcagctctcagctgtgcttattttcaattgttgtggcatacctatacgtcaagtttttttcaaacactggactgaattagatgtaaattacttcttttctgtaccttgtatttgtatattgaggcaaattccagtttagaaactaaccaagatttttctgtaaattcagaaacttttcaagcatttctgaagttttgaaatatagagacatctcatgaatttccaaacaaaacataaagttggcatagcaagtgtaaaaccacaaactctgacacaccaacatagttcattttatttatgcggtatattctagaagatttggagttggtttgttgttttctaaaaaataatctacatacctctgaattctttaaaattttgcaaataagtgaacttttcttgaatgaatgaatattcctctcacacctaccaattatatgtgccctcattttctgccccctctaccattttgttagggctagtttgggagccataaaaccggatgtgattggaggggctaaaatcgccttctgaaaactagcccttagtgatcaattacaatttggagttggagatatttggtgacacctacctcgctgaagatattcatgctcctcaatatttaagtttaatctgagtaaggcaagaaaatttgtgatcatgttgaggccacaaagatacattgactgtgttatttggttccccctattacacaagctattcttgattaaacaagcagttgaaatgtttgatgttcagttgtttcccatccatcaagtgttttgaaactctcttgttgttgaatgcctactccacttcggtttggacaagccattttgctgattacagtactgttagttgccttgtttaccttgaacatgcctagcaacacttaagg

SEQ ID NO: 82476 - DNA, 5005 bp, Zea Mays
ctacaactgtgttctatataaaaaaaagttgtacttgcaagctagagactattcacttatagcagccggctgtagctgaattagccacagccacagggagctctgcagcacaggcagccgaacaccggcaagtcaactcttctgcgcgtcccattcacgacttgctgatatctttttgctttgcctgcatccggatctccttctccaactggtctctcattcagcccagcttcgcctttgacccgaggaacaagacagatcctcaggagaagatcgcagttctcacaattctaatcaggaatattcttgattccatggctggcacaacaactgttgtaggatgggttgtttcacctattcttaggaaaatgctttctctggtgcagtcctatgtatcaagtcagtacaactggaagtctaatatggtgtccgacctcaagaatttggaggctacattaatggaggtactcctggtagttgatgaagctgaaaggcgacatttaaaggacaggaatcaggtagcattgttgtgccaaatgagagaagcagtttgtgacacagaagatgtgttagataagtttgactataaacttataagagaaaaagttgagcaccaaagcatggctaggagcatagttgcctcttcgctttctcttggtaagcgtttagttggccttgacaagttgagatcagaactacatatggttatcaaaagcatggccagagttaaatcttgtgcagagatgtttgcaagtgttatggcagttgagagcactaactccattaagccttctgattgtgttggaactagagtcactgggtcttttccacgtgaaggaaccatttttggacgaaaggaggaggttgatgaactagtcagttggttgctgcacagaaggaatataaatccatcaaatgatgaaggatcattcactatacaactgcattctatacattcaaaaaaaaatatagagttgcattctattgttggtattggaggcatcggcaagactacagtagctcaaagcatctataacgatcagagaatagtaaacgcttttgataagaggatgtgggtttctgtttcacataactttgacaagattaatctaattaaggagataattgcgcatgcatctgatgataagaacatcaaattgatacatttcaatttcaatatgctccaagaagaacttcaaagaataatttctaacaagaaatttctattagtgttggatgatgtgtggtatgacgagagttatggggaacacattaacagagagaagtggtgggaactgatagctcccatggaaaatgcagtggcaggaagcaagatactagtaacaacaaggatggaattagtagcaaaagtgctggacagcagcagatcattcttacatggccttggacaggatgatagctgggcactcttcagacattgccacaattctattttaagttcttcaacactagagagcattggaatgcaaattgttcggaaacttaatggttcacctctagctctgaatgtcataggaaggcatttatacggcagacacaaagtggcagagtggaatgaagttcttcatagcaatatcctcaattcagacgacatgttaacgatattgcggccaagctatgaaggtttaccagtacatctccagcgctgcttttcttattgcagtttattcccaaaaggttatcacattgatccggaaaagctgatatatatgtggatagctcaggattttattgacactaaaggaagcacaaacaagtctttgaaagattctggaagaagctacttcgatgaattgctgtctagatcattttttcaaatgcttaaacctggcagcgaaacattttacgttatgcatgatataatgagtgacctggcacttcatgtttctcagggtgaatgccttagggttgagtgtgagtctatggagccaatgcctctttatactcaacatttgtccatttatagtgaaaacctggaaaatcttgtgaattgtgatctgccaaaattgcgttcattgatagttttgaacaaatcctggttttgctccaaaatctgtctgaatcatgctatacttggcaagcttaagagtgtccgggtgttggatataaccggttgttgtttagaacaattacccgatgctgtcaatcggttgattcaccttcgttacctaggtatacgctgaactttgcacccgttaccaagaaagatgttaatgtatcatttacaggcattgtttgtgcagtatcactcatgttattcccaaaggggatataacagttcttcaatgcaaattgcaaagacttttagaggccatttccatcttccagaaagcatcaataaacttgtcaatctggtccatgttgacgtagagaaggcatatgttcttatgttatccagcactctcaagcttccatttgttgagtgtgctggagaattccatgtcaatgatgagggaagtctactaggtctgaaggaccttaacatgatccgaggacatctcacacttctgtccctagataaggtgcaaaacaaagaggaagcttctaaggctcatctacaccataaggagcacataatgaagttggagctacaatggggatcgcttaattttgctagttctaccaaacagggtgttgaggtgctcgatgtcctgaaaccacactctgatcttgaggagctaactataagtggatatcctggtgctaggtctccttcttggctggagtctggttggctgagcagactacaatttatttgcctacgtgattgcaacagatgggaggtacttccacctttaggggatctgccattactgaaaactgtcgaaatacggcgaatgcaagggcttagaacacttggtcagaaattctttggccgtgctggatttccatctttggagagattgctactagagcggttaccagaattggaatggtgttgtgtcgataacgaccaagtgtttcagaatctaagacatctatcagttgctggatgtccgaagttaagagaatatcctacatatccttggacacttgaacatatagctattctggacgaggaacgaattcaagttaagacttttattcctagtgctagagtatcaagaactttttgtatcttggtatcaagcttcttccatgtcttacgtgcacatcacctagaatttgtcgaagatatggagatctatgttaaccatgtggtatgcatgtccagagaagtgctagaaaatctgaaatctctccagaatttgaaaatatatggcatacatagggccaacacttgctctgtgattgcaaaattgtgggatgagaatgggtcagctgtgtttccttcatcacttaggagccttcagttagtgcagtgctacctgaaaccatcctatttctccaagcagttgaataacctctcatcacttgagactttgcgcctaataaattgtgacaccattgagatgccctgtccaccagtaaacatgtggcacttgaggatactaaaacagttggtcctttataaatgtgattggatcacctttttggaggggtcagaagcattggtttccctggaagaaatggccataagtgactgttatgacttgaaatatgtaccagatttaaacaatatgccatctcttgagaaattgcatttgagacgttgccctcaagttatgcgtttgtccagtgctgattaccagacaagattgaaggaactggtcatagaatcttgtgatgcactatcatcacttagagagttgcaaggccttgtctcccttactaagcttatcgttgcaaactgctctaagttggaattgctgcctggtatggattccttctgtgcacttgggattctgattattgaggattgccgtcttctgaggtcactaccagagagaggtcttcctgtatcgcttagaacttttgtattggatggatgccatcaagcattagacgagcaatttcagaagggggaaggtccagactggaacaaggttgctgcacttccaggatgcatgcgctatgaacatatggcagatgtcgaagatgagtctgtctggcattcattctataacctttattacttctagtatagcagctctcagctgtgcttattttcaattgttgtggcatacctatacgtcaagtttttttcaaacactggactgaattagatgtaaattacttcttttctgtaccttgtatttgtatattgaggcaaattccagtttagaaactaaccaagatttttctgtaaattcagaaacttttcaagcatttctgaagttttgaaatatagagacatctcatgaatttccaaacaaaacataaagttggcatagcaagtgtaaaaccacaaactctgacacaccaacatagttcattttatttatgcggtatattctagaagatttggagttggtttgttgttttctaaaaaataatctacatacctctgaattctttaaaattttgcaaataagtgaacttttcttgaatgaatgaatattcctctcacacctaccaattatatgtgccctcattttctgccccctctaccattttgttagggctagtttgggagccataaaaccggatgtgattggaggggctaaaatcgccttctgaaaactagcccttagtgatcaattacaatttggagttggagatatttggtgacacctacctcgctgaagatattcatgctcctcaatatttaagtttaatctgagtaaggcaagaaaatttgtgatcatgttgaggccacaaagatacattgactgtgttatttggttccccctattacacaagctattcttgattaaacaagcagttgaaatgtttgatgttcagttgtttcccatccatcaagtgttttgaaactctcttgttgttgaatgcctactccacttcggtttggacaagccattttgctgattacagtactgttagttgccttgtttaccttgaacatgcctagcaacacttaagg

SEQ ID NO: 82477 - DNA, 1020 bp, Zea Mays
cttctcgccgcttcacaaggagacggcgacgagcgtctccaaagccgtcgctccacagggtgctcgacgtcccggctcgagtgaagcttgttgagcaagatgaggaagggcattgcaatgcagaatgcaagaccattgagcgtgcatgtcaggaggtgataggatatgctgataccgatgttgctgagtttgtatacaaaaataacccctcggtcgatcagcttatgaaatttctctgcaaagatctttcgaaagcatgtgccaaggacccaccgccagttccaaaagatcgtgtccctggggaaccatttgcaaggaagccatcaaaggatgctgagatggaaaagatattgagatcaatggagggtatgccgggagccccaagcatgaaaatgtactccagggacgatctgatgaaaaataactttggtactgaagacgacgacgaggaggatgatgaagatgaggatgacaacttcccaaagaacttggggaaagctctgaaaaacaagggctctcaaaagaaagatttgaaacagcaagtcgtgcagcagttcaaggataccagcaagaagttgaaagggcatgtaaacaaggtgtccggtatggtaaagaaatggtggaaaggggcaaagaagcctgccaaatccagcaaaagcaaaactgagctctgaagcattgttgaatcacgtcagtaaatctcatccgtcttccacttctcctggagcaaagttttagatggttatcggaagataaaagttacagcaacgcaaccagggcttttgttagagagtttagctacataaaacgtgtacaattgtttgtttttaacttctgttatttgcagtgtacactagtaaaagaactgaactccgatgatagtttttttccagattagtcgtgtcccaattggtcgttatagtgtttgatactctataaaactaaacagctggtgacgccagggaattagtttattggctatgcataatcgaacttttcactaattaatgacttgctgtc

SEQ ID NO: 82478 - DNA, 3003 bp, Zea Mays
ctcgtttcgaactgtttacacgtgaggcaacaaacgcggacgctgctcacggcacatgacttttctacccctgctcgtcattctcacttttctgccctgctcctagcgacagggcctgtctgttctccttccgccgcaccacaaaacctccatggatgagccgtctcccctagagttggccgacggagatgcagtcctatggctcccagagccggccgccgtagatctagctccgcagctcccagatgaggtggatgtggaaccagacggagtggatccggcatccccgctgctcgtcgttagccccagcctcgtcgtggatcctgccccaccactccctctcgattgcaaggtggatcgacacagagatgaccccttccagcccgccgtggagacgacgcttgccttccagtctgacacggagaggatcctgctactgcgttctctgtccatccccaggacacaggtgacagcgatgacagatcggcatacttgtacttcaagtgccaggagaaggaccaccactcccactagctcgtgggttgctggactagctcttccaatcttgatgaagaaaccaaacatgggtgccaaagagttacaaaaagagttgcaagacaaatggaaatgtaccatttcctatgacaccgtttggaagggaagagaaaaggcctttcttgatttgcatggtgcttgggaggacagctttcgactattatttagttggaaggaggcggttttggaaaaaatgccagatagtgttattgagattgatgttcaagaagaggatggaaaggtgtttttcagtaggtttttctgtgcttttggaccatgcataaaagggtttcttcaaggatgcagaccatatctgagtgttgattcgacagctttgaacggtaacagacaccactcgccttgtctcatgcattggaagacgccggttcatcgcagccttctgcaagggtagctgagtcccctccaaggcaaactaggatagctgtacgcaaaatgacaccgaagaagaagaaaatttcgtccatgatttaaattgtagttgtatgatttggaatgtagttgtacggtttgaattattgttctatggtcactttgaatactgtgtgatttcaatatccaaactgcagccagacaaaactgcaattgtggacagaaatgttcttcttcttgctcactgtttggacaaaactgctatgttttttctaataatctagattcattcatggttgtggcatgagttataacctttgtcagttggtctcactgtttgggtgcacaaccttgatgatgatttttttttgaaatcccttgatgatgaattgaatggaagctgagtgcctcactgcctcttcagagttaaaaatggactgagaaacatagcagtggtggcggtgggttacagagagaggacggtggatggagtggagcctgcatctcatacaggagaaagggggttcggatacaggagaacgagaaggagcaggggcagaaaagtcctatgccatgagcagcattcgtgtttgttgtgcacgcgcaaacagttcgaaacgagcgagcgtatggctgtctccgtccggttgtagcgaagtccgacggcgggatccgattgtggcgaagtcacgcccgtgcagtgcgcccacagcaaaaagctccggcccacgggttagtgtggggctgcaggcctgcagctactagcctacaacaaatatctacgagctgcactgcagggtacgctcgtctgtgtctgcctactccctcctccggctcccgcgaagcgactccaagaagcagcaggagcgtcgagctcgagcagcagccatggatggcgaggaggttggcaggaggggtattcctactctgctgaagccgtcttcctcctccagcgacggcagtgccggggaacaagagcacatcgcttctgacgtcactcagctcataggatggacgccgctggtcgaattgaagcgaatcgccagcgaggctgggatcgatgcgcggatcgtcggcaagatggaggcttaccagccactttgctccatcaaggaccgctctgctttgagaatgatagaggatgctgaggagaggggattgatttcgcctggagtcacaacactggtggagccgacgagtggtaacatggggttagggttggtcctcttcgctattcagagaggttacaggctcattgcagtcatgccggctaaatactcgcttgacaagcagatcttgctgaggttcatgggcgcggagctatacttaactgatccggcccttggctttccgggcatgtttgacaaagttgaacagctccgaaaacagctgccaaatgtacatgttctgaaccaagtcacgaacaaagcgaattctgaagcccacttcagattgaccgggcctgagatctggaaggacacggcaggcaaggtggatgtattcgtagccggttcaggcacaggaggcactgtttctggcgtcgggaagtatctgaagatgcaaaagccaggcgtcaagatcatctgcgttgagcctgcagaaagcccagtgatttcaggtggcgcgcctggcaagcataaaatccagggagtaggcccagggtttctacctgaagttctggacacctcggtcatcgacgagaccgtcaccgtgagcaccgaggaggccatggcgaatgcgaggaggctggccagggaagagggcctgctcgtgggcatttcttccggagcaaacctggcagcttgtttgaaggtcgcttcgagacaggagaacaagggcaagatgatcgtcactgtgttcccaagtggcggcgagagatacatcaactccgacctctttgcagatgtgcgagaggagtgcattgccatgacattttgatcttccttttttcttttggacactttggtctgaatggtgtcagcattctccacaccacacagacatatttccaggacatggtgttcacgtagattgtctacgtgggaagaccagctcagc

SEQ ID NO: 82479 - DNA, 3051 bp, Zea Mays
aacgcggacgctgctcacggcacatgacttttctacccctgctcgtcattctcacttttctgccctgctcctagcgacagggcctgtctgttctccttccgccgcaccacaaaacctccatggatgagccgtctcccctagagttggccgacggagatgcagtcctatggctcccagagccggccgccgtagatctagctccgcagctcccagatgaggtggatgtggaaccagacggagtggatccggcatccccgctgctcgtcgttagccccagcctcgtcgtggatcctgccccaccactccctctcgattgcaaggtggatcgacacagagatgaccccttccagcccgccgtggagacgacgcttgccttccagtctgacacggagaggatcctgctactgcgttctctgtccatccccaggacacaggtgacagcgatgacagatcggcatacttgtacttcaagtgccaggagaaggaccaccactcccactagctcgtgggttgctggactagctcttccaatcttgatgaagaaaccaaacatgggtgccaaagagttacaaaaagagttgcaagacaaatggaaatgtaccatttcctatgacaccgtttggaagggaagagaaaaggcctttcttgatttgcatggtgcttgggaggacagctttcgactattatttagttggaaggaggcggttttggaaaaaatgccagatagtgttattgagattgatgttcaagaagaggatggaaaggtgtttttcagtaggtttttctgtgcttttggaccatgcataaaagggtttcttcaaggatgcagaccatatctgagtgttgattcgacagctttgaacggtaacagacaccactcgccttgtctcatgcattggaagacgccggttcatcgcagccttctgcaagggtagctgagtcccctccaaggcaaactaggatagctgtacgcaaaatgacaccgaagaagaagaaaatttcgtccatgatttaaattgtagttgtatgatttggaatgtagttgtacggtttgaattattgttctatggtcactttgaatactgtgtgatttcaatatccaaactgcagccagacaaaactgcaattgtggacagaaatgttcttcttcttgctcactgtttggacaaaactgctatgttttttctaataatctagattcattcatggttgtggcatgagttataacctttgtcagttggtctcactgtttgggtgcacaaccttgatgatgatttttttttgaaatcccttgatgatgaattgaatggaagctgagtgcctcactgcctcttcagagttaaaaatggactgagaaacatagcagtggtggcggtgggttacagagagaggacggtggatggagtggagcctgcatctcatacaggagaaagggggttcggatacaggagaacgagaaggagcaggggcagaaaagtcctatgccatgagcagcattcgtgtttgttgtgcacgcgcaaacagttcgaaacgagcgagcgtatggctgtctccgtccggttgtagcgaagtccgacggcgggatccgattgtggcgaagtcacgcccgtgcagtgcgcccacagcaaaaagctccggcccacgggttagtgtggggctgcaggcctgcagctactagcctacaacaaatatctacgagctgcactgcagggtacgctcgtctgtgtctgcctactccctcctccggctcccgcgaagcgactccaagaagcagcaggagcgtcgagctcgagcagcagccatggatggcgaggaggttggcaggaggggtattcctactctgctgaagccgtcttcctcctccagcgacggcagtgccggggaacaagagcacatcgcttctgacgtcactcagctcataggatggacgccgctggtcgaattgaagcgaatcgccagcgaggctgggatcgatgcgcggatcgtcggcaagatggaggcttaccagccactttgctccatcaaggaccgctctgctttgagaatgatagaggatgctgaggagaggggattgatttcgcctggagtcacaacactggtggagccgacgagtggtaacatggggttagggttggtcctcttcgctattcagagaggttacaggctcattgcagtcatgccggctaaatactcgcttgacaagcagatcttgctgaggttcatgggcgcggagctatacttaactgatccggcccttggctttccgggcatgtttgacaaagttgaacagctccgaaaacagctgccaaatgtacatgttctgaaccaagtcacgaacaaagcgaattctgaagcccacttcagattgaccggtatggatacaatagcatgtgttcgaacgatgcttatacctcagtgaacagtagctgttgctgggcctgagatctggaaggacacggcaggcaaggtggatgtattcgtagccggttcaggcacaggaggcactgtttctggcgtcgggaagtatctgaagatgcaaaagccaggcgtcaagatcatctgcgttgagcctgcagaaagcccagtgatttcaggtggcgcgcctggcaagcataaaatccagggagtaggcccagggtttctacctgaagttctggacacctcggtcatcgacgagaccgtcaccgtgagcaccgaggaggccatggcgaatgcgaggaggctggccagggaagagggcctgctcgtgggcatttcttccggagcaaacctggcagcttgtttgaaggtcgcttcgagacaggagaacaagggcaagatgatcgtcactgtgttcccaagtggcggcgagagatacatcaactccgacctctttgcagatgtgcgagaggagtgcattgccatgacattttgatcttccttttttcttttggacactttggtctgaatggtgtcagcattctccacaccacacagacatatttccaggacatggtgttgtaaatttagagaaataagtgacatgctttctacatatttaaatagattaaa

SEQ ID NO: 82480 - DNA, 2965 bp, Zea Mays
ccccaccacctccctccccagtggcggagcacgaccttagatgaagaattccttgtagattatatgtcaaatcagtaactctttctagagcctttctttttgccgaccttgctgagcttgaatctattgcaatttgcaactgcagggcagctaaatttgcaaatagcaagcaacaaagcaagcagaaactgcaagcagcaacgcggccaacgcaactacgcgagcactaagccaactagccaaagccaagcaaccaggcaagcagccggagcactgtagaaggctagcaagcagcaaattgagcaaagcaacttagcaagcagtctgcactataaactacactagccttgcagaactcagagggaacgaatagagtagtgctgggagtttagtgggtcgaggtagctgaagagcaaacaaacacgctgttcggtgttcgccgctctcccatttcaccgagaaagaagggactaatgagaagagagagcatggaggcaggggcagggaggagagggatcccctcgctgctgaaatcgccggcggcgcgggctgatgaatccggaggagccacttcgccgcagcaggagcacatcgcctccgatattacccagcttgtaggatggacgccactggtagagctgaagagaatagcccagaaggacaacgtcgacgcccgagtcgtcggcaagctggagtgctaccagcccctctgctccgtcaaggaccgcagcgctctgagaatgatcgaggacgcagaggagagagggctgatctcgcctggcgccacgacgctggtcgagccgacgagcggcaacatgggcatagccctggcgtacatcgatctggcccgaggctacaggttcgtcgcggtcatgcccgccgagtactcgctcgacaagcagatcctgctgcggtacctgggggccgatttggtgttaaccgatcctgcgcttggcttccagggacagctcgacaagctggaacagctcaggaaagaaatacccaacgcgcacgttcttgaccagttcgcaaacgcggcgaaccctgaagcgcactttagatggactggtagtgccgatctttgcacaggagcatctgatctcataagagagtgataaatgaacttgcctgtgaaacattagcagatttttttcggagcagaaaatgccatgcatgctgtatgacacatcacctctgttcgtctgtgattagggcctgagatctggaaggatacggcaggcaaagtcgacatcttcgtggccggctccggcacgggaggcacggtctctggcgtcggcaggtacttgaacagtagcggatccaggattactctaagagaggggctactaagctaagtctataaatttttttaaaccaaataaaaaatatataattgatgtttaatatgacacaagaagcaagatataatttaaacatttaaaatattttaatcttaatatctacaaacatattacgcttaatatagcatagcagttgttattcatccattcatcacaaaccaaatatgaggttactaccaaataaataattaaattaaaacttcaaataaactttgaatcacaaacctctccttggctcacgtgctcacggtcacaggctcacgggctcacggtcaccgcgtggtcggcggctggacaacgaccagtcggcggctggacaacaacgagtcgacggtcggcggctggacaacgacgagtcggcggccggcggctggacaacctgcgagtcggcgagtcggcggctggacttcgggcgccggtggggcgaggggcctgcgacctacggcagtgctccggccgtccggcggtccggcctccgtgctccgggcgagcggcgctgcgagctccagcggtgctccggggtctgggcgtgggcggctccacctccacggctggcggcggctggagctggagggtataggatagaggaaggatgttcacggggctgggcgcggctggagtgggctgtcgcgcggcgatggacctattcgttttagtgggccgcgaccgggctgcagcccaggcagccccggtcggagatccgccactgtacttgaagacgaagaacccggcggtgaaggtcgtctgcgttgagcctgctgagagcccagtcatttcaggcggcaagccttctcggcacaagatccagggcgtcgggccgggattcgtgcccaagaacctggacacctctgtcaccgacgagatcgttacggtgaccgcagaagatgcgatggcgaacgccaggaggttggccagggaagagggtctgctagtgggcatatcgtctggggcgaatctggcagcttgcctcaaggtggcgtcgagacaggagaaccgagggaagatgatcgtcaccgtgtttcctagcggtggcgagaggtacatgagctccgatctcttcgcggatgcaagggaggagtgcgtcgccatgaccttctgatcttctggacgctctgtgcggatctgcagcggcaaactgctatttctcagcgtggaatggatttttagtatcgtcgatccaatccagcagcttgcggaggcagaagatttggaatccttctggcagaaaatttactgcgcatttgcgttccattggcaggaaagactctgtacatgctcttgggctcttggctaaggacctttacagctttccttatttcttcttggcacagaaatttcagcagagaattgtaccacgagctataaactgagagatgccaatcagtatctcgttgagaaataaccacctggcctctgaataaacaaccatttcatttcttcttcttcttctagtgctgcgagacacactgtcgacgagcaacggaagcctacttccgagttccgagcaactattctatgacgatccgtctagcgtttctttagtttcttaaccacacttgttcagttagcaaagtagctctttgacgtgaacactagtgaagcat

SEQ ID NO: 82481 - DNA, 3251 bp, Zea Mays
ccccaccacctccctccccagtggcggagcacgacctaaaaataaggtatggcaatgacaaaaatatatcttgcagtaaaacaaaatttagtataaaaacattattaagaagtaccttagatgaagaattccttgtagattatatgtcaaatcagtaacttaaccaaatataagttgtcaaacaaagagcaagcatacattagcattaaaataaagagctaaatttaataaaaaaatgtatagacaatattgttacacataacacaactacctctttctagagcctttctttttgccgaccttgctgagcttgaatctattgcaatttgcaactgcagggcagctaaatttgcaaatagcaagcaacaaagcaagcagaaactgcaagcagcaacgcggccaacgcaactacgcgagcactaagccaactagccaaagccaagcaaccaggcaagcagccggagcactgtagaaggctagcaagcagcaaattgagcaaagcaacttagcaagcagtctgcactataaactacactagccttgcagaactcagagggaacgaatagagtagtgctgggagtttagtgggtcgaggtagctgaagagcaaacaaacacgctgttcggtgttcgccgctctcccatttcaccgagaaagaagggactaatgagaagagagagcatggaggcaggggcagggaggagagggatcccctcgctgctgaaatcgccggcggcgcgggctgatgaatccggaggagccacttcgccgcagcaggagcacatcgcctccgatattacccaggtgaggcactgaggcccaatcttatctagctagtctctccgtcctgggctcctcacatcgctttctgacttttttttttgtccagtttattttcttgctagcttgcttgcatttcctttgtgcgtgtgtggaagatttgtttccatgtattttcagtgctagtttgagctgccatgatacatgtaaagtttgagttgccatgatacatgtagatcaatcccagttcccctgctgcagcttgtaggatggacgccactggtagagctgaagagaatagcccagaaggacaacgtcgacgcccgagtcgtcggcaagctggagtgctaccagcccctctgctccgtcaaggaccgcagcgctctgagaatgatcgaggacgcagaggagagagggctgatctcgcctggcgccacgacgctggtcgagccgacgagcggcaacatgggcatagccctggcgtacatcgatctggcccgaggctacaggttcgtcgcggtcatgcccgccgagtactcgctcgacaagcagatcctgctgcggtacctgggggccgatttggtgttaaccgatcctgcgcttggcttccagggacagctcgacaagctggaacagctcaggaaagaaatacccaacgcgcacgttcttgaccagttcgcaaacgcggcgaaccctgaagcgcactttagatggactgggcctgagatctggaaggatacggcaggcaaagtcgacatcttcgtggccggctccggcacgggaggcacggtctctggcgtcggcaggtacttgaacagtagcggatccaggattactctaagagaggggctactaagctaagtctataaatttttttaaaccaaataaaaaatatataattgatgtttaatatgacacaagaagcaagatataatttaaacatttaaaatattttaatcttaatatctacaaacatattacgcttaatatagcatagcagttgttattcatccattcatcacaaaccaaatatgaggttactaccaaataaataattaaattaaaacttcaaataaactttgaatcacaaacctctccttggctcacgtgctcacggtcacaggctcacgggctcacggtcaccgcgtggtcggcggctggacaacgaccagtcggcggctggacaacaacgagtcgacggtcggcggctggacaacgacgagtcggcggccggcggctggacaacctgcgagtcggcgagtcggcggctggacttcgggcgccggtggggcgaggggcctgcgacctacggcagtgctccggccgtccggcggtccggcctccgtgctccgggcgagcggcgctgcgagctccagcggtgctccggggtctgggcgtgggcggctccacctccacggctggcggcggctggagctggagggtataggatagaggaaggatgttcacggggctgggcgcggctggagtgggctgtcgcgcggcgatggacctattcgttttagtgggccgcgaccgggctgcagcccaggcagccccggtcggagatccgccactgtacttgaagacgaagaacccggcggtgaaggtcgtctgcgttgagcctgctgagagcccagtcatttcaggcggcaagccttctcggcacaagatccagggcgtcgggccgggattcgtgcccaagaacctggacacctctgtcaccgacgagatcgttacggtgaccgcagaagatgcgatggcgaacgccaggaggttggccagggaagagggtctgctagtgggcatatcgtctggggcgaatctggcagcttgcctcaaggtggcgtcgagacaggagaaccgagggaagatgatcgtcaccgtgtttcctagcggtggcgagaggtacatgagctccgatctcttcgcggatgcaagggaggagtgcgtcgccatgaccttctgatcttctggacgctctgtgcggatctgcagcggcaaactgctatttctcagcgtggaatggatttttagtatcgtcgatccaatccagcagcttgcggaggcagaagatttggaatccttctggcagaaaatttactgcgcatttgcgttccattggcaggaaagactctgtacatgctcttgggctcttggctaaggacctttacagctttccttatttcttcttggcacagaaatttcagcagagaattgtaccacgagctataaactgagagatgccaatcagtatctcgttgagaaataaccacctggcctctgaataaacaaccatttcatttcttcttcttcttctagtgctgcgagacacactgtcgacgagcaacggaagcctacttccgagttccgagcaactattctatgacgatccgtctagcgtttctttagtttcttaaccacacttgttcagttagcaaagtagctctttgacgtgaacactagtgaagcat

SEQ ID NO: 82482 - DNA, 3424 bp, Zea Mays
ctgtgatcatgtttctataactctttttccctcttcaatgaaggcatagctcctaccatttgctttcaaaaaaaatatccgcaggagaagttccagggcaaggtatctcgagccaaagttgacacgactgtcatatgaaaactgacttgattcttcactaatctcgcagcccatcacccaagttttcagaacttaaataaaaccaagtgctgcacacacacatttcatcgaacacatgaacctcacacaaatccgaatccgcatccatctgaaggccgaagttatacgaagaggataataatacgaggagagcgcggtataaacaaacagcagtagccgcacctgtagttggtgtgcatgagtgcgagcttgagcggccccgactgcagctcggcccagcggagcgtgcagacatttacactgaagtcgagaccctccgagtagaaccgtgctgcccgcggtacgtcccggtgcagctgcagcacccaccggagcgtcgccgccgccattccccaccacctccctccccagtggcggagcacgacctaaaaataaggtatggcaatgacaaaaatatatcttgcagtaaaacaaaatttagtataaaaacattattaagaagtaccttagatgaagaattccttgtagattatatgtcaaatcagtaactctttctagagcctttctttttgccgaccttgctgagcttgaatctattgcaatttgcaactgcagggcagctaaatttgcaaatagcaagcaacaaagcaagcagaaactgcaagcagcaacgcggccaacgcaactacgcgagcactaagccaactagccaaagccaagcaaccaggcaagcagccggagcactgtagaaggctagcaagcagcaaattgagcaaagcaacttagcaagcagtctgcactataaactacactagccttgcagaactcagagggaacgaatagagtagtgctgggagtttagtgggtcgaggtagctgaagagcaaacaaacacgctgttcggtgttcgccgctctcccatttcaccgagaaagaagggactaatgagaagagagagcatggaggcaggggcagggaggagagggatcccctcgctgctgaaatcgccggcggcgcgggctgatgaatccggaggagccacttcgccgcagcaggagcacatcgcctccgatattacccaggtgaggcactgaggcccaatcttatctagctagtctctccgtcctgggctcctcacatcgctttctgacttttttttttgtccagtttattttcttgctagcttgcttgcatttcctttgtgcgtgtgtggaagatttgtttccatgtattttcagtgctagtttgagctgccatgatacatgtaaagtttgagttgccatgatacatgtagatcaatcccagttcccctgctgcagcttgtaggatggacgccactggtagagctgaagagaatagcccagaaggacaacgtcgacgcccgagtcgtcggcaagctggagtgctaccagcccctctgctccgtcaaggaccgcagcgctctgaggtattacctactatctatggttcgagctcctacgacgctggtcatttttttttctaccaatgtccagtcgtgtggctgtcatgttcttcacagaatgatcgaggacgcagaggagagagggctgatctcgcctggcgccacgacgctggtcgagccgacgagcggcaacatgggcatagccctggcgtacatcgatctggcccgaggctacaggttcgtcgcggtcatgcccgccgagtactcgctcgacaagcagatcctgctgcggtacctgggggccgatttggtgttaaccgatcctgcgcttggcttccagggacagctcgacaagctggaacagctcaggaaagaaatacccaacgcgcacgttcttgaccagttcgcaaacgcggcgaaccctgaagcgcactttagatggactgggcctgagatctggaaggatacggcaggcaaagtcgacatcttcgtggccggctccggcacgggaggcacggtctctggcgtcggcaggctcacgggctcacggtcaccgcgtggtcggcggctggacaacgaccagtcggcggctggacaacaacgagtcgacggtcggcggctggacaacgacgagtcggcggccggcggctggacaacctgcgagtcggcgagtcggcggctggacttcgggcgccggtggggcgaggggcctgcgacctacggcagtgctccggccgtccggcggtccggcctccgtgctccgggcgagcggcgctgcgagctccagcggtgctccggggtctgggcgtgggcggctccacctccacggctggcggcggctggagctggagggtataggatagaggaaggatgttcacggggctgggcgcggctggagtgggctgtcgcgcggcgatggacctattcgttttagtgggccgcgaccgggctgcagcccaggcagccccggtcggagatccgccactgtacttgaagacgaagaacccggcggtgaaggtcgtctgcgttgagcctgctgagagcccagtcatttcaggcggcaagccttctcggcacaagatccagggcgtcgggccgggattcgtgcccaagaacctggacacctctgtcaccgacgagatcgttacggtgaccgcagaagatgcgatggcgaacgccaggaggttggccagggaagagggtctgctagtgggcatatcgtctggggcgaatctggcagcttgcctcaaggtggcgtcgagacaggagaaccgagggaagatgatcgtcaccgtgtttcctagcggtggcgagaggtacatgagctccgatctcttcgcggatgcaagggaggagtgcgtcgccatgaccttctgatcttctggacgctctgtgcggatctgcagcggcaaactgctatttctcagcgtggaatggatttttagtatcgtcgatccaatccagcagcttgcggaggcagaagatttggaatccttctggcagaaaatttactgcgcatttgcgttccattggcaggaaagactctgtacatgctcttgggctcttggctaaggacctttacagctttccttatttcttcttggcacagaaatttcagcagagaattgtaccacgagctataaactgagagatgccaatcagtatctcgttgagaaataaccacctggcctctgaataaacaaccatttcatttcttcttcttcttctagtgctgcgagacacactgtcgacgagcaacggaagcctacttccgagttccgagcaactattctatgacgatccgtctagcgtttctttagtttcttaaccacacttgttcagttagcaaagtagctctttgacgtgaacactagtgaagcat

SEQ ID NO: 82483 - DNA, 1193 bp, Zea Mays
gcgtgtgtggaagatctgtttccatcttgtaggatggacgccactggtagagctgaagagaatagcccagaaggacaacgtcgacgcccgagtcgtcggcaagctggagtgctaccagcccctctgctccgtcaaggaccgcagcgctctgaggtattacctactatctatggttcgagctcctacgacgctggtcattttttttttctaccaatgtccagtcgtgtggctgtcatgttcttcacagaatgatcgaggacgcagaggagagagggctgatctcgcctggcgccacgacgctggtcgagccgacgagcggcaacatgggcatagccctggcgtacatcgctctggcccgaggctacaggttcgtcgcggtcatgcccgccgagtactcgctcgacaagcagatcctgctgcggtacctgggggcagatttggtgttaaccggtaaggaagtgaaggttgcagctcatcgtcatcgatgtccgttggtttcgcgtttgcaggactggccggctcggctttttaccatgttctgaaatctaacatcaaatgccatgctgtttttttttttccagatcctgcgcttggcttccagggacagctcgacaagctggagcagctcaggaaagaaatacccaacgcgcatgttcttgaccagttcgcaaacgcggcgaaccctgaagcgcactttagatggactggtagtaccgatctttgcacaggagcatctgatctcataagagagtgataaatgaacttgcctgtgatagaacggctccctgaggccacaattggtggagcaccaagaatctgatcggtgcagacatgagatgttctgggatgcaatactgtggcggtacttgtccatctgaccaagtcactgtttcatgtttgaagccacggcaaggactaggataagaatgctgctttgtaggttgagcttactgtaactactaagaaatttttattatgtaccaaccttatcatttctacaatgttgcgggatgtctgaagtaattctttgttaaaagatcgggtatcctgctcccttttgcttctcaatcttgtgcgctacaagccataatcccaaatcccaatagagtggctcttcctgaatctcttatagagaatgaacaaaagagtccctcataatgtggaacggaggtgacaacaatctgcgacagtcg

SEQ ID NO: 82484 - DNA, 2146 bp, Zea Mays
ctgtgatcatgtttctataactctttttccctcttcaatgaaggcatagctcctaccatttgctttcaaaaaaaatatccgcaggagaagttccagggcaaggtatctcgagccaaagttgacacgactgtcatatgaaaactgacttgattcttcactaatctcgcagcccatcacccaagttttcagaacttaaataaaaccaagtgctgcacacacacatttcatcgaacacatgaacctcacacaaatccgaatccgcatccatctgaaggccgaagttatacgaagaggataataatacgaggagagcgcggtataaacaaacagcagtagccgcacctgtagttggtgtgcatgagtgcgagcttgagcggccccgactgcagctcggcccagcggagcgtgcagacatttacactgaagtcgagaccctccgagtagaaccgtgctgcccgcggtacgtcccggtgcagctgcagcacccaccggagcgtcgccgccgccattccccaccacctccctccccagtggcggagcacgacctaaaaataaggtatggcaatgacaaaaatatatcttgcagtaaaacaaaatttagtataaaaacattattaagaagtaccttagatgaagaattccttgtagattatatgtcaaatcagtaactctttctagagcctttctttttgccgatctttgctgagcttgaatctattgcaatttgcaactgcagggcagctaaatttgcaaatagcaagcaacaaagcaagcagaaactgcaagcagcaacgcggccaacgcaactacgcgagcaactaagccaactagccaaagccaagcaaccaggcaagcagccggagcactgtagaaggctagcaagcagcaaattgagcaaagcaacttagcaagcagtctgcactataaactacactagccttgcagaactcagagggaacgaatagagtagtgctgggagtttagtgggtcgaggtagctgaagagcaaacaaacacgctgttcggtgttcgccgctctcccatttcaccgagaaagaagggactaatgagaagagagagcatggaggcaggggcagggaggagagggatcccctcgctgctgaaatcgccggcggcgcgggctgatgaatccggaggagccacttcgccgcagcaggagcacatcgcctccgatattacccagcttgtaggatggacgccactggtagagctgaagagaatagcccagaaggacaacgtcgacgcccgagtcgtcggcaagctggagtgctaccagcccctctgctccgtcaaggaccgcagcgctctgagaatgatcgaggacgcagaggagagagggctgatctcgcctggcgccacgacgctggtcgagccgacgagcggcaacatgggcatagccctggcgtacatcgctctggcccgaggctacaggttcgtcgcggtcatgcccgccgagtactcgctcgacaagcagatcctgctgcggtacctgggggcagatttggtgttaaccgatcctgcgcttggcttccagggacagctcgacaagctggagcagctcaggaaagaaatacccaacgcgcatgttcttgaccagttcgcaaacgcggcgaaccctgaagcgcactttagatggactggtagtaccgatctttgcacaggagcatctgatctcataagagagtgataaatgaacttgcctgtgatagaacggctccctgaggccacaattggtggagcaccaagaatctgatcggtgcagacatgagatgttctgggatgcaatactgtggcggtacttgtccatctgaccaagtcactgtttcatgtttgaagccacggcaaggactaggataagaatgctgctttgtaggttgagcttactgtaactactaagaaatttttattatgtaccaaccttatcatttctacaatgttgcgggatgtctgaagtaattctttgttaaaagatcgggtatcctgctcccttttgcttctcaatcttgtgcgctacaagccataatcccaaatcccaatagagtggctcttcctgaatctcttatagagaatgaacaaaagagtccctcataatgtggaacggaggtgacaacaatctgcgacagtcg

SEQ ID NO: 82485 - DNA, 1604 bp, Zea Mays
cacgagtgagactagggttttagtggcctcatctctctcttcctcttctcccgccgcccagcttctctcttctctcggcggcgccaccacggcgatcaagcgcgatacgggcgtaaccgaagaatcgacaatgggcggcgagaaggaaacctttgatacgtccgacctcaacgcctccctccccgcggccgctgcagccctcagcgccgaggaccgcgccggcctcgtcaatgcccttaaggataagctgcagagcctggcgggccagcacgccgatgtgttagagacgctgtcgcccaatgttaggaagcgggttgagtttttgagagagatccagagtcaacacgatgaaattgaggccaagttttttgaagaacgagctgcccttgaggcaaagtaccagaagctttatgaacctttatacacaaagaggtatggaattgtaaatggagaagtggaggtagatggtgtttgtgatgaaccggccagtgagaatactgttgagggaaaagaaccagacgctaaaggagttccagacttttggcttactgccatgaaaacaaacgaggttttgtctgaggagatacaagagcgcgatgaagccgctttgaaatatctaaaagatatcaagtggtctagaatcgaggatcctaagggtttcaagctggattttttctttgatacaaacccattcttcaagaattctgtcctgacaaaaacgtaccacatggttgatgaagatgacccaattttggagaaagctattggaactgaaatcgagtggtatcctgggaaaaacctaacacagaagattctaaaaaagaaacctaaaaaaggttcaaagaatacgaagcctatcactaaaaccgaggactgtgagagtttcttcaactttttcaatcccccgcaggtccctgaagatgatgatgacatcgatgaagacactgctgatgagctgcagagtcaaatggagcatgattatgacattgggaccaccataagggataagattatccctcacgcagtttcctggtttactggtgaggctgtgcaaggtgaggattttggtgagttgggcgatgatgatgaagatgatgatgatgaagacgatgacgaagatgatgaggatgaagaagaggatgatgatgaggaagaggatgatgaggaagaaagcaagccagcaaggaaggatctggtcgcagacataaggcgccacagaaggtgtcgcagggaaatgcggaacaaccagcggagtgcaagcagcagtagaatggcctgttgatgttggttgatgcagtattttccattgagctgcctagaggttatgtgtgcgcaggccagatgttggtgttgatatctcaagtgtggtttttattagtaggcggtgagggtgttgtctggagcactttggtgctgcgttggtggatggatattggtttgcaacttgtctgctagtgtcttggggattcagctacgtgcaatcggatgatattatatggttgtaattatctttgcactcggcctataacggctctttatttgcactgtgtctatgttggctatcttgaattgatttgtagttgcttaggctgttccattgctat

SEQ ID NO: 82486 - DNA, 1596 bp, Zea Mays
cacgagtgagactagggttttagtggcctcatctctctcttcctcttctcccgccgcccagcttctctcttctctcggcggcgccaccacggcgatcaagcgcgatacgggcgtaaccgaagaatcgacaatgggcggcgagaaggaaacctttgatacgtccgacctcaacgcctccctccccgcggccgctgcagccctcagcgccgaggaccgcgccggcctcgtcaatgcccttaaggataagctgcagagcctggcgggccagcacgccgatgtgttagagacgctgtcgcccaatgttaggaagcgggttgagtttttgagagagatccagagtcaacacgatgaaattgaggccaagttttttgaagaacgagctgcccttgaggcaaagtaccagaagctttatgaacctttatacacaaagaggtatggaattgtaaatggagaagtggaggtagatggtgtttgtgatgaaccggccagtgagaatactgttgagggaaaagaaccagacgctaaaggagttccagacttttggcttactgccatgaaaacaaacgaggttttgtctgaggagatacaagagcgcgatgaagccgctttgaaatatctaaaagatatcaagtggtctagaatcgaggatcctaagggtttcaagctggattttttctttgatacaaacccattcttcaagaattctgtcctgacaaaaacgtaccacatggttgatgaagatgacccaattttggagaaagctattggaactgaaatcgagtggtatcctgggaaaaacctaacacagaagattctaaaaaagaaacctaaaaaaggttcaaagaatacgaagcctatcactaaaaccgaggactgtgagagtttcttcaactttttcaatcccccgcaggtccctgaagatgatgatgacatcgatgaagacactgctgatgagctgcagagtcaaatggagcatgattatgacattgggaccaccataagggataagattatccctcacgcagtttcctggtttactggtgaggctgtgcaaggtgaggattttggtgagttgggcgatgatgatgaagatgatgatgatgaagacgatgacgaagatgatgaggatgaagaagaggatgatgatgaggaagaggatgatgaggaagaaagcaagccagcaaggaagtcaggatctggtcgcagacataaggtgtcgcagggaaatgcggaacaaccagcggagtgcaagcagcagtagaatggcctgttgatgttggttgatgcagtattttccattgagctgcctagaggttatgtgtgcgcaggccagatgttggtgttgatatctcaagtgtggtttttattagtaggcggtgagggtgttgtctggagcactttggtgctgcgttggtggatggatattggtttgcaacttgtctgctagtgtcttggggattcagctacgtgcaatcggatgatattatatggttgtaattatctttgcactcggcctataacggctctttatttgcactgtgtctatgttggctatcttgaattgatttgtagttgcttaggctgttccattgctat

SEQ ID NO: 82487 - DNA, 1602 bp, Zea Mays
cacgagtgagactagggttttagtggcctcatctctctcttcctcttctcccgccgcccagcttctctcttctctcggcggcgccaccacggcgatcaagcgcgatacgggcgtaaccgaagaatcgacaatgggcggcgagaaggaaacctttgatacgtccgacctcaacgcctccctccccgcggccgctgcagccctcagcgccgaggaccgcgccggcctcgtcaatgcccttaaggataagctgcagagcctggcgggccagcacgccgatgtgttagagacgctgtcgcccaatgttaggaagcgggttgagtttttgagagagatccagagtcaacacgatgaaattgaggccaagttttttgaagaacgagctgcccttgaggcaaagtaccagaagctttatgaacctttatacacaaagaggtatggaattgtaaatggagaagtggaggtagatggtgtttgtgatgaaccggccagtgagaatactgttgagggaaaagaaccagacggagttccagacttttggcttactgccatgaaaacaaacgaggttttgtctgaggagatacaagagcgcgatgaagccgctttgaaatatctaaaagatatcaagtggtctagaatcgaggatcctaagggtttcaagctggattttttctttgatacaaacccattcttcaagaattctgtcctgacaaaaacgtaccacatggttgatgaagatgacccaattttggagaaagctattggaactgaaatcgagtggtatcctgggaaaaacctaacacagaagattctaaaaaagaaacctaaaaaaggttcaaagaatacgaagcctatcactaaaaccgaggactgtgagagtttcttcaactttttcaatcccccgcaggtccctgaagatgatgatgacatcgatgaagacactgctgatgagctgcagagtcaaatggagcatgattatgacattgggaccaccataagggataagattatccctcacgcagtttcctggtttactggtgaggctgtgcaaggtgaggattttggtgagttgggcgatgatgatgaagatgatgatgatgaagacgatgacgaagatgatgaggatgaagaagaggatgatgatgaggaagaggatgatgaggaagaaagcaagccagcaaggaagtcaggatctggtcgcagacataaggcgccacagaaggtgtcgcagggaaatgcggaacaaccagcggagtgcaagcagcagtagaatggcctgttgatgttggttgatgcagtattttccattgagctgcctagaggttatgtgtgcgcaggccagatgttggtgttgatatctcaagtgtggtttttattagtaggcggtgagggtgttgtctggagcactttggtgctgcgttggtggatggatattggtttgcaacttgtctgctagtgtcttggggattcagctacgtgcaatcggatgatattatatggttgtaattatctttgcactcggcctataacggctctttatttgcactgtgtctatgttggctatcttgaattgatttgtagttgcttaggctgttccattgctat

SEQ ID NO: 82488 - DNA, 668 bp, Zea Mays
tgcctgaactgcaaggggagccagagtacatatccaaagagaaagcacgaatcgctgcatcttaggtgaatgggcctgtactggtggaggacacctgcctatgttttaatgcgctcaaaggcctaccaggaatgaacagaaagtggtttcttgagaagattgggcatgaaggtttaaataatctgttaaaagcttatgaagataaatcagcgttcgctatgtgcatcttctctcttgctcttggacctggagaggaaccaatcacatttgttggcaaaactgcgggaaagatcgtgtctgctagaggccctaacgattttgggtgggatcctgtgttccagccagatggttttgaacaaacatatgctgagatgcccaagtcagtgaagaacgaaatatctcatagagggaaagctcttgctctggtggtgactcgttccctggcctgcctcatcgtccttccaagagatgatctgcgcaagaacgggtgcccatgcttctcactgccagaagcactctctggatcgatcttgcagctgccaattgcgagctggacgtcctctatctcgaacaagtcctccgtgcggctgctcaactcgggtgttctcatggacttcctgcagaggaaggccaatgatcttagcaaaactcaaccgtcaaaactttag

SEQ ID NO: 82489 - DNA, 2095 bp, Zea Mays
aaagactgcaccagttggcaatggcctcatcgagtaaacagtggtaaaagtgctgcaaagtgagtggtggatgtagcaaaagtaagagaaaaatcaacatgtaataagcaaacatgcttgactgagcgagacctggaatcaacagtgaaaatacactcatttaatttgtataggatctatggaaggtttctcaactccatgtgttgagataaaacagtggatacattatttcattaaatactttttacaaaaatataactatccgagatagcatgtgatttatgggtacaactactgtagtttagaacatatcagtatatttcacaaaacagacacctcggatcatactctggcctcaataagcattatatcggtttcctaaagcagaatagttacacaatgacatgcaacagtttacagatgtttctgctgacttaccttaagaaatttctccgcagattccgtacattaaagcctactccaacatctccactaacaagccgtgggttccacatgacaagaggtcttatcttcattaaaaggtagacactacttgaggatagcattaaatgaaatatatatacaaatacaaagatggttgctggtcaaattcaatgttaaattattgtagatatggatggttagttttaggcatgaagattcacatgagttctttcatgaaatggttatacatgtaggtggaatagactaatctgctggagcagacttttagatccttcataagcacatgcatgctttgcctggttcatttcaaaaaaataagcacatgcatgcagggacagatctaggaattcagctggaccagggctaggccaacgaatattgatctaggatgaatctacttgggtggatatggaacttagttagccaatttgcacaatatacaacatggaaatatatggttgatttatggcctggaactggatttaccacactgcacatatgccctttatcctaatactcttgttcatgtaaactttattctacaaaatctgcttggaacattaatgaaatttctttttttccatatattttttacacaggatctgcagaaatttgcaatctgatcaggcataagttccatacaggatcatcagagagttgagatgtgatgcgttcaacagcttccagcatctgatgatcagggataatcataactgcgacctcatcttcaggaccaactggcttccggtcacctaaactacaagtcaggtcaaaaacagattgaagattcgaagtaacaacctgaatactattcaatgtcataatctggaagcatccataaagtttcttcttcaagaatacaaagagtcagaattctgccttgtcatgtccagtataatatggcatttgcaactaggactaaaggtgaactggccaattcttggtagctagaaaattaactgttcctggtctcaaaagaaaatcaattgtgatttccaattgacgtcggtagcatgccgctcgtagtcagaaaatcatgagatgcaacaagttacatcaacttggtatgaaaccatcacttctcagtggatagtacattagtacctggcacacttgaattgtgcatctttccattgatgcttgagaagggcagctgctccagcgtcagggaaaatggcagtaactttctgcagaacaccaagtggtatcagaaacagacaaatacataaatcacaagaggtcgagagcaacaaatttgcaaagtgataattggtagactcaaacatcaattagagtgagagtgaggcaattataagttggagaaagtaaaagccatgtctaatgctgaaagcctgaaacgaccttgtatccaaacctgtcctgtctcttgtacaagtgtgtccaggaaaatctttgacaacgcccagagttcagcctgtgctccttcctcgttgaggaattccaactgagggatcagcagttctgcctgcaatattgacaccactaatcgtaaatcgtcaataatcgtatggtaaagatgcctaatcagaagctcagcaaaaagagagtacttctataattatgtcatcatttatacattattacagcatatacgattgagccgaattac

SEQ ID NO: 82490 - DNA, 1330 bp, Zea Mays
gttaaataaagagtaaaaaataaaaagtatggtctgagcatgacacgccgtgtgcccgtgtgtaacatttgcaggtgcagaggtgcgcggacgacacgtcgatcctgatcaccacgtacgagggcacgcacaaccacctgctgtccgcctccgccaccgcgatggcctccaccacctccgccgcagcgtccatgctcacctcgggctcctcctccacctccctcggcttcttccccgccgcctcgccggcggcggcgcacgacgcctccagacacttcttcctcccgaccggcggcgccgcgtccgtcacctccacgccgtcctacccgaccatcacgctcgacctcacctcgccggcggcggccacctcgcaggcgttctctctgagcaacagcaggttctcgtcgggcttcggtggtcccggcggcgctaggtaccatcatcgtcccacgagcttctccttctccaactccgggcccagcgcgctgtccgccgctgcatggccggcggcgaccggtggtgctgggtacctgagctacgggtcaccagctgctgcgtccttgttcaacggtggcggtggcgctgcactgatgagcagcaccaacgggaggcaagggcgacaaggcggggaagtccccgcgctctaccagccgcagcagaaggcggcagcggcgagcgagagcgcaccggcgggcgtactcaccgacacgatagccaaggtgatcacgtcggacccgggcttccagacggtgctggcggccgccatcacgtcgtacgtcggcacgcagggcggtaacaaatcgtcgccgtcggcgggaggagaagagggcgggagccagctgcagctggggctcaagtgggggcagcacctcggcctgggcccgtcgccgtcgagcgccggcgcggcgtgctcctcatcggcgctgctggcacggtcatcgtcgacgaccgcagcagcggagcagggttccagtgggcatcggtcgtcgttcctgcagccgtcgctgggcttggcaggctctcacagcgcctccgcctctcctgtggaaaaccgggagcactgatcgcatcggcccaagattctgaatgtactgtatttaggtcacttcattcaaatgtttctcttccttaaaaaaatggttatttcagcagtattcggtgtatataactatatatactgaggataagtgtgtcactttagaggatagatattctgactcactgtagagtagaaaaatgttctgattgactgacacaacacacatgtaaaacaaaggattgaatttatattcgtccagtattgaattacaaaatgcgagctgattgtgat

SEQ ID NO: 82491 - DNA, 1262 bp, Zea Mays
cacagcaaacgtcaggcaccatagcgttcggccaggttcattcccctcctctgcgatctcctctgatcggatttccctctcccatggcggctgctcgttcttcctctgctcggcctctgtagctcgccgggatgctccacgctcgctctccctgctgcagcgcctgaacgccctgccctttgctctagctcgccgcgcgccctggtcgtctcccagcccgcccaggcatcgggcgcaatcgcccctggcagccgtgcctgctcccatggccggcgcttggccttctgctcgccgcggatgcgcgctggctgccaagtcttctccctgctcggtcccttccccagcgcctgctccagttcgtcggccgaccatcgctgttcctctggcgccgcgactctctgctcgcgtcgcgcccagtcttcagctcgcggagctctctctctcccgtggatgccgtggagtttccccgccgcgtccatggtcctgttaggagttcgcctaggcccgcgcttcctgcatcgcgcccagccgcgttcttcacagccggctgctgctccctggcgcagctcgttcagtccagccgcgcctgctttcccatggccgcgcgcgaagttttcggctcgccgcgccctggattccctggccttcgcgccctggccctctgcccggagctccctgttccgctcggcgctctccctgctcgctctggacgcgcagctcccttcgtcgcgcccaggccgtatcccgctccagctcgccgaagtccctcccacggctgtctccctcaagccgccgtgagctccatgctctgaaattcgtgcgtcgcctccttcccatttgtcgtgccttgcgacgctcgtcatggacctcgtcgtcgacccacgttgtgcccacgacgtgctcatcgactctgatgatttgatttccaatttcgtgcggcttatgtcaaccctcagaattccttgtcgtgctcgaccctgcaagtctccgacttgtcgacatcccttgcgtcgtcgaacgatcccgagaatttggataaagcaataaatcccgtgtggccgggtgctcggaaaaaggtctgcgcaagaatcgttgctgtctgcgcgaagttatggtcaatatggtacgttgattaaccacaagatgcggagaacttgagtcaagtcgaccccaagcatggactactccgcatggtgaagctgatggaccaacctgaagatggttaaatcaagcgaatgttcggtcgagggatactcgtcaag

SEQ ID NO: 82492 - DNA, 1062 bp, Zea Mays
aaatagcatacatgctacggtatacccacccttcatagagaaattcaggccactcataaaagaaggcagcgtgtacaacatgacatactttcgagttcgagcatcgaacaacttgtacaagccagttccaaatgatatcatgattaccttcacgaattggacaaagttagagcaggttattgagattcctcctgcatttcctacacttacctactccctcactcacatagagcagatccattcgcgcatcgaccataaagactactatacagttacttcagtctcgaatgtttcgccacatcgctccaaaggacaacaagcttccaacttgaagaggaacatttccatatgcagtgcaagaggtgcttcggtcaatgtcgtgttgtggggtgcccaagccaccctattcccaggagagcgcatatatgaagatgggcagaattccccacaaattgtgctatttgttggcacactcgtcaaaaaatatgcagatgggctttgtctgactggaggctcaccatgtaagtggtacatcaatccatccattcctaaggcagaaccccttatgtccagcgcacgaggtgatcataaaccagtgaagtggaatgcaactgttacttcgagccagcttatatctcctgttgctgaggagcaaaaggtgtcgtacatcaagtatctccatccctttgaaaacaagggaaaggaattcttggttacagtcactataaggaaaattgatagcaagtggtggtataactcgtgcagaaaatgcgcctgcacagctgtcactcacagagactcttacaaatgcataaaccgtgattgtgctaacattgctatgcccatccaaaggtataaaatacttgtcactgcaagagacgagacaactgatacagacttcattctctttgggcgcatggctcaaagaattgtcaaaaggtcttgtgatatgctcatagcgaacactccatcaggcttcattccagatgcaatcacaaagctgcttgaaaggacgttcatttggaacgttagcttctctgggcacacaattaactctggaaa

SEQ ID NO: 82493 - DNA, 1689 bp, Zea Mays
cgccatgttcatcagcccgatcgccatcatctccttgttcccgtccacctggtagttgttgatggacgcaaaggatgcctgtcatgatcccggttttgatcgtcagcgccacgtaggagccgctgaagctgagcatgttcgccgaaggagggttcactcccctggggaggatgccgatctgtgtttacaaaaaagtttttttttacagagatgaactgacgaataatgattggtgaggtctcaatggaactgaagatgcttacaacactgatgctgggggatttccagatgaaggagaggatggtggagatgatcaccgacgccaggggagcacctgctgatacccagaaaagctttggattcctggcgctctgaaaacaacaacaacaacaacaaaaaatgattcataagtttgtctgtcattcattggtttgtctgtcactaattcattgcttttataatcacaacagggcaaaatagttggctttgcgtactgtcaaactagagatcccggaatttctttgcagaagaatcgtgtaaaaaacaaaggagatgtagattttggcgctcctgatctctgaagatttctccggcgtggccccggccaggcccaggccccagcagagtggaatctctcagactgacgcttttaaccatatcataccaagtgagcaggagcggcgtcgttctcaagcgatttttatctgccgctagctaaagagcgatgaagctatagccacttgtcagaacagattctaaagccacgaacacatcgtcttactccatctgatctgacccatgtcgttcagtcatgtgaatgctctctaacattctacctacacatgcagttgctacttgccaagctcacacaagacgactacaactgctcaaacagagcgttgccttgtctcaaaatatatgtgtgcttcagcaatatatgcttggttcttagttcttactactcacttgaagaagacagttggaggattaaagcaaaagggaaactaatggtgcttttaaaccgctcccagtttttataaacaacaaaaccttaaagagggaccactttctgttctgccgccatgtgtttcagtccattgatagctactagctttggaagaagattaggcacctgctgttgggcgaggacagctttcctgggcacaccaactgtttagtcgattcaagtagctctgaaccaaagccacgcttttttgtttttggttatagaaaacatttctttttactaggtcccaagaagcaggagctggctcttaagtcttaaccacccccatgaattgttaggcgtttcttaaacacccccccatgaagctgtggagtcaaaaattcctcgttagtggcaggcacactttggggccctccatgatgaacacgccccagggtttgaatcgccatctccttctactttttttttttgttttgcagccccatctttctttcctagaagctaagctagccaaccaaccgtggtcagagaagtcgtaaagaattttgccgactggtgagtgagtgagtaaccgggtctgtcaagctgcatctgcgctttggcaattcttttctgatgggagaacgagaaaaagtgacagagatggaaatggaatccggtgcatggtgaagaggttgagcttacgatttggcgcgtgaggaggaggatggcgaggaaggcgg

SEQ ID NO: 82494 - DNA, 1498 bp, Zea Mays
ccgatcgccatcatctccttgttcccgtccacctggtagttgttgatggacgcaaagctgcatgcagggtactcaaaaccaaatcttttcatttctcttactgttaaggacaggatgcctgtcatgatcccggttttgatcgtcagcgccacgtaggagccgctgaagctgagcatgttcgccgaaggagggttcactcccctggggaggatgccgatctgtgtttacaaaaaagtttttttttacagagatgaactgacgaataatgattggtgaggtctcaatggaactgaagatgcttacaacactgatgctgggggatttccagatgaaggagaggatggtggagatgatcaccgacgccaggggagcacctgctgatacccagaaaagctttggattcctggcgctctgaaaacaacaacaacaacaacaaaaaatgattcataagtttgtctgtcattcattggtttgtctgtcactaattcattgcttttataatcacaacagggcaaaatagttggctttgcgtactgtcaaactagagatcccggaatttctttgcagaagaatcgtgtaaaaaacaaaggagatgtagattttggcgctcctgatctctgaagatttctccggcgtggccccggccaggcccaggccccagcagagtggaatctctcagactgacgcttttaaccatatcataccaagtgagcaggagcggcgtcgttctcaagcgatttttatctgccgctagctaaagagcgatgaagctatagccacttgtcagaacagattctaaagccacgaacacatcgtcttactccatctgatctgacccatgtcgttcagtcatgtgaatgctctctaacattctacctacacatgcagttgctacttgccaagctcacacaagacgactacaactgctcaaacagagcgttgccttgtctcaaaatatatgtgtgcttcagcaatatatgcttggttcttagttcttactactcacttgaagaagacagttggaggattaaagcaaaagggaaactaatggtgcttttaaaccgctcccagtttttataaacaacaaaaccttaaagagggaccactttctgttctgccgccatgtgtttcagtccattgatagctactagctttggaagaagattaggcacctgctgttgggcgaggacagctttcctgggcacaccaactgtttagtcgattcaagtagctctgaaccaaagccacgcttttttgtttttggttatagaaaacatttctttttactaggtcccaagaagcaggagctggctcttaagtcttaaccacccccatgaattgttaggcgtttcttaaacacccccccatgaagctgtggagtcaaaaattcctcgttagtggcaggcacactttggggccctccatgatgaacacgccccagggtttgaatcgccatctccttctactttttttttttgttttgcagccccatctttct

SEQ ID NO: 82495 - DNA, 3449 bp, Zea Mays
cttttcagttttctccgtgcctcttgctccctcctggctccgcgcctgggccaccgagcccgcgatcggattcgctccctcttcgccgcgccccaccacccatcgccgctggggatccctagggtttagtgcagtcgctcggctccgcgccgtcctcgccgctgctgccaccatgccgctcaggttggagatcaagcggaagttcgctcaacggtcggagagagtcaagtccgtggacttgcaccccacggagccatggatcctgtcgagcctgtactcggggagtgtctgcatctgggattatcaggcacaggcaatggtgaaatcatttgaagtttcagaactgccagtgaggtcggcaaagtttatttcaaggaaacaatgggttgtagctggtgcagacgacatgttcattcgtgtctacaactacaataccatggacaaagttaaagtttttgaggctcatactgattacatcagatgtgttgcggtccatccaactctaccatatgtgctgtcatcatctgatgacatgctaataaaactgtgggactgggataaagggtgggtgtgcactcaaatatttgagggacattcacactatgtgatgcaggttactttcaatccaaaggatattaacacctttgcaagtgcatcccttgaccgcactacaaagatatggagtttgggttctccagatccaaacttcacacttgatgggcatcaaaagggtgtcaactgtgttgactacttcactggtggtgacaggccctatttgattactggttctgatgactccaccgcaaaggtctgggattaccagacgaagagctgtgttcagacacttgaagggcatacacataatatttctgctgtttgtttccatcctgagctccctataatcattactggatctgaagatggtacagttcgtatatggcattcgacaacttacagacttgagaacacactaaactatggccttgagagagtctgggctgttggatacatgaaggggtctagaaggatggtgattggttatgatgaggggaccattatgataaaaatgggccgtgaagtacccatagcaagtatggataccggtgggaaaatcatttgggcgaaacataatgaaatacaaactgtaaatatcaagacagtcggtgcaggttttgaagccacagatggagaaagattacccttggctgtaaaagagttaggaagctgtgatttgtacccacagatggcgagtacataatttatactgccctggcctggaggaatagatcatttgggtctgcactggaatttgtttggtcatcagaaggagaatatgcaattagggaaagtacatcaagaataaagattttcaataaatcgtttcaggagaagaaaactatccgcccttcattttcagcagagcgtatttatggtggggtattgttggcaatgtgttctagtgacttcatctgcttttatgactgggctgattgtagactaatacgccgaatcgatgtgaatgttaagaatgtttactgggctgatagtggtgacctagttgcaatagcaagtgatacatcattctacatcctcaagtacaatagagatattgttgcttcttatctagaaggtggaaagcctgtggacgaagaaggcgttgaagatgcttttgagctgcttcatgagatcaatgagcgagtgagaactggaatttgggttggagactgctttatctataacaactcatcgtggcgcctaaattattgtgttggtggtgaggtcactacaatgtatcatttggatcgccctatgtacttgttgggatatattgcgaaccaaagtcgagtttatcttattgacaaggagttgaatgtcattgggtacacattacttctgagtttgattgagtacaagacccttgtgatgcgtggggatttggatcatgcaaacaaaattttatcatccatacctaaggcgcaatataatagtgttgctcattttttggaatcgagaggtatgttggaagaggctcttgagatagccactgatgctgactacaagtttgacctagctgtgcagcttggaaaattagaagtcgcgaaggctatcgccatagaagcacaaagtgaatctaaatggaagcagttgggcgaacttgccatgtccacaggcaagctagagatggcagaggaatgccttcttcaagcaaaggacttaagtggcttgttgctactgtactcatctcttggagatgctgaaggaattgaaaagcttgcttctttggcaaaagaacacggaaaaaacaatgttgctttcctctgcctttttatgcttggtaaagttgaagattgcatacagttgcttgtagacagtaaccgtatacctgaagctgcattactggcgcgttcatatcttcctagcaaagtaccagagatagtggcaatttggagagacgacctgagtaaaattaatccaaaagctgcagagtctctagcagatccttctgaatatccaaatctatttgaagactggcaggttgctctaactgtagaaaaaagtgttgcgtctcagaggggcaattatcttcctgctgaccagtacttgaatcatgctgagaagtcagacatgactattgtggaagctttcaaaaggatgcaggttgttcagcatgaggaacctgaagatgtggctgaggaaaatggagaacttgatcaacaggcatttgaagagactgaaatgcagaatacagatgatgatgctgatgaacctgaagagacagttttagtaaatgggaacaagggtgaggaacatcagggtacggacaatgaaggagctttatctgcctagaattcttggcaaatatgggaaccccaagttttgcctacgtgctaactcaacatgaataggggctgaaagaagcacagctcattggctgcaaatttttttttctgagggtaacaaatgtgggccccctgttttactctgaagcaccggaactggtgatgctggaccgcctgatgcttgtcatatagaaggtcgctatactttttggtgtcaatctgcccatccagtcatgcttctttttgtaaacaacgtaggcaattctttcttcttggaacgtttgcagacccaatttccatgccgtgaaatcaatggatcgggtgtggggccagctgcaatgaatagtgtttgaataattggtatagaggtatgtagtaaaaatatgccagattaccataggagatgacagcttttgttacccattcattgtaatgaccttattcgataaggttacgtgtagtctacgattgcagttgcgggccgggagttttttcccatgttatgtagcatcattctatcggatctgaggcttggcttgagaatctgtttcgcttgtttgcgcggatgcctatcaaatgctggtgactgcgagaattcaaagctgctat

SEQ ID NO: 82496 - DNA, 3408 bp, Zea Mays
agacccttttcagttttctccgtgcctcttgctccctcctggctccgcgcctgggccaccgagcccgcgatcggattcgctccctcttcgccgcgccccaccacccatcgccgctggggatccctagggtttagtgcagtcgctcggctccgcgccgtcctcgccgctgctgccaccatgccgctcaggttggagatcaagcggaagttcgctcaacggtcggagagagtcaagtccgtggacttgcaccccacggagccatggatcctgtcgagcctgtactcggggagtgtctgcatctgggattatcaggcacaggcaatggtgaaatcatttgaagtttcagaactgccagtgaggtcggcaaagtttatttcaaggaaacaatgggttgtagctggtgcagacgacatgttcattcgtgtctacaactacaataccatggacaaagttaaagtttttgaggctcatactgattacatcagatgtgttgcggtccatccaactctaccatatgtgctgtcatcatctgatgacatgctaataaaactgtgggactgggataaagggtgggtgtgcactcaaatatttgagggacattcacactatgtgatgcaggttactttcaatccaaaggatattaacacctttgcaagtgcatcccttgaccgcactacaaagatatggagtttgggttctccagatccaaacttcacacttgatgggcatcaaaagggtgtcaactgtgttgactacttcactggtggtgacaggccctatttgattactggttctgatgactccaccgcaaaggtctgggattaccagacgaagagctgtgttcagacacttgaagggcatacacataatatttctgctgtttgtttccatcctgagctccctataatcattactggatctgaagatggtacagttcgtatatggcattcgacaacttacagacttgagaacacactaaactatggccttgagagagtctgggctgttggatacatgaaggggtctagaaggatggtgattggttatgatgaggggaccattatgataaaaatgggccgtgaagtacccatagcaagtatggataccggtgggaaaatcatttgggcgaaacataatgaaatacaaactgtaaatatcaagacagtcggtgcaggttttgaagccacagatggagaaagattacccttggctgtaaaagagttaggaagctgtgatttgtacccacagagcttgaagcataaccctaatggacggttcgttgttgtatgtggagatggcgagtacataatttatactgccctggcctggaggaatagatcatttgggtctgcactggaatttgtttggtcatcagaaggagaatatgcaattagggaaagtacatcaagaataaagattttcaataaatcgtttcaggagaagaaaactatccgcccttcattttcagcagagcgtatttatggtggggtattgttggcaatgtgttctagtgacttcatctgcttttatgactgggctgattgtagactaatacgccgaatcgatgtgaatgttaagaatgtttactgggctgatagtggtgacctagttgcaatagcaagtgatacatcattctacatcctcaagtacaatagagatattgttgcttcttatctagaaggtggaaagcctgtggacgaagaaggcgttgaagatgcttttgagctgcttcatgagatcaatgagcgagtgagaactggaatttgggttggagactgctttatctataacaactcatcgtggcgcctaaattattgtgttggtggtgaggtcactacaatgtatcatttggatcgccctatgtacttgttgggatatattgcgaaccaaagtcgagtttatcttattgacaaggagttgaatgtcattgggtacacattacttctgagtttgattgagtacaagacccttgtgatgcgtggggatttggatcatgcaaacaaaattttatcatccatacctaaggcgcaatataatagtgttgctcattttttggaatcgagaggtatgttggaagaggctcttgagatagccactgatgctgactacaagtttgacctagctgtgcagcttggaaaattagaagtcgcgaaggctatcgccatagaagcacaaagtgaatctaaatggaagcagttgggcgaacttgccatgtccacaggcaagctagagatggcagaggaatgccttcttcaagcaaaggacttaagtggcttgttgctactgtactcatctcttggagatgctgaaggaattgaaaagcttgcttctttggcaaaagaacacggaaaaaacaatgttgctttcctctgcctttttatgcttggtaaagttgaagattgcatacagttgcttgtagacagtaaccgtatacctgaagctgcattactggcgcgttcatatcttcctagcaaagtaccagagatagtggcaatttggagagacgacctgagtaaaattaatccaaaagctgcagagtctctagcagatccttctgaatatccaaatctatttgaagactggcaggttgctctaactgtagaaaaaagtgttgcgtctcagaggggcaattatcttcctgctgaccagtacttgaatcatgctgagaagtcagacatgactattgtggaagctttcaaaaggatgcaggttgttcagcatgaggaacctgaagatgtggctgaggaaaatggagaacttgatcaacaggcatttgaagagactgaaatgcagaatacagatgatgatgctgatgaacctgaagagacagttttagtaaatgggaacaagggtgaggaacatcagggtacggacaatgaaggagctttatctgcctagaattcttggcaaatatgggaaccccaagttttgcctacgtgctaactcaacatgaataggggctgaaagaagcacagctcattggctgcaaatttttttttctgagggtaacaaatgtgggccccctgttttactctgaagcaccggaactggtgatgctggaccgcctgatgcttgtcatatagaagacccaatttccatgccgtgaaatcaatggatcgggtgtggggccagctgcaatgaatagtgtttgaataattggtatagaggtatgtagtaaaaatatgccagattaccataggagatgacagcttttgttacccattcattgtaatgaccttattcgataaggttacgtgtagtctacgattgcagttgcgggccgggagttttttcccatgttatgtagcatcattctatcggatctgaggcttggcttgagaatctgtttcgcttgtttgcgcggatgcctatcaaatgctggtgactgcgagaattcaaagctgctat

SEQ ID NO: 82497 - DNA, 3430 bp, Zea Mays
cagacccttttcagttttctccgtgcctcttgctccctcctggctccgcgcctgggccaccgagcccgcgatcggattcgctccctcttcgccgcgccccaccacccatcgccgctggggatccctagggtttagtgcagtcgctcggctccgcgccgtcctcgccgctgctgccaccatgccgctcaggttggagatcaagcggaagttcgctcaacggtcggagagagtcaagtccgtggacttgcaccccacggagccatggatcctgtcgagcctgtactcggggagtgtctgcatctgggattatcaggcacaggcaatggtgaaatcatttgaagtttcagaactgccagtgaggtcggcaaagtttatttcaaggaaacaatgggttgtagctggtgcagacgacatgttcattcgtgtctacaactacaataccatggacaaagttaaagtttttgaggctcatactgattacatcagatgtgttgcggtccatccaactctaccatatgtgctgtcatcatctgatgacatgctaataaaactgtgggactgggataaagggtgggtgtgcactcaaatatttgagggacattcacactatgtgatgcaggttactttcaatccaaaggatattaacacctttgcaagtgcatcccttgaccgcactacaaagatatggagtttgggttctccagatccaaacttcacacttgatgggcatcaaaagggtgtcaactgtgttgactacttcactggtggtgacaggccctatttgattactggttctgatgactccaccgcaaaggtctgggattaccagacgaagagctgtgttcagacacttgaagggcatacacataatatttctgctgtttgtttccatcctgagctccctataatcattactggatctgaagatggtacagttcgtatatggcattcgacaacttacagacttgagaacacactaaactatggccttgagagagtctgggctgttggatacatgaaggggtctagaaggatggtgattggttatgatgaggggaccattatgataaaaatgggccgtgaagtacccatagcaagtatggataccggtgggaaaatcatttgggcgaaacataatgaaatacaaactgtaaatatcaagacagtcggtgcaggttttgaagccacagatggagaaagattacccttggctgtaaaagagttaggaagctgtgatttgtacccacagagcttgaagcataaccctaatggacggttcgttgttgtatgtggagatggcgagtacataatttatactgccctggcctggaggaatagatcatttgggtctgcactggaatttgtttggtcatcagaaggagaatatgcaattagggaaagtacatcaagaataaagattttcaataaatcgtttcaggagaagaaaactatccgcccttcattttcagcagagcgtatttatggtggggtattgttggcaatgtgttctagtgacttcatctgcttttatgactgggctgattgtagactaatacgccgaatcgatgtgaatgttaagaatgtttactgggctgatagtggtgacctagttgcaatagcaagtgatacatcattctacatcctcaagtacaatagagatattgttgcttcttatctagaaggtggaaagcctgtggacgaagaaggcgttgaagatgcttttgagctgcttcatgagatcaatgagcgagtgagaactggaatttgggttggagactgctttatctataacaactcatcgtggcgcctaaattattgtgttggtggtgaggtcactacaatgtatcatttggatcgccctatgtacttgttgggatatattgcgaaccaaagtcgagtttatcttattgacaaggagttgaatgtcattgggtacacattacttctgagtttgattgagtacaagacccttgtgatgcgtggggatttggatcatgcaaacaaaattttatcatccatacctaaggcgcaatataatagtgttgctcattttttggaatcgagaggtatgttggaagaggctcttgagatagccactgatgctgactacaagtttgacctagctgtgcagcttggaaaattagaagtcgcgaaggctatcgccatagaagcacaaagtgaatctaaatggaagcagttgggcgaacttgccatgtccacaggcaagctagagatggcagaggaatgccttcttcaagcaaaggacttaagtggcttgttgctactgtactcatctcttggagatgctgaaggaattgaaaagcttgcttctttggcaaaagaacacggaaaaaacaatgttgctttcctctgcctttttatgcttggtaaagttgaagattgcatacagttgcttgtagacagtaaccgtatacctgaagctgcattactggcgcgttcatatcttcctagcaaagtaccagagatagtggcaatttggagagacgacctgagtaaaattaatccaaaagctgcagagtctctagcagatccttctgaatatccaaatctatttgaagactggcaggttgctctaactgtagaaaaaagtgttgcgtctcagaggggcaattatcttcctgctgaccagtacttgaatcatgctgagaagtcagacatgactattgtggaagctttcaaaaggatgcaggttgttcagcatgaggaacctgaagatgtggctgaggaaaatggagaacttgatcaacaggcatttgaagagactgaaatgcagaatacagatgatgatgctgatgaacctgaagagacagttttagtaaatgggaacaagggtgaggaacatcaggtgctaactcaacatgaataggggctgaaagaagcacagctcattggctgcaaatttttttttctgagggtaacaaatgtgggccccctgttttactctgaagcaccggaactggtgatgctggaccgcctgatgcttgtcatatagaaggtcgctatactttttggtgtcaatctgcccatccagtcatgcttctttttgtaaacaacgtaggcaattctttcttcttggaacgtttgcagacccaatttccatgccgtgaaatcaatggatcgggtgtggggccagctgcaatgaatagtgtttgaataattggtatagaggtatgtagtaaaaatatgccagattaccataggagatgacagcttttgttacccattcattgtaatgaccttattcgataaggttacgtgtagtctacgattgcagttgcgggccgggagttttttcccatgttatgtagcatcattctatcggatctgaggcttggcttgagaatctgtttcgcttgtttgcgcggatgcctatcaaatgctggtgactgcgagaattcaaagctgctat

SEQ ID NO: 82498 - DNA, 2627 bp, Zea Mays
cttagattcacgtggaaagagaactcctggcaatcagaatgatgctaatgttactttcaatccaaaggatattaacacctttgcaagtgcatcccttgaccgcactacaaagatatggagtttgggttctccagatccaaacttcacacttgatgggcatcaaaagggtgtcaactgtgttgactacttcactggtggtgacaggccctatttgattactggttctgatgactccaccgcaaaggtctgggattaccagacgaagagctgtgttcagacacttgaagggcatacacataatatttctgctgtttgtttccatcctgagctccctataatcattactggatctgaagatggtacagttcgtatatggcattcgacaacttacagacttgagaacacactaaactatggccttgagagagtctgggctgttggatacatgaaggggtctagaaggatggtgattggttatgatgaggggaccattatgataaaaatgggccgtgaagtacccatagcaagtatggataccggtgggaaaatcatttgggcgaaacataatgaaatacaaactgtaaatatcaagacagtcggtgcaggttttgaagccacagatggagaaagattacccttggctgtaaaagagttaggaagctgtgatttgtacccacagagcttgaagcataaccctaatggacggttcgttgttgtatgtggagatggcgagtacataatttatactgccctggcctggaggaatagatcatttgggtctgcactggaatttgtttggtcatcagaaggagaatatgcaattagggaaagtacatcaagaataaagattttcaataaatcgtttcaggagaagaaaactatccgcccttcattttcagcagagcgtatttatggtggggtattgttggcaatgtgttctagtgacttcatctgcttttatgactgggctgattgtagactaatacgccgaatcgatgtgaatgttaagaatgtttactgggctgatagtggtgacctagttgcaatagcaagtgatacatcattctacatcctcaagtacaatagagatattgttgcttcttatctagaaggtggaaagcctgtggacgaagaaggcgttgaagatgcttttgagctgcttcatgagatcaatgagcgagtgagaactggaatttgggttggagactgctttatctataacaactcatcgtggcgcctaaattattgtgttggtggtgaggtcactacaatgtatcatttggatcgccctatgtacttgttgggatatattgcgaaccaaagtcgagtttatcttattgacaaggagttgaatgtcattgggtacacattacttctgagtttgattgagtacaagacccttgtgatgcgtggggatttggatcatgcaaacaaaattttatcatccatacctaaggcgcaatataatagtgttgctcattttttggaatcgagaggtatgttggaagaggctcttgagatagccactgatgctgactacaagtttgacctagctgtgcagcttggaaaattagaagtcgcgaaggctatcgccatagaagcacaaagtgaatctaaatggaagcagttgggcgaacttgccatgtccacaggcaagctagagatggcagaggaatgccttcttcaagcaaaggacttaagtggcttgttgctactgtactcatctcttggagatgctgaaggaattgaaaagcttgcttctttggcaaaagaacacggaaaaaacaatgttgctttcctctgcctttttatgcttggtaaagttgaagattgcatacagttgcttgtagacagtaaccgtatacctgaagctgcattactggcgcgttcatatcttcctagcaaagtaccagagatagtggcaatttggagagacgacctgagtaaaattaatccaaaagctgcagagtctctagcagatccttctgaatatccaaatctatttgaagactggcaggttgctctaactgtagaaaaaagtgttgcgtctcagaggggcaattatcttcctgctgaccagtacttgaatcatgctgagaagtcagacatgactattgtggaagctttcaaaaggatgcaggttgttcagcatgaggaacctgaagatgtggctgaggaaaatggagaacttgatcaacaggcatttgaagagactgaaatgcagaatacagatgatgatgctgatgaacctgaagagacagttttagtaaatgggaacaagggtgaggaacatcagggtacggacaatgaaggagctttatctgcctagaattcttggcaaatatgggaaccccaagttttgcctacggtgattcactgtctttgaatttttgagttttagtacacttgaatccatagctgtcctcaaagtttgggtagccattccaatctatctcaatacacaatattgacaattaatcaggagatgaaattacaataatagattaccagatcgtcaattcacctctccctcatttaacctttttaatcgatgtgcttattacaaatattctgatatagttttgtggatgatagtgccattgggttgctaaggaacctagaaatat

SEQ ID NO: 82499 - DNA, 1781 bp, Zea Mays
cagccgacggctctgatgtgactgagcagtgagcacaggcgcgtcaacccgggtgccttcacgcttgacaggcacccatcccacgccacgggctcctcctcccctccgcttctcctctaggtccctctcctacagaacccttccaatccaaagcgaatcctccgggccgccgcggcggcgtctccccgggcgcccctagcacagctcgcgttccggtggaacagagaagagaggcgagaggatggagatccagtcgtctggccgctccatcgaggggctgatggagaaggtgctgtccgtgaacatcctctcctcggactacttcaaggagctcttcaagtacaagacctaccacgaggtcgtcgacgagatctacaaccaggtggaccacgtcgagccctggatgaccggcaactgccgcgggccctcctccgccttctgcctcctctacaagttattcaccatgaagctcaccgtcaagcagatgcacggcctgctcaagcaccaggactccccctacatcagagctattggattcctctacctacgatacgttgcagaaccgaagacactttggacttggtatgaaccctatatcaaggatgacgaggagtttgcacctggatcaaatcgtaaagtgactacaatgggcgtttatgtgcgtgatctcctccttggtcagtgtctccttagttatccaactacatccgagggcagagaccgttaaccatattattttctgaacttaaatgcaattagtcttccttgaatcactcacctgttgatttggcatactgaggggatgtttcaattgtggagttgcttttaagaggagacatcatctcttccgccagtaacatcactgtataagtactatttcgacagtctccttccacgagtgcctctcccaatcctccgacaggtcactagccaccttgagaagctaaagcttccaacaaagcagtcaggaatgactggggattccaacaggcttgaatcaaatgataccgccagaaggcctccttccgtaaaggcttctttgtctgtctcctttggtcagcgcgctccacaccgtgcatccacaagggattcttccccggtccgaagaacgttaccttccaaacaggacaaggaaggtgaccgtgcgaaatcgccaccgatgaagcaccggagtcggagctctgagcgtgatcatgatttggagagggagcgctcggatcgtgaacgtggcagtggcaggtactacaaggatagggagcctgatcggcatgctcgtgagcacagagaccgcgatcatcgtcggtctgattattcgaacagggatggcgaaacacgaggccgtgaaaggagggacagggattctgaccggagtagacatgcaagcgtccgcaggagcaggagcaggagtccagtccgtggcagaagtgatggcgacaaacatcgctccagcccgtttggtagggctccagaattgtcgaacctggcgaagctgaaggatctgtacggcgatgcgacaaacgtgaagaatgatgctggcgacgatagggcgcacagggattctggaacggaagaggtgatccgactgggaggggcaaggtggaggtgagtctcatgttaagggacagtgggacacccacggtgatgcatttaggtccatgaatgaatccaaacagcatcagtggaggaaatgatgggctgtatgtcttaacttgaacctacgatttcaatgctttattctgaaggttttcctctcattatgctattaatgtttttacatgaaa

SEQ ID NO: 82500 - DNA, 1664 bp, Zea Mays
cagccgacggctctgatgtgactgagcagtgagcacaggcgcgtcaacccgggtgccttcacgcttgacaggcacccatcccacgccacgggctcctcctcccctccgcttctcctctaggtccctctcctacagaacccttccaatccaaagcgaatcctccgggccgccgcggcggcgtctccccgggcgcccctagcacagctcgcgttccggtggaacagagaagagaggcgagaggatggagatccagtcgtctggccgctccatcgaggggctgatggagaaggtgctgtccgtgaacatcctctcctcggactacttcaaggagctcttcaagtacaagacctaccacgaggtcgtcgacgagatctacaaccaggtggaccacgtcgagccctggatgaccggcaactgccgcgggccctcctccgccttctgcctcctctacaagttattcaccatgaagctcaccgtcaagcagatgcacggcctgctcaagcaccaggactccccctacatcagagctattggattcctctacctacgatacgttgcagaaccgaagacactttggacttggtatgaaccctatatcaaggatgacgaggagtttgcacctggatcaaatcgtaaagtgactacaatgggcgtttatgtgcgtgatctcctccttggtcaggggatgtttcaattgtggagttgcttttaagaggagacatcatctcttccgccagtaacatcactgtataagtactatttcgacagtctccttccacgagtgcctctcccaatcctccgacaggtcactagccaccttgagaagctaaagcttccaacaaagcagtcaggaatgactggggattccaacaggcttgaatcaaatgataccgccagaaggcctccttccgtaaaggcttctttgtctgtctcctttggtcagcgcgctccacaccgtgcatccacaagggattcttccccggtccgaagaacgttaccttccaaacaggacaaggaaggtgaccgtgcgaaatcgccaccgatgaagcaccggagtcggagctctgagcgtgatcatgatttggagagggagcgctcggatcgtgaacgtggcagtggcaggtactacaaggatagggagcctgatcggcatgctcgtgagcacagagaccgcgatcatcgtcggtctgattattcgaacagggatggcgaaacacgaggccgtgaaaggagggacagggattctgaccggagtagacatgcaagcgtccgcaggagcaggagcaggagtccagtccgtggcagaagtgatggcgacaaacatcgctccagcccgtttggtagggctccagaattgtcgaacctggcgaagctgaaggatctgtacggcgatgcgacaaacgtgaagaatgatgctggcgacgatagggcgcacagggattctggaacggaagaggtgatccgactgggaggggcaaggtggaggtgagtctcatgttaagggacagtgggacacccacggtgatgcatttaggtccatgaatgaatccaaacagcatcagtggaggaaatgatgggctgtatgtcttaacttgaacctacgatttcaatgctttattctgaaggttttcctctcattatgctattaatgtttttacatgaaa

SEQ ID NO: 82501 - DNA, 1770 bp, Zea Mays
cagccgacggctctgatgtgactgagcagtgagcacaggcgcgtcaacccgggtgccttcacgcttgacaggcacccatcccacgccacgggctcctcctcccctccgcttctcctctaggtccctctcctacagaacccttccaatccaaagcgaatcctccgggccgccgcggcggcgtctccccgggcgcccctagcacagctcgcgttccggtggaacagagaagagaggcgagaggatggagatccagtcgtctggccgctccatcgaggggctgatggagaaggtgctgtccgtgaacatcctctcctcggactacttcaaggagctcttcaagtacaagacctaccacgaggtcgtcgacgagatctacaaccaggtggaccacgtcgagccctggatgaccggcaactgccgcgggccctcctccgccttctgcctcctctacaagttattcaccatgaagctcaccgtcaagcagatgcacggcctgctcaagcaccaggactccccctacatcagagctattggattcctctacctacgatacgttgcagaaccgaagacactttggacttggtatgaaccctatatcaaggatgacgaggagtttgcacctggatcaaatcgtaaagtgactacaatgggcgtttatgtgcgtgatctcctccttggtcagttatccaactacatccgagggcagagaccgttaaccatattattttctgaacttaaatgcaattagtcttccttgaatcactcacctgttgatttggcatactgaggggatgtttcaattgtggagttgcttttaagaggagacatcatctcttccgccagtaacatcactgtataagtactatttcgacagtctccttccacgagtgcctctcccaatcctccgacaggtcactagccaccttgagaagctaaagcttccaacaaagcagtcaggaatgactggggattccaacaggcttgaatcaaatgataccgccagaaggcctccttccgtaaaggcttctttgtctgtctcctttggtcagcgcgctccacaccgtgcatccacaagggattcttccccggtccgaagaacgttaccttccaaacaggacaaggaaggtgaccgtgcgaaatcgccaccgatgaagcaccggagtcggagctctgagcgtgatcatgatttggagagggagcgctcggatcgtgaacgtggcagtggcaggtactacaaggatagggagcctgatcggcatgctcgtgagcacagagaccgcgatcatcgtcggtctgattattcgaacagggatggcgaaacacgaggccgtgaaaggagggacagggattctgaccggagtagacatgcaagcgtccgcaggagcaggagcaggagtccagtccgtggcagaagtgatggcgacaaacatcgctccagcccgtttggtagggctccagaattgtcgaacctggcgaagctgaaggatctgtacggcgatgcgacaaacgtgaagaatgatgctggcgacgatagggcgcacagggattctggaacggaagaggtgatccgactgggaggggcaaggtggaggtgagtctcatgttaagggacagtgggacacccacggtgatgcatttaggtccatgaatgaatccaaacagcatcagtggaggaaatgatgggctgtatgtcttaacttgaacctacgatttcaatgctttattctgaaggttttcctctcattatgctattaatgtttttacatgaaa

SEQ ID NO: 82502 - DNA, 1473 bp, Zea Mays
cagccgacggctctgatgtgactgagcagtgagcacaggcgcgtcaacccgggtgccttcacgcttgacaggcacccatcccacgccacgggctcctcctcccctccgcttctcctctaggtccctctcctacagaacccttccaatccaaagcgaatcctccgggccgccgcggcggcgtctccccgggcgcccctagcacagctcgcgttccggtggaacagagaagagaggcgagaggatggagatccagtcgtctggccgctccatcgaggggctgatggagaaggtgctgtccgtgaacatcctctcctcggactacttcaaggagctcttcaagtacaagacctaccacgaggtcgtcgacgagatctacaaccaggtggaccacgtcgagccctggatgaccggcaactgccgcgggccctcctccgccttctgcctcctctacaagttattcaccatgaagctcaccgtcaagcagatgcacggcctgctcaagcaccaggactccccctacatcagagctattggattcctctacctacgatacgttgcagaaccgaagacactttggacttggtatgaaccctatatcaaggatgacgaggagtttgcacctggatcaaatcgtaaagtgactacaatgggcgtttatgtgcgtgatctcctccttggtcaggtatatctcttgaagttatttcacaattattccatataaaaaaacagtatcctgagctgctatcacagtgtctccttagttatccaactacatccgagggcagagaccgttaaccatattattttctgaacttaaatgcaattagtcttccttgaatcactcacctgttgatttggcatactgaggggatgtttcaattgtggagttgcttttaagaggagacatcatctcttccgccagtaacatcactgtataaggttgcaagataattttaatctttttttacatcttgaggattatatcacacaaacatgtatgtacatggggcttttgcccatattggtttcttgcggcgagagtttctagtattttcttttcctccagacatgattcttcactgaaggtgtatgtgatatgttatgaaggaaataactccattttttctagacagaagcgaaagggttccaacgcattaaataccatatagttgttttttttggaggaaatggtactaaaaagaaaaaaagatggctaatatggatactgatttgatggttaactgtaaaaccagtttttttcttcttgtttggtgcttgactccacatttattcccagtcagatgctctgatgtattgtattgcaaagttatctaaattcctatctaatttaaccgaggcccaatagttcatacatttaattgccacactagttaggaaagcagtgacataaagtaagattttctggtttggtcggttgttcctgttgctgctctaaaaaaagggggaagacca

SEQ ID NO: 82503 - DNA, 2963 bp, Zea Mays
ctcgcgttcggatcagcctctctgtcatgtcgccaatacagcgcagcgctccgcatccacccaaatcggagtagggtcgtcagtacagcgcgacgccctgccagtagccgccgcaaccggccgccggtcccgcgcgaggggaggaggagatcactgcggcggcgtcttctgccggtttgaggattcggggcatcactgcagcagctggcgccaggctccagcatggacacggcgtttctgagtcctccgcttgcccgtaatctggtttatgacgagtttgccgttcttcaccccactagctacccttttcatactcttcggtatttgagatgcaatccaatgtattcgagaccgctgctaacaatagcaccagcctcaccatcaaggggcttgattcagagagtggccgcactacctgatgttgatgatttcttctgggagaaggatcctactccaatacttgacacaattgatgcacccattcatttgaaaaatctatctagtaaggagctcaagcagttagccgatgaagttcgttcagaaatagctttcataatgtccagaaaatgccaaccgtgtggtgctgatcgctcagttgtggagctgacaattgctatacattatgtgttcaatgccccaatggataagatactatgggatgctggtcaacatttttcttgcaacaggcatatgcgcacaagattctcacaggaaggcgctctctcttccatactattacacagaaaaatggcctttctgggttcacgtcgcgttttgagagcgagtatgatccctttggtgctggacatggatgcaatagtctatccgctggccttgggatggcggttgcaagggatataaatgggagaaaaaatcgaatagtgacagttataagtaattggacaaccatggctggccaggtgtacgaggcaatgggtcatgctggcttcctcgattccaacatggtggttattctaaatgatagctgtcataccttgcttcctaaagcagatggcggggcaaagatgtcagtcaatgccttttctagtgctctaagcaagattcaatccagcaaaggatttaggaggtttagagaggctgctaagggacttgccaaatggtttggcaaaggaatgcacgaatttgctgccaaagttgatgagtatgctcgtggtatgataggtcctcatggtgcaactctttttgaagaacttggattatattatattggtcctattgatggacgtaacattgatgatctcatctgtgtacttaaggaagttgcgagcttagattcaactggcccagtacttgtacatgtaattactgggactgaaaatgacactggtggaattattggaagtgaaataaatgcagttgaggaaggaactggactttctaggacatataatgactgctttgtagaagcactaacagcagaagcagagaatgacaagcgcattgtggtagttcatggcggcatgggaatcgatcgatcactccgcttattccagtccaggttcccagacagattttttgacttgggcatcgctgagcaacatgctgttaccttttctgctggtttggcatgcggaggtctaaagcctttctgcataattccatccacatttcttcagcgagcatatgatcagataattgaagatgtggacatgcaaaagataccagttcgatttgctatcacaaatgctggtctggtaggatctgagggtccaactaattcaggaccatttgatattacattcatgtcatgcttgccaaacatgattgtcatgtcaccatctaatgaggatgaacttattgacatggtggcaacagctgcaatgattgaggacagacctatttgcttccgctatcctaggggtgccattgttgggactagtggaagtgtaacatatgggaatccatttgagattggtaaaggagagattcttgtcgagggaaaagagatagcttttcttggctatggcgaggtggtccagagatgcttgattgctcgatctcttttatccaactttggcattcaggcgacagttgcaaatgcgaggttttgcaagccgcttgacatcgacctaatcagaacgctgtgccagcagcatagttttcttatcacagtggaagaaggaacggttggtggctttggatcacatgtctcacagtttatttctctcgatggtctacttgacggtcgaacaaagtggcgacccattgtgctgccagacaggtacattgagcatgcatcgctcgcagagcaacttgacctggctggcctaactgctcatcacatagctgcaactgcattgaccctcctagggcgtcatcgtgatgcccttctgttgatgaagtaggggaaggaaccaccaagaagaatggaattggatagataaaaggcaatatgtgcaaaagttgattcggaggacgctcatcatgctgttttacgattgtgttgtctggatagaactgaagcgtgccgtgggaggtggccaaatgcacaaatcccaaagagggacgacaaagcctatagcaccatagattaatagtcacggtgtatatactaaaaagaatttacagagcaccgatgtaacgttgttactgtgcatgttaatactgaaattgtggtacgacgccaactaggagaatgagctggagctgacatgtttcagttaatgtaataaagctacttagttttgtatgtaccaattcattccttaatattggaattcataaccctagcgttcacctcattcggtcgtctctcagtagtttcagagttcagttcagttttcggtgtcgaaacttttagtttctgtcacacttttttatttcagttaggagcaaagggatgtgcagcgctttgaccacgaggtgtgggatgacacagccacctctcaatgtgtgcgtacttgtagggcgtcgatcaccactttgttttagccagtttggtt

SEQ ID NO: 82504 - DNA, 2992 bp, Zea Mays
ctcgcgttcggatcagcctctctgtcatgtcgccaatacagcgcagcgctccgcatccacccaaatcggagtagggtcgtcagtacagcgcgacgccctgccagtagccgccgcaaccggccgccggtcccgcgcgaggggaggaggagatcactgcggcggcgtcttctgccggtttgaggattcggggcatcactgcagcagctggcgccaggctccagcatggacacggcgtttctgagtcctccgcttgcccgtaatctggtttatgacgagtttgccgttcttcaccccactagctacccttttcatactcttcggtatttgagatgcaatccaatgtattcgagaccgctgctaacaatagcaccagcctcaccatcaaggggcttgattcagagagtggccgcactacctgatgttgatgatttcttctgggagaaggatcctactccaatacttgacacaattgatgcacccattcatttgaaaaatctatctagtaaggagctcaagcagttagccgatgaagttcgttcagaaatagctttcataatgtccagaaaatgccaaccgtgtggtgctgatcgctcagttgtggagctgacaattgctatacattatgtgttcaatgccccaatggataagatactatgggatgctggtcaacatgcatatgcgcacaagattctcacaggaaggcgctctctcttccatactattacacagaaaaatggcctttctgggttcacgtcgcgttttgagagcgagtatgatccctttggtgctggacatggatgcaatagtctatccgctggccttgggatggcggttgcaagggatataaatgggagaaaaaatcgaatagtgacagttataagtaattggacaaccatggctggccaggtgtacgaggcaatgggtcatgctggcttcctcgattccaacatggtggttattctaaatgatagctgtcataccttgcttcctaaagcagatggcggggcaaagatgtcagtcaatgccttttctagtgctctaagcaagattcaatccagcaaaggatttaggaggtttagagaggctgctaagggacttgccaaatggtttggcaaaggaatgcacgaatttgctgccaaagttgatgagtatgctcgtggtatgataggtcctcatggtgcaactctttttgaagaacttggattatattatattggtcctattgatggacgtaacattgatgatctcatctgtgtacttaaggaagttgcgagcttagattcaactggcccagtacttgtacatgtaattactgggactgaaaatgacactggtggaattattggaagtgaaataaatgcagttgaggaaggtttggccttcaaactcaagccctgatcttctaaagtttttaggaactggactttctaggacatataatgactgctttgtagaagcactaacagcagaagcagagaatgacaagcgcattgtggtagttcatggcggcatgggaatcgatcgatcactccgcttattccagtccaggttcccagacagattttttgacttgggcatcgctgagcaacatgctgttaccttttctgctggtttggcatgcggaggtctaaagcctttctgcataattccatccacatttcttcagcgagcatatgatcagataattgaagatgtggacatgcaaaagataccagttcgatttgctatcacaaatgctggtctggtaggatctgagggtccaactaattcaggaccatttgatattacattcatgtcatgcttgccaaacatgattgtcatgtcaccatctaatgaggatgaacttattgacatggtggcaacagctgcaatgattgaggacagacctatttgcttccgctatcctaggggtgccattgttgggactagtggaagtgtaacatatgggaatccatttgagattggtaaaggagagattcttgtcgagggaaaagagatagcttttcttggctatggcgaggtggtccagagatgcttgattgctcgatctcttttatccaactttggcattcaggcgacagttgcaaatgcgaggttttgcaagccgcttgacatcgacctaatcagaacgctgtgccagcagcatagttttcttatcacagtggaagaaggaacggttggtggctttggatcacatgtctcacagtttatttctctcgatggtctacttgacggtcgaacaaagtggcgacccattgtgctgccagacaggtacattgagcatgcatcgctcgcagagcaacttgacctggctggcctaactgctcatcacatagctgcaactgcattgaccctcctagggcgtcatcgtgatgcccttctgttgatgaagtaggggaaggaaccaccaagaagaatggaattggatagataaaaggcaatatgtgcaaaagttgattcggaggacgctcatcatgctgttttacgattgtgttgtctggatagaactgaagcgtgccgtgggaggtggccaaatgcacaaatcccaaagagggacgacaaagcctatagcaccatagattaatagtcacggtgtatatactaaaaagaatttacagagcaccgatgtaacgttgttactgtgcatgttaatactgaaattgtggtacgacgccaactaggagaatgagctggagctgacatgtttcagttaatgtaataaagctacttagttttgtatgtaccaattcattccttaatattggaattcataaccctagcgttcacctcattcggtcgtctctcagtagtttcagagttcagttcagttttcggtgtcgaaacttttagtttctgtcacacttttttatttcagttaggagcaaagggatgtgcagcgctttgaccacgaggtgtgggatgacacagccacctctcaatgtgtgcgtacttgtagggcgtcgatcaccactttgttttagccagtttggtt

SEQ ID NO: 82505 - DNA, 2879 bp, Zea Mays
ctcgcgttcggatcagcctctctgtcatgtcgccaatacagcgcagcgctccgcatccacccaaatcggagtagggtcgtcagtacagcgcgacgccctgccagtagccgccgcaaccggccgccggtcccgcgcgaggggaggaggagatcactgcggcggcgtcttctgccggtttgaggattcggggcatcactgcagcagctggcgccaggctccagcatggacacggcgtttctgagtcctccgcttgcccgtaatctggtttatgacgagtttgccgttcttcaccccactagctacccttttcatactcttcggtatttgagatgcaatccaatgtattcgagaccgctgctaacaatagcaccagcctcaccatcaaggggcttgattcagagagtggccgcactacctgatgttgatgatttcttctgggagaaggatcctactccaatacttgacacaattgatgcacccattcatttgaaaaatctatctagagctcaagcagttagccgatgaagttcgttcagaaatagctttcataatgtccagaaaatgccaaccgtgtggtgctgatcgctcagttgtggagctgacaattgctatacattatgtgttcaatgccccaatggataagatactatgggatgctggtcaacatgcatatgcgcacaagattctcacaggaaggcgctctctcttccatactattacacagaaaaatggcctttctgggttcacgtcgcgttttgagagcgagtatgatccctttggtgctggacatggatgcaatagtctatccgctggccttgggatggcggttgcaagggatataaatgggagaaaaaatcgaatagtgacagttataagtaattggacaaccatggctggccaggtgtacgaggcaatgggtcatgctggcttcctcgattccaacatggtggttattctaaatgatagctgtcataccttgcttcctaaagcagatggcggggcaaagatgtcagtcaatgccttttctagtgctctaagcaagattcaatccagcaaaggatttaggaggtttagagaggctgctaagggacttgccaaatggtttggcaaaggaatgcacgaatttgctgccaaagttgatgagtatgctcgtggaagttgcgagcttagattcaactggcccagtacttgtacatgtaattactgggactgaaaatgacactggtggaattattggaagtgaaataaatgcagttgaggaagggccttcaaactcaagccctgatcttctaaagtttttaggaactggactttctaggacatataatgactgctttgtagaagcactaacagcagaagcagagaatgacaagcgcattgtggtagttcatggcggcatgggaatcgatcgatcactccgcttattccagtccaggttcccagacagattttttgacttgggcatcgctgagcaacatgctgttaccttttctgctggtttggcatgcggaggtctaaagcctttctgcataattccatccacatttcttcagcgagcatatgatcagataattgaagatgtggacatgcaaaagataccagttcgatttgctatcacaaatgctggtctggtaggatctgagggtccaactaattcaggaccatttgatattacattcatgtcatgcttgccaaacatgattgtcatgtcaccatctaatgaggatgaacttattgacatggtggcaacagctgcaatgattgaggacagacctatttgcttccgctatcctaggggtgccattgttgggactagtggaagtgtaacatatgggaatccatttgagattggtaaaggagagattcttgtcgagggaaaagagatagcttttcttggctatggcgaggtggtccagagatgcttgattgctcgatctcttttatccaactttggcattcaggcgacagttgcaaatgcgaggttttgcaagccgcttgacatcgacctaatcagaacgctgtgccagcagcatagttttcttatcacagtggaagaaggaacggttggtggctttggatcacatgtctcacagtttatttctctcgatggtctacttgacggtcgaacaaagtggcgacccattgtgctgccagacaggtacattgagcatgcatcgctcgcagagcaacttgacctggctggcctaactgctcatcacatagctgcaactgcattgaccctcctagggcgtcatcgtgatgcccttctgttgatgaagtaggggaaggaaccaccaagaagaatggaattggatagataaaaggcaatatgtgcaaaagttgattcggaggacgctcatcatgctgttttacgattgtgttgtctggatagaactgaagcgtgccgtgggaggtggccaaatgcacaaatcccaaagagggacgacaaagcctatagcaccatagattaatagtcacggtgtatatactaaaaagaatttacagagcaccgatgtaacgttgttactgtgcatgttaatactgaaattgtggtacgacgccaactaggagaatgagctggagctgacatgtttcagttaatgtaataaagctacttagttttgtatgtaccaattcattccttaatattggaattcataaccctagcgttcacctcattcggtcgtctctcagtagtttcagagttcagttcagttttcggtgtcgaaacttttagtttctgtcacacttttttatttcagttaggagcaaagggatgtgcagcgctttgaccacgaggtgtgggatgacacagccacctctcaatgtgtgcgtacttgtagggcgtcgatcaccactttgttttagccagtttggtt

SEQ ID NO: 82506 - DNA, 2949 bp, Zea Mays
ctcgcgttcggatcagcctctctgtcatgtcgccaatacagcgcagcgctccgcatccacccaaatcggagtagggtcgtcagtacagcgcgacgccctgccagtagccgccgcaaccggccgccggtcccgcgcgaggggaggaggagatcactgcggcggcgtcttctgccggtttgaggattcggggcatcactgcagcagctggcgccaggctccagcatggacacggcgtttctgagtcctccgcttgcccgtaatctggtttatgacgagtttgccgttcttcaccccactagctacccttttcatactcttcggtatttgagatgcaatccaatgtattcgagaccgctgctaacaatagcaccagcctcaccatcaaggggcttgattcagagagtggccgcactacctgatgttgatgatttcttctgggagaaggatcctactccaatacttgacacaattgatgcacccattcatttgaaaaatctatctagtaaggagctcaagcagttagccgatgaagttcgttcagaaatagctttcataatgtccagaaaatgccaaccgtgtggtgctgatcgctcagttgtggagctgacaattgctatacattatgtgttcaatgccccaatggataagatactatgggatgctggtcaacatgcatatgcgcacaagattctcacaggaaggcgctctctcttccatactattacacagaaaaatggcctttctgggttcacgtcgcgttttgagagcgagtatgatccctttggtgctggacatggatgcaatagtctatccgctggccttgggatggcggttgcaagggatataaatgggagaaaaaatcgaatagtgacagttataagtaattggacaaccatggctggccaggtgtacgaggcaatgggtcatgctggcttcctcgattccaacatggtggttattctaaatgatagctgtcataccttgcttcctaaagcagatggcggggcaaagatgtcagtcaatgccttttctagtgctctaagcaagattcaatccagcaaaggatttaggaggtttagagaggctgctaagggacttgccaaatggtttggcaaaggaatgcacgaatttgctgccaaagttgatgagtatgctcgtggtatgataggtcctcatggtgcaactctttttgaagaacttggattatattatattggtcctattgatggacgtaacattgatgatctcatctgtgtacttaaggaagttgcgagcttagattcaactggcccagtacttgtacatgtaattactgggactgaaaatgacactggtggaattattggaagtgaaataaatgcagttgaggaaggaactggactttctaggacatataatgactgctttgtagaagcactaacagcagaagcagagaatgacaagcgcattgtggtagttcatggcggcatgggaatcgatcgatcactccgcttattccagtccaggttcccagacagattttttgacttgggcatcgctgagcaacatgctgttaccttttctgctggtttggcatgcggaggtctaaagcctttctgcataattccatccacatttcttcagcgagcatatgatcagataattgaagatgtggacatgcaaaagataccagttcgatttgctatcacaaatgctggtctggtaggatctgagggtccaactaattcaggaccatttgatattacattcatgtcatgcttgccaaacatgattgtcatgtcaccatctaatgaggatgaacttattgacatggtggcaacagctgcaatgattgaggacagacctatttgcttccgctatcctaggggtgccattgttgggactagtggaagtgtaacatatgggaatccatttgagattggtaaaggagagattcttgtcgagggaaaagagatagcttttcttggctatggcgaggtggtccagagatgcttgattgctcgatctcttttatccaactttggcattcaggcgacagttgcaaatgcgaggttttgcaagccgcttgacatcgacctaatcagaacgctgtgccagcagcatagttttcttatcacagtggaagaaggaacggttggtggctttggatcacatgtctcacagtttatttctctcgatggtctacttgacggtcgaacaaagtggcgacccattgtgctgccagacaggtacattgagcatgcatcgctcgcagagcaacttgacctggctggcctaactgctcatcacatagctgcaactgcattgaccctcctagggcgtcatcgtgatgcccttctgttgatgaagtaggggaaggaaccaccaagaagaatggaattggatagataaaaggcaatatgtgcaaaagttgattcggaggacgctcatcatgctgttttacgattgtgttgtctggatagaactgaagcgtgccgtgggaggtggccaaatgcacaaatcccaaagagggacgacaaagcctatagcaccatagattaatagtcacggtgtatatactaaaaagaatttacagagcaccgatgtaacgttgttactgtgcatgttaatactgaaattgtggtacgacgccaactaggagaatgagctggagctgacatgtttcagttaatgtaataaagctacttagttttgtatgtaccaattcattccttaatattggaattcataaccctagcgttcacctcattcggtcgtctctcagtagtttcagagttcagttcagttttcggtgtcgaaacttttagtttctgtcacacttttttatttcagttaggagcaaagggatgtgcagcgctttgaccacgaggtgtgggatgacacagccacctctcaatgtgtgcgtacttgtagggcgtcgatcaccactttgttttagccagtttggtt

SEQ ID NO: 82507 - DNA, 3425 bp, Zea Mays
ctcgcgttcggatcagcctctctgtcatgtcgccaatacagcgcagcgctccgcatccacccaaatcggagtagggtcgtcagtacagcgcgacgccctgccagtagccgccgcaaccggccgccggtcccgcgcgaggggaggaggagatcactgcggcggcgtcttctgccggtttgaggattcggggcatcactgcagcagctggcgccaggctccagcatggacacggcgtttctgagtcctccgcttgcccgtaatctggtttatgacgagtttgccgttcttcaccccactagctacccttttcatactcttcggtatttgagatgcaatccaatgtattcgagaccgctgctaacaatagcaccagcctcaccatcaaggggcttgattcagagagtggccgcactacctgatgttgatgatttcttctgggagaaggatcctactccaatacttgacacaattgatgcacccattcatttgaaaaatctatctagtaaggagctcaagcagttagccgatgaagttcgttcagaaatagctttcataatgtccagaaaatgccaaccgtgtggtgctgatcgctcagttgtggagctgacaattgctatacattatgtgttcaatgccccaatggataagatactatgggatgctggtcaacatgcatatgcgcacaagattctcacaggaaggcgctctctcttccatactattacacagaaaaatggcctttctgggttcacgtcgcgttttgagagcgagtatgatccctttggtgctggacatggatgcaatagtctatccgctggccttggtactgcccttatttgttcattactgtcttgcatggcaaattgaactgttctctgcaactggaatggaattgaaatgatgctcggagttatttcttagtgatatttttcacctatatgattttttattacttcaataaagttggatttagtttccaaatccaattatttatgcggcgctaagagattttatttttaaggatagatcctaatctaaattgttctgctcagtactttcagtttctattctttattttcatatgaaattgcatggaatcctcacagtaaacgatgcttacagcccacagattaatcatcgcaaaactttacacatcatgataaaatccaagctctattcagtatttcttgaatcttgcttcttttatagccttgtaaagtttcatttcgtttctttagtttttgagttacttcttatcagggatggcggttgcaagggatataaatgggagaaaaaatcgaatagtgacagttataagtaattggacaaccatggctggccaggtgtacgaggcaatgggtcatgctggcttcctcgattccaacatggtggttattctaaatgatagctgtcataccttgcttcctaaagcagatggcggggcaaagatgtcagtcaatgccttttctagtgctctaagcaagattcaatccagcaaaggatttaggaggtttagagaggctgctaagggacttgccaaatggtttggcaaaggaatgcacgaatttgctgccaaagttgatgagtatgctcgtggtatgataggtcctcatggtgcaactctttttgaagaacttggattatattatattggtcctattgatggacgtaacattgatgatctcatctgtgtacttaaggaagttgcgagcttagattcaactggcccagtacttgtacatgtaattactgggactgaaaatgacactggtggaattattggaagtgaaataaatgcagttgaggaagggccttcaaactcaagccctgatcttctaaagtttttaggaactggactttctaggacatataatgactgctttgtagaagcactaacagcagaagcagagaatgacaagcgcattgtggtagttcatggcggcatgggaatcgatcgatcactccgcttattccagtccaggttcccagacagattttttgacttgggcatcgctgagcaacatgctgttaccttttctgctggtttggcatgcggaggtctaaagcctttctgcataattccatccacatttcttcagcgagcatatgatcagataattgaagatgtggacatgcaaaagataccagttcgatttgctatcacaaatgctggtctggtaggatctgagggtccaactaattcaggaccatttgatattacattcatgtcatgcttgccaaacatgattgtcatgtcaccatctaatgaggatgaacttattgacatggtggcaacagctgcaatgattgaggacagacctatttgcttccgctatcctaggggtgccattgttgggactagtggaagtgtaacatatgggaatccatttgagattggtaaaggagagattcttgtcgagggaaaagagatagcttttcttggctatggcgaggtggtccagagatgcttgattgctcgatctcttttatccaactttggcattcaggcgacagttgcaaatgcgaggttttgcaagccgcttgacatcgacctaatcagaacgctgtgccagcagcatagttttcttatcacagtggaagaaggaacggttggtggctttggatcacatgtctcacagtttatttctctcgatggtctacttgacggtcgaacaaagtggcgacccattgtgctgccagacaggtacattgagcatgcatcgctcgcagagcaacttgacctggctggcctaactgctcatcacatagctgcaactgcattgaccctcctagggcgtcatcgtgatgcccttctgttgatgaagtaggggaaggaaccaccaagaagaatggaattggatagataaaaggcaatatgtgcaaaagttgattcggaggacgctcatcatgctgttttacgattgtgttgtctggatagaactgaagcgtgccgtgggaggtggccaaatgcacaaatcccaaagagggacgacaaagcctatagcaccatagattaatagtcacggtgtatatactaaaaagaatttacagagcaccgatgtaacgttgttactgtgcatgttaatactgaaattgtggtacgacgccaactaggagaatgagctggagctgacatgtttcagttaatgtaataaagctacttagttttgtatgtaccaattcattccttaatattggaattcataaccctagcgttcacctcattcggtcgtctctcagtagtttcagagttcagttcagttttcggtgtcgaaacttttagtttctgtcacacttttttatttcagttaggagcaaagggatgtgcagcgctttgaccacgaggtgtgggatgacacagccacctctcaatgtgtgcgtacttgtagggcgtcgatcaccactttgttttagccagtttggtt

SEQ ID NO: 82508 - DNA, 2870 bp, Zea Mays
aaaagatcaaaatctcgcgttcggatcagcctctctgtcatgtcgccaatacagcgcagcgctccgcatccacccaaatcggagtagggtcgtcagtacagcgcgacgccctgccagtagccgccgcaaccggccgccggtcccgcgcgaggggaggaggagatcactgcggcggcgtcttctgccggtttgaggattcggggcatcactgcagcagctggcgccaggctccagcatggacacggcgtttctgagtcctccgcttgcccgtaatctggtttatgacgagtttgccgttcttcaccccactagctacccttttcatactcttcggtatttgagatgcaatccaatgtattcgagaccgctgctaacaatagcaccagcctcaccatcaaggggcttgattcagagagtggccgcactacctgatgttgatgatttcttctgggagaaggatcctactccaatacttgacacaattgatgcacccattcatttgaaaaatctatctagagctcaagcagttagccgatgaagttcgttcagaaatagctttcataatgtccagaaaatgccaaccgtgtggtgctgatcgctcagttgtggagctgacaattgctatacattatgtgttcaatgccccaatggataagatactatgggatgctggtcaacatgtaagacatctctctgttactgttgttttgtttttctcagatctgttatctgcaacccttttccgctcaatagttttcttgcaacaggcatatgcgcacaagattctcacaggaaggcgctctctcttccatactattacacagaaaaatggcctttctgggttcacgtcgcgttttgagagcgagtatgatccctttggtgctggacatggatgcaatagtctatccgctggccttgggatggcggttgcaagggatataaatgggagaaaaaatcgaatagtgacagttataagtaattggacaaccatggctggccaggtgtacgaggcaatgggtcatgctggcttcctcgattccaacatggtggttattctaaatgatagctgtcataccttgcttcctaaagcagatggcggggcaaagatgtcagtcaatgccttttctagtgctctaagcaagattcaatccagcaaaggatttaggaggtttagagaggctgctaagggacttgccaaatggtttggcaaaggaatgcacgaatttgctgccaaagttgatgagtatgctcgtgggccttcaaactcaagccctgatcttctaaagtttttaggaactggactttctaggacatataatgactgctttgtagaagcactaacagcagaagcagagaatgacaagcgcattgtggtagttcatggcggcatgggaatcgatcgatcactccgcttattccagtccaggttcccagacagattttttgacttgggcatcgctgagcaacatgctgttaccttttctgctggtttggcatgcggaggtctaaagcctttctgcataattccatccacatttcttcagcgagcatatgatcagataattgaagatgtggacatgcaaaagataccagttcgatttgctatcacaaatgctggtctggtaggatctgagggtccaactaattcaggaccatttgatattacattcatgtcatgcttgccaaacatgattgtcatgtcaccatctaatgaggatgaacttattgacatggtggcaacagctgcaatgattgaggacagacctatttgcttccgctatcctaggggtgccattgttgggactagtggaagtgtaacatatgggaatccatttgagattggtaaaggagagattcttgtcgagggaaaagagatagcttttcttggctatggcgaggtggtccagagatgcttgattgctcgatctcttttatccaactttggcattcaggcgacagttgcaaatgcgaggttttgcaagccgcttgacatcgacctaatcagaacgctgtgccagcagcatagttttcttatcacagtggaagaaggaacggttggtggctttggatcacatgtctcacagtttatttctctcgatggtctacttgacggtcgaacaaagtggcgacccattgtgctgccagacaggtacattgagcatgcatcgctcgcagagcaacttgacctggctggcctaactgctcatcacatagctgcaactgcattgaccctcctagggcgtcatcgtgatgcccttctgttgatgaagtaggggaaggaaccaccaagaagaatggaattggatagataaaaggcaatatgtgcaaaagttgattcggaggacgctcatcatgctgttttacgattgtgttgtctggatagaactgaagcgtgccgtgggaggtggccaaatgcacaaatcccaaagagggacgacaaagcctatagcaccatagattaatagtcacggtgtatatactaaaaagaatttacagagcaccgatgtaacgttgttactgtgcatgttaatactgaaattgtggtacgacgccaactaggagaatgagctggagctgacatgtttcagttaatgtaataaagctacttagttttgtatgtaccaattcattccttaatattggaattcataaccctagcgttcacctcattcggtcgtctctcagtagtttcagagttcagttcagttttcggtgtcgaaacttttagtttctgtcacacttttttatttcagttaggagcaaagggatgtgcagcgctttgaccacgaggtgtgggatgacacagccacctctcaatgtgtgcgtacttgtagggcgtcgatcaccactttgttttagccagtttggtt

SEQ ID NO: 82509 - DNA, 2977 bp, Zea Mays
cgaaagcaaactctatgctatattaggacacagaaaagatcaaaatctcgcgttcggatcagcctctctgtcatgtcgccaatacagcgcagcgctccgcatccacccaaatcggagtagggtcgtcagtacagcgcgacgccctgccagtagccgccgcaaccggccgccggtcccgcgcgaggggaggaggagatcactgcggcggcgtcttctgccggtttgaggattcggggcatcactgcagcagctggcgccaggctccagcatggacacggcgtttctgagtcctccgcttgcccgtaatctggtttatgacgagtttgccgttcttcaccccactagctacccttttcatactcttcggtatttgagatgcaatccaatgtattcgagaccgctgctaacaatagcaccagcctcaccatcaaggggcttgattcagagagtggccgcactacctgatgttgatgatttcttctgggagaaggatcctactccaatacttgacacaattgatgcacccattcatttgaaaaatctatctagtaaggagctcaagcagttagccgatgaagttcgttcagaaatagctttcataatgtccagaaaatgccaaccgtgtggtgctgatcgctcagttgtggagctgacaattgctatacattatgtgttcaatgccccaatggataagatactatgggatgctggtcaacataaaaatggcctttctgggttcacgtcgcgttttgagagcgagtatgatccctttggtgctggacatggatgcaatagtctatccgctggccttgggatggcggttgcaagggatataaatgggagaaaaaatcgaatagtgacagttataagtaattggacaaccatggctggccaggtgtacgaggcaatgggtcatgctggcttcctcgattccaacatggtggttattctaaatgatagctgtcataccttgcttcctaaagcagatggcggggcaaagatgtcagtcaatgccttttctagtgctctaagcaagattcaatccagcaaaggatttaggaggtttagagaggctgctaagggacttgccaaatggtttggcaaaggaatgcacgaatttgctgccaaagttgatgagtatgctcgtggtatgataggtcctcatggtgcaactctttttgaagaacttggattatattatattggtcctattgatggacgtaacattgatgatctcatctgtgtacttaaggaagttgcgagcttagattcaactggcccagtacttgtacatgtaattactgggactgaaaatgacactggtggaattattggaagtgaaataaatgcagttgaggaagggccttcaaactcaagccctgatcttctaaagtttttaggaactggactttctaggacatataatgactgctttgtagaagcactaacagcagaagcagagaatgacaagcgcattgtggtagttcatggcggcatgggaatcgatcgatcactccgcttattccagtccaggttcccagacagattttttgacttgggcatcgctgagcaacatgctgttaccttttctgctggtttggcatgcggaggtctaaagcctttctgcataattccatccacatttcttcagcgagcatatgatcagataattgaagatgtggacatgcaaaagataccagttcgatttgctatcacaaatgctggtctggtaggatctgagggtccaactaattcaggaccatttgatattacattcatgtcatgcttgccaaacatgattgtcatgtcaccatctaatgaggatgaacttattgacatggtggcaacagctgcaatgattgaggacagacctatttgcttccgctatcctaggggtgccattgttgggactagtggaagtgtaacatatgggaatccatttgagattggtaaaggagagattcttgtcgagggaaaagagatagcttttcttggctatggcgaggtggtccagagatgcttgattgctcgatctcttttatccaactttggcattcaggcgacagttgcaaatgcgaggttttgcaagccgcttgacatcgacctaatcagaacgctgtgccagcagcatagttttcttatcacagtggaagaaggaacggttggtggctttggatcacatgtctcacagtttatttctctcgatggtctacttgacggtcgaacaaagtggcgacccattgtgctgccagacaggtacattgagcatgcatcgctcgcagagcaacttgacctggctggcctaactgctcatcacatagctgcaactgcattgaccctcctagggcgtcatcgtgatgcccttctgttgatgaagtaggggaaggaaccaccaagaagaatggaattggatagataaaaggcaatatgtgcaaaagttgattcggaggacgctcatcatgctgttttacgattgtgttgtctggatagaactgaagcgtgccgtgggaggtggccaaatgcacaaatcccaaagagggacgacaaagcctatagcaccatagattaatagtcacggtgtatatactaaaaagaatttacagagcaccgatgtaacgttgttactgtgcatgttaatactgaaattgtggtacgacgccaactaggagaatgagctggagctgacatgtttcagttaatgtaataaagctacttagttttgtatgtaccaattcattccttaatattggaattcataaccctagcgttcacctcattcggtcgtctctcagtagtttcagagttcagttcagttttcggtgtcgaaacttttagtttctgtcacacttttttatttcagttaggagcaaagggatgtgcagcgctttgaccacgaggtgtgggatgacacagccacctctcaatgtgtgcgtacttgtagggcgtcgatcaccactttgttttagccagtttggtt

SEQ ID NO: 82510 - DNA, 2885 bp, Zea Mays
gtaataatagccgcagtttcgcagattagcccccactcagggaaaagtcgccgcaatttgactacagttggacgcactaacgaaagcaaactctatgctatattaggacacagaaaagatcaaaatctcgcgttcggatcagcctctctgtcatgtcgccaatacagcgcagcgctccgcatccacccaaatcggagtagggtcgtcagtacagcgcgacgccctgccagtagccgccgcaaccggccgccggtcccgcgcgaggggaggaggagatcactgcggcggcgtcttctgccggtttgaggattcggggcatcactgcagcagctggcgccaggctccagcatggacacggcgtttctgagtcctccgcttgcccgtaatctggtttatgacgagtttgccgttcttcaccccactagctacccttttcatactcttcggtatttgagatgcaatccaatgtattcgagaccgctgctaacaatagcaccagcctcaccatcaaggggcttgattcagagagtggccgcactacctgatgttgatgatttcttctgggagaaggatcctactccaatacttgacacaattgatgcacccattcatttgaaaaatctatctagtaaggagctcaagcagttagccgatgaagttcgttcagaaatagctttcataatgtccagaaaatgccaaccgtgtggtgctgatcgctcagttgtggagctgacaattgctatacattatgtgttcaatgccccaatggataagatactatgggatgctggtcaacatgcatatgcgcacaagattctcacaggaaggcgctctctcttccatactattacacagaaaaatggcctttctgggttcacgtcgcgttttgagagcgagtatgatccctttggtgctggacatggatgcaatagtctatccgctggccttgggatggcggttgcaagggatataaatgggagaaaaaatcgaatagtgacagttataagtaattggacaaccatggctggccaggtgtacgaggcaatgggtcatgctggcttcctcgattccaacatggtggttattctaaatgatagctgtcataccttgcttcctaaagcagatggcggggcaaagatgtcagtcaatgccttttctagtgctctaagcaagattcaatccagcaaaggatttaggaggtttagagaggctgctaagggacttgccaaatggtttggcaaaggaatgcacgaatttgctgccaaagttgatgagtatgctcgtgttgcgagcttagattcaactggcccagtacttgtacatgtaattactgggactgaaaatgacactggtggaattattggaagtgaaataaatgcagttgaggaagggccttcaaactcaagccctgatcttctaaagtttttaggaactggactttctaggacatataatgactgctttgtagaagcactaacagcagaagcagagaatgacaagcgcattgtggtagttcatggcggcatgggaatcgatcgatcactccgcttattccagtccaggttcccagacagattttttgacttgggcatcgctgagcaacatgctgttaccttttctgctggtttggcatgcggaggtctaaagcctttctgcataattccatccacatttcttcagcgagcatatgatcagataattgaagatgtggacatgcaaaagataccagttcgatttgctatcacaaatgctggtctgctgcaatgattgaggacagacctatttgcttccgctatcctaggggtgccattgttgggactagtggaagtgtaacatatgggaatccatttgagattggtaaaggagagattcttgtcgagggaaaagagatagcttttcttggctatggcgaggtggtccagagatgcttgattgctcgatctcttttatccaactttggcattcaggcgacagttgcaaatgcgaggttttgcaagccgcttgacatcgacctaatcagaacgctgtgccagcagcatagttttcttatcacagtggaagaaggaacggttggtggctttggatcacatgtctcacagtttatttctctcgatggtctacttgacggtcgaacaaagtggcgacccattgtgctgccagacaggtacattgagcatgcatcgctcgcagagcaacttgacctggctggcctaactgctcatcacatagctgcaactgcattgaccctcctagggcgtcatcgtgatgcccttctgttgatgaagtaggggaaggaaccaccaagaagaatggaattggatagataaaaggcaatatgtgcaaaagttgattcggaggacgctcatcatgctgttttacgattgtgttgtctggatagaactgaagcgtgccgtgggaggtggccaaatgcacaaatcccaaagagggacgacaaagcctatagcaccatagattaatagtcacggtgtatatactaaaaagaatttacagagcaccgatgtaacgttgttactgtgcatgttaatactgaaattgtggtacgacgccaactaggagaatgagctggagctgacatgtttcagttaatgtaataaagctacttagttttgtatgtaccaattcattccttaatattggaattcataaccctagcgttcacctcattcggtcgtctctcagtagtttcagagttcagttcagttttcggtgtcgaaacttttagtttctgtcacacttttttatttcagttaggagcaaagggatgtgcagcgctttgaccacgaggtgtgggatgacacagccacctctcaatgtgtgcgtacttgtagggcgtcgatcaccactttgttttagccagtttggtt

SEQ ID NO: 82511 - DNA, 2923 bp, Zea Mays
gtaataatagccgcagtttcgcagattagcccccactcagggaaaagtcgccgcaatttgactacagttggacgcactaacgaaagcaaactctatgctatattaggacacagaaaagatcaaaatctcgcgttcggatcagcctctctgtcatgtcgccaatacagcgcagcgctccgcatccacccaaatcggagtagggtcgtcagtacagcgcgacgccctgccagtagccgccgcaaccggccgccggtcccgcgcgaggggaggaggagatcactgcggcggcgtcttctgccggtttgaggattcggggcatcactgcagcagctggcgccaggctccagcatggacacggcgtttctgagtcctccgcttgcccgtaatctggtttatgacgagtttgccgttcttcaccccactagctacccttttcatactcttcggtatttgagatgcaatccaatgtattcgagaccgctgctaacaatagcaccagcctcaccatcaaggggcttgattcagagagtggccgcactacctgatgttgatgatttcttctgggagaaggatcctactccaatacttgacacaattgatgcacccattcatttgaaaaatctatctagtaaggagctcaagcagttagccgatgaagttcgttcagaaatagctttcataatgtccagaaaatgccaaccgtgtggtgctgatcgctcagttgtggagctgacaattgctatacattatgtgttcaatgccccaatggataagatactatgggatgctggtcaacatgcatatgcgcacaagattctcacaggaaggcgctctctcttccatactattacacagaaaaatggcctttctgggttcacgtcgcgttttgagagcgagtatgatccctttggtgctggacatggatgcaatagtctatccgctggccttgtttttgagttacttcttatcagggatggcggttgcaagggatataaatgggagaaaaaatcgaatagtgacagttataagtaattggacaaccatggctggccaggtgtacgaggcaatgggtcatgctggcttcctcgattccaacatggtggttattctaaatgatagctgtcataccttgcttcctaaagcagatggcggggcaaagatgtcagtcaatgccttttctagtgctctaagcaagattcaatccagcaaaggatttaggaggtttagagaggctgctaagggacttgccaaatggtttggcaaaggaatgcacgaatttgctgccaaagttgatgagtatgctcgtgggccttcaaactcaagccctgatcttctaaagtttttaggaactggactttctaggacatataatgactgctttgtagaagcactaacagcagaagcagagaatgacaagcgcattgtggtagttcatggcggcatgggaatcgatcgatcactccgcttattccagtccaggttcccagacagattttttgacttgggcatcgctgagcaacatgctgttaccttttctgctggtttggcatgcggaggtctaaagcctttctgcataattccatccacatttcttcagcgagcatatgatcagataattgaagatgtggacatgcaaaagataccagttcgatttgctatcacaaatgctggtctggtaggatctgagggtccaactaattcaggaccatttgatattacattcatgtcatgcttgccaaacatgattgtcatgtcaccatctaatgaggatgaacttattgacatggtggcaacagctgcaatgattgaggacagacctatttgcttccgctatcctaggggtgccattgttgggactagtggaagtgtaacatatgggaatccatttgagattggtaaaggagagattcttgtcgagggaaaagagatagcttttcttggctatggcgaggtggtccagagatgcttgattgctcgatctcttttatccaactttggcattcaggcgacagttgcaaatgcgaggttttgcaagccgcttgacatcgacctaatcagaacgctgtgccagcagcatagttttcttatcacagtggaagaaggaacggttggtggctttggatcacatgtctcacagtttatttctctcgatggtctacttgacggtcgaacaaagtggcgacccattgtgctgccagacaggtacattgagcatgcatcgctcgcagagcaacttgacctggctggcctaactgctcatcacatagctgcaactgcattgaccctcctagggcgtcatcgtgatgcccttctgttgatgaagtaggggaaggaaccaccaagaagaatggaattggatagataaaaggcaatatgtgcaaaagttgattcggaggacgctcatcatgctgttttacgattgtgttgtctggatagaactgaagcgtgccgtgggaggtggccaaatgcacaaatcccaaagagggacgacaaagcctatagcaccatagattaatagtcacggtgtatatactaaaaagaatttacagagcaccgatgtaacgttgttactgtgcatgttaatactgaaattgtggtacgacgccaactaggagaatgagctggagctgacatgtttcagttaatgtaataaagctacttagttttgtatgtaccaattcattccttaatattggaattcataaccctagcgttcacctcattcggtcgtctctcagtagtttcagagttcagttcagttttcggtgtcgaaacttttagtttctgtcacacttttttatttcagttaggagcaaagggatgtgcagcgctttgaccacgaggtgtgggatgacacagccacctctcaatgtgtgcgtacttgtagggcgtcgatcaccactttgttttagccagtttggtt

SEQ ID NO: 82512 - DNA, 3010 bp, Zea Mays
gtaataatagccgcagtttcgcagattagcccccactcagggaaaagtcgccgcaatttgactacagttggacgcactaacgaaagcaaactctatgctatattaggacacagaaaagatcaaaatctcgcgttcggatcagcctctctgtcatgtcgccaatacagcgcagcgctccgcatccacccaaatcggagtagggtcgtcagtacagcgcgacgccctgccagtagccgccgcaaccggccgccggtcccgcgcgaggggaggaggagatcactgcggcggcgtcttctgccggtttgaggattcggggcatcactgcagcagctggcgccaggctccagcatggacacggcgtttctgagtcctccgcttgcccgtaatctggtttatgacgagtttgccgttcttcaccccactagctacccttttcatactcttcggtatttgagatgcaatccaatgtattcgagaccgctgctaacaatagcaccagcctcaccatcaaggggcttgattcagagagtggccgcactacctgatgttgatgatttcttctgggagaaggatcctactccaatacttgacacaattgatgcacccattcatttgaaaaatctatctagtaaggagctcaagcagttagccgatgaagttcgttcagaaatagctttcataatgtccagaaaatgccaaccgtgtggtgctgatcgctcagttgtggagctgacaattgctatacattatgtgttcaatgccccaatggataagatactatgggatgctggtcaacatgcatatgcgcacaagattctcacaggaaggcgctctctcttccatactattacacagaaaaatggcctttctgggttcacgtcgcgttttgagagcgagtatgatccctttggtgctggacatggatgcaatagtctatccgctggccttgggatggcggttgcaagggatataaatgggagaaaaaatcgaatagtgacagttataagtaattggacaaccatggctggccaggtgtacgaggcaatgggtcatgctggcttcctcgattccaacatggtggttattctaaatgatagctgtcataccttgcttcctaaagcagatggcggggcaaagatgtcagtcaatgccttttctagtgctctaagcaagattcaatccagcaaaggatttaggaggtttagagaggctgctaagggacttgccaaatggtttggcaaaggaatgcacgaatttgctgccaaagttgatgagtatgctcgtggaagttgcgagcttagattcaactggcccagtacttgtacatgtaattactgggactgaaaatgacactggtggaattattggaagtgaaataaatgcagttgaggaagggccttcaaactcaagccctgatcttctaaagtttttaggaactggactttctaggacatataatgactgctttgtagaagcactaacagcagaagcagagaatgacaagcgcattgtggtagttcatggcggcatgggaatcgatcgatcactccgcttattccagtccaggttcccagacagattttttgacttgggcatcgctgagcaacatgctgttaccttttctgctggtttggcatgcggaggtctaaagcctttctgcataattccatccacatttcttcagcgagcatatgatcagataattgaagatgtggacatgcaaaagataccagttcgatttgctatcacaaatgctggtctggtaggatctgagggtccaactaattcaggaccatttgatattacattcatgtcatgcttgccaaacatgattgtcatgtcaccatctaatgaggatgaacttattgacatggtggcaacagctgcaatgattgaggacagacctatttgcttccgctatcctaggggtgccattgttgggactagtggaagtgtaacatatgggaatccatttgagattggtaaaggagagattcttgtcgagggaaaagagatagcttttcttggctatggcgaggtggtccagagatgcttgattgctcgatctcttttatccaactttggcattcaggcgacagttgcaaatgcgaggttttgcaagccgcttgacatcgacctaatcagaacgctgtgccagcagcatagttttcttatcacagtggaagaaggaacggttggtggctttggatcacatgtctcacagtttatttctctcgatggtctacttgacggtcgaacaaagtggcgacccattgtgctgccagacaggtacattgagcatgcatcgctcgcagagcaacttgacctggctggcctaactgctcatcacatagctgcaactgcattgaccctcctagggcgtcatcgtgatgcccttctgttgatgaagtaggggaaggaaccaccaagaagaatggaattggatagataaaaggcaatatgtgcaaaagttgattcggaggacgctcatcatgctgttttacgattgtgttgtctggatagaactgaagcgtgccgtgggaggtggccaaatgcacaaatcccaaagagggacgacaaagcctatagcaccatagattaatagtcacggtgtatatactaaaaagaatttacagagcaccgatgtaacgttgttactgtgcatgttaatactgaaattgtggtacgacgccaactaggagaatgagctggagctgacatgtttcagttaatgtaataaagctacttagttttgtatgtaccaattcattccttaatattggaattcataaccctagcgttcacctcattcggtcgtctctcagtagtttcagagttcagttcagttttcggtgtcgaaacttttagtttctgtcacacttttttatttcagttaggagcaaagggatgtgcagcgctttgaccacgaggtgtgggatgacacagccacctctcaatgtgtgcgtacttgtagggcgtcgatcaccactttgttttagccagtttggtt

SEQ ID NO: 82513 - DNA, 1546 bp, Zea Mays
ctcgcgttcggatcagcctctctgtcatgtcgccaatacagcgcagcgctccgcatccacccaaatcggagtagggtcgtcagtacagcgcgacgccctgccagtagccgccgcaaccggccgccggtcccgcgcgaggggaggaggagatcactgcggcggcgtcttctgccggtttgaggattcggggcatcactgcagcagctggcgccaggctccagcatggacacggcgtttctgagtcctccgcttgcccgtaatctggtttatgacgagtttgccgttcttcaccccactagctacccttttcatactcttcggtatttgagatgcaatccaatgtattcgagaccgctgctaacaatagcaccagcctcaccatcaaggggcttgattcagagagtggccgcactacctgatgttgatgatttcttctgggagaaggatcctactccaatacttgacacaattgatgcacccattcatttgaaaaatctatctagagctcaagcagttagccgatgaagttcgttcagaaatagctttcataatgtccagaaaatgccaaccgtgtggtgctgatcgctcagttgtggagctgacaattgctatacattatgtgttcaatgccccaatggataagatactatgggatgctggtcaacataaaaatggcctttctgggttcacgtcgcgttttgagagcgagtatgatccctttggtgctggacatggatgcaatagtctatccgctggccttgggatggcggttgcaagggatataaatgggagaaaaaatcgaatagtgacagttataagtaattggacaaccatggctggccaggtgtacgaggcaatgggtcatgctggcttcctcgattccaacatggtggttattctaaatgatagctgtcataccttgcttcctaaagcagatggcggggcaaagatgtcagtcaatgccttttctagtgctctaagcaagattcaatccagcaaaggatttaggaggtttagagaggctgctaagggacttgccaaatggtttggcaaaggaatgcacgaatttgctgccaaagttgatgagtatgctcgtggtatgataggtcctcatggtgcaactctttttgaagaacttggattatattatattggtcctattgatggacgtaacattgatgatctcatctgtgtacttaaggaagttgcgagcttagattcaactggcccagtacttgtacatgtaattactgggactgaaaatgacactggtggaattattggaagtgaaataaatgcagttgaggaaggtttgtaatgtagattgctatcaaaatttgcatggtgttttacttttcttttgctgaactaggactctaggaggcatgcctagtgttttttttttttttgctctcttgctctgttacctctgcactggggttcctcatctaggggaggaagaaccatggcaatatgactacatgagggagtgtcagtgctcatggcaaacaaacttctttaaaaatatgtatatgtcattattagc

SEQ ID NO: 82514 - DNA, 3040 bp, Zea Mays
ataaattagagaaacaatccggccaggaaccgttccaggccttcaatccgtgaaaaacgaacaggccctgatcgatcgttcgacggaacttctgcacccccttccttttcgcagtccgggcgtcgtctccatcgatcgcatctttactaactattaagagcctattgtagaccgcccccgcctcctacgcccgcccgcaagcccgcaaatcacgccgcgaaccgccgcagactgaccccgactccctacgcccgcccccaatccagccgcaatccaccctgcgaatgcggcgaccgtcgcgttccggccggccgcccgtccgcccgccgctatggcactatccactaaccagacacagcgtccagccaagcttttgccgccgcccacttctctcccacctcccctccactcttttgcttgtcgcggggttagaatcccatggcgctatcggccgagatccgcttcggccaccagatcccctatcccactacgacactgactcctacgaggaggaggaagaagaggaagaggaagacgaggaggagttcgagggggtggagggcggaggagatggatgaggtgacggtttcgtctccgctgatgctgccggcaacggaggccaggggaggggtgtccgtggtcgagatggtgatgggggcgcttcggaggtcgctcatgttgtgcagcagcagcgccggcgccggcgccggcgtgcgcgagccggagcaggaggaggacggggtgactcccccgggtggtatgcaaataggggggccaacggatgtgcggcacgtctcacacgtcaccttcgaccgcttcattggcttcctcgacctccccgctgacctcgagcccgacgtgcctcgccccgtgccgagcgcaaggatacgcgggaagaaagccaaggtcaatttccgggatgaagcggcggcagcaggtgctcagaagccagccgcaaccgcaactactccaactgcttgtgccagcgcagcgaggctaggtcctccaccgccgaagttccgtgctgacgaggttttcgggaacatgaacggtggcagcaacgatctgttcgcgattatgttcgcgttcagtgacagtagtagtcaggtcgttcgtgtggagccaggtgagggcgccgccggtttcctccccgcagtggaagtgttggacgacgagcctctgttgcccggcagtaagaggtctgcggctaacatgctgctgctctccggccagagcagcgactcgtatggctcttgtgacttggggtgggactgggacgatgacaccatgacctcagactacgcctcagtctttgctcctgctgctcccagtaacgttgtgccagcatggtacacgcaaggtggaccggcgtcgaagagaacgaggagcagctatggctacggtgtggcgatgctccagcagggagatggcgcgcaggccatgccgggcggctttgaccctgagacgaactaccagtaccagctgttgccttacgtcgtcgagagcagcccgtcggacggcgcgtcgacgcacgacatggactgccttcaaatgatgcgagctggtgatgttccacaggatggggcgagcagtggtggtggtggtggtggcggcggcgatatctggagccttgacgagctgctcatggccgctggcgcttactgagaaaagctatgtgcatcgcatgtactagacggttacttgttgtgccgtgaatggagtgtttctcagtttcgttttgcttttaaatttttttattattccaggtctcctgcttgtggtgatgatgcaggagagccatggtgggtgaaagcatacctcgatcgcaagtcactggcaaattctctgaacgacataaagaccgtagttatgcaacttcacgacctcatcagtgttatagacttatagtcatcattgttacactactatttatgggcattgcgacaaccaagattcttgttgtcatctcgtcccagcttctggttgcgggattcatatttgggaatgcatgcaagactgtatttgaggcccttatatttgtattcatcatgcatccatttgaggttgctaaccgctgtgttatcgacgaaacacagatgatcgtcgaggaaattaatatattaaccactgttctcttcaagaatgacaaccagtttaggcagctttgaggtccaaaattaaagggtacctggagagcaaaccaacgcattggcaccctacccacactgtaaatctcaaggacatcttggatgtgaacaagattaacatgtctctctcagtccagcacaccatgaactttcaaaacatccgggagaagaacatcaggaggtctgagctcgttatggagttgaagaaaatattcgaggagatgtccattcggtaccaccttctaccccagaaagttgaactcacctacgtcgactcgaacccactgcccatgggtccttctcatacaagatagaagatgggtgaagacttttaagtctcatactgacaacttgatccgtttcatgggatctgacaactgatggctagctgtgcagtctgttctgaagttactaaaactctgcatagtagatattagctcgtagaataatttgtcagataatgcatttgtaagcggtgatggtactggtgatcaatgctttgggattggccattacaccatttgattatctacaccgtttggtgcatcacaatcgaaaatgttgcgaaatagccactactaaagaaattcagctgggagattgaagtgggcctgtcgaaatgttattcttcacaatagtaccatgtaattcagctgtgagactggtagtcactcttgtgcatattttttgttggcaaaaatctacttcatgtccggtgttcaagaggttcctgagcttcaagaagaagcatagggggagggaggtcactgtaatcgactgcatgtcgccgcccgtgccctggccagccgacgacgccagcggcaggtggcagcctgctagctggtgggtcgggcaaacacatgatgggcttctctgatgttgcctctgatgat

SEQ ID NO: 82515 - DNA, 3160 bp, Zea Mays
ataaattagagaaacaatccggccaggaaccgttccaggccttcaatccgtgaaaaacgaacaggccctgatcgatcgttcgacggaacttctgcacccccttccttttcgcagtccgggcgtcgtctccatcgatcgcatctttactaactattaagagcctattgtagaccgcccccgcctcctacgcccgcccgcaagcccgcaaatcacgccgcgaaccgccgcagactgaccccgactccctacgcccgcccccaatccagccgcaatccaccctgcgaatgcggcgaccgtcgcgttccggccggccgcccgtccgcccgccgctatggcactatccactaaccagacacagcgtccagccaagcttttgccgccgcccacttctctcccacctcccctccactcttttgcttgtcgcggggttagaatcccatggcgctatcggccgagatccgcttcggccaccagatcccctatcccactacgacactgactcctacgaggaggaggaagaagaggaagaggaagacgaggaggagttcgagggggtggagggcggaggagatggatgaggtgacggtttcgtctccgctgatgctgccggcaacggaggccaggggaggggtgtccgtggtcgagatggtgatgggggcgcttcggaggtcgctcatgttgtgcagcagcagcgccggcgccggcgccggcgtgcgcgagccggagcaggaggaggacggggtgactcccccgggtggtatgcaaataggggggccaacggatgtgcggcacgtctcacacgtcaccttcgaccgcttcattggcttcctcgacctccccgctgacctcgagcccgacgtgcctcgccccgtgccgagcgcaaggatacgcgggaagaaagccaaggtcaatttccgggatgaagcggcggcagcaggtgctcagaagccagccgcaaccgcaactactccaactgcttgtgccagcgcagcgaggctaggtcctccaccgccgaagttccgtgctgacgaggttttcgggaacatgaacggtggcagcaacgatctgttcgcgattatgttcgcgttcagtgacagtagtagtcaggtcgttcgtgtggagccaggtgagggcgccgccggtttcctccccgcagtggaagtgttggacgacgagcctctgttgcccggcagtaagaggtctgcggctaacatgctgctgctctccggccagagcagcgactcgtatggctcttgtgacttggggtgggactgggacgatgacaccatgacctcagactacgcctcagtctttgctcctgctgctcccagtaacgttgtgccagcatggtacacgcaaggtggaccggcgtcgaagagaacgaggagcagctatggctacggtgtggcgatgctccagcagggagatggcgcgcaggccatgccgggcggctttgaccctgagacgaactaccagtaccagctgttgccttacgtcgtcgagagcagcccgtcggacggcgcgtcgacgcacgacatggactgccttcaaatgatgcgagctggtgatgttccacaggatggggcgagcagtggtggtggtggtggtggcggcggcgatatctggagccttgacgagctgctcatggccgctggcgcttactgagaaaagctatgtgcatcgcatgtactagacggttacttgttgtgccgtgaatggagtgtttctcagtttcgttttgcttttaaatttttttattattccaggtctcctgcttgtggtgatgatgcaggagagccatggtgggtgaaagcatacctcgatcgcaagtcactggcaaattctctgaacgacataaagaccgtagttatgcaacttcacgacctcatcagtgttatagacttatagtcatcattgttacactactatttatgggcattgcgacaaccaagattcttgttgtcatctcgtcccagcttctggttgcgggattcatatttgggaatgcatgcaagactgtatttgaggcccttatatttgtattcatcatgcatccatttgaggttgctaaccgctgtgttatcgacgaaacacagatgatcgtcgaggaaattaatatattaaccactgttctcttcaagaatgacaaccagtttaggcagctttgaggtccaaaattaaaggaatatttacaagaaaggggagcgggggagagagaatacaattcaaatatgtccacaaaactggaagctggagagggagaggcagaaggaggagagggagactgaataatattacaaagaggtacctggagagcaaaccaacgcattggcaccctacccacactgtaaatctcaaggacatcttggatgtgaacaagattaacatgtctctctcagtccagcacaccatgaactttcaaaacatccgggagaagaacatcaggaggtctgagctcgttatggagttgaagaaaatattcgaggagatgtccattcggtaccaccttctaccccagaaagttgaactcacctacgtcgactcgaacccactgcccatgggtccttctcatacaagatagaagatgggtgaagacttttaagtctcatactgacaacttgatccgtttcatgggatctgacaactgatggctagctgtgcagtctgttctgaagttactaaaactctgcatagtagatattagctcgtagaataatttgtcagataatgcatttgtaagcggtgatggtactggtgatcaatgctttgggattggccattacaccatttgattatctacaccgtttggtgcatcacaatcgaaaatgttgcgaaatagccactactaaagaaattcagctgggagattgaagtgggcctgtcgaaatgttattcttcacaatagtaccatgtaattcagctgtgagactggtagtcactcttgtgcatattttttgttggcaaaaatctacttcatgtccggtgttcaagaggttcctgagcttcaagaagaagcatagggggagggaggtcactgtaatcgactgcatgtcgccgcccgtgccctggccagccgacgacgccagcggcaggtggcagcctgctagctggtgggtcgggcaaacacatgatgggcttctctgatgttgcctctgatgat

SEQ ID NO: 82516 - DNA, 2977 bp, Zea Mays
aggattcattccaacttatcaaaacttatataaattagagaaacaatccggccaggaaccgttccaggccttcaatccgtgaaaaacgaacaggccctgatcgatcgttcgacggaacttctgcacccccttccttttcgcagtccgggcgtcgtctccatcgatcgcatctttactaactattaagagcctattgtagaccgcccccgcctcctacgcccgcccgcaagcccgcaaatcacgccgcgaaccgccgcagactgaccccgactccctacgcccgcccccaatccagccgcaatccaccctgcgaatgcggcgaccgtcgcgttccggccggccgcccgtccgcccgccgctatggcactatccactaaccagacacagcgtccagccaagcttttgccgccgcccacttctctcccacctcccctccactcttttgcttgtcgcggggttagaatcccatggcgctatcggccgagatccgcttcggccaccagatcccctatcccactacgacactgactcctacgaggaggaggaagaagaggaagaggaagacgaggaggagttcgagggggtggagggcggaggagatggatgaggtgacggtttcgtctccgctgatgctgccggcaacggaggccaggggaggggtgtccgtggtcgagatggtgatgggggcgcttcggaggtcgctcatgttgtgcagcagcagcgccggcgccggcgccggcgtgcgcgagccggagcaggaggaggacggggtgactcccccgggtggtatgcaaataggggggccaacggatgtgcggcacgtctcacacgtcaccttcgaccgcttcattggcttcctcgacctccccgctgacctcgagcccgacgtgcctcgccccgtgccgagcgcaaggatacgcgggaagaaagccaaggtcaatttccgggatgaagcggcggcagcaggtgctcagaagccagccgcaaccgcaactactccaactgcttgtgccagcgcagcgaggctaggtcctccaccgccgaagttccgtgctgacgaggttttcgggaacatgaacggtggcagcaacgatctgttcgcgattatgttcgcgttcagtgacagtagtagtcaggtcgttcgtgtggagccaggtgagggcgccgccggtttcctccccgcagtggaagtgttggacgacgagcctctgttgcccggcagtaagaggtctgcggctaacatgctgctgctctccggccagagcagcgactcgtatggctcttgtgacttggggtgggactgggacgatgacaccatgacctcagactacgcctcagtctttgctcctgctgctcccagtaacgttgtgccagcatggtacacgcaaggtggaccggcgtcgaagagaacgaggagcagctatggctacggtgtggcgatgctccagcagggagatggcgcgcaggccatgccgggcggctttgaccctgagacgaactaccagtaccagctgttgccttacgtcgtcgagagcagcccgtcggacggcgcgtcgacgcacgacatggactgccttcaaatgatgcgagctggtgatgttccacaggatggggcgagcagtggtggtggtggtggtggcggcggcgatatctggagccttgacgagctgctcatggccgctggcgcttactgagaaaagctatgtgcatcgcatgtactagacggttacttgttgtgccgtgaatggagtgtttctcagtttcgttttgcttttaaatttttttattattccaggtctcctgcttgtggtgatgatgcaggagagccatggtgaaagcatacctcgatcgcaagtcactggcaaattctctgaacgacataaagaccgtagttatgcaacttcacgacctcatcagtgttatagacttatagtcatcattgttacactactatttatgggcattgcgacaaccaagattcttgttgtcatctcgtcccagcttctggttgcgggattcatatttgggaatgcatgcaagactgtatttgaggcccttatatttgtattcatcatgcatccatttgaggttgctaaccgctgtgttatcgacgaaacacaggtacctggagagcaaaccaacgcattggcaccctacccacactgtaaatctcaaggacatcttggatgtgaacaagattaacatgtctctctcagtccagcacaccatgaactttcaaaacatccgggagaagaacatcaggaggtctgagctcgttatggagttgaagaaaatattcgaggagatgtccattcggtaccaccttctaccccagaaagttgaactcacctacgtcgactcgaacccactgcccatgggtccttctcatacaagatagaagatgggtgaagacttttaagtctcatactgacaacttgatccgtttcatgggatctgacaactgatggctagctgtgcagtctgttctgaagttactaaaactctgcatagtagatattagctcgtagaataatttgtcagataatgcatttgtaagcggtgatggtactggtgatcaatgctttgggattggccattacaccatttgattatctacaccgtttggtgcatcacaatcgaaaatgttgcgaaatagccactactaaagaaattcagctgggagattgaagtgggcctgtcgaaatgttattcttcacaatagtaccatgtaattcagctgtgagactggtagtcactcttgtgcatattttttgttggcaaaaatctacttcatgtccggtgttcaagaggttcctgagcttcaagaagaagcatagggggagggaggtcactgtaatcgactgcatgtcgccgcccgtgccctggccagccgacgacgccagcggcaggtggcagcctgctagctggtgggtcgggcaaacacatgatgggcttctctgatgttgcctctgatgat

SEQ ID NO: 82517 - DNA, 2078 bp, Zea Mays
gtttgtccaggattaggccaggattcattccaacttatcaaaacttatataaattagagaaacaatccggccaggaaccgttccaggccttcaatccgtgaaaaacgaacaggccctgatcgatcgttcgacggaacttctgcacccccttccttttcgcagtccgggcgtcgtctccatcgatcgcatctttactaactattaagagcctattgtagaccgcccccgcctcctacgcccgcccgcaagcccgcaaatcacgccgcgaaccgccgcagactgaccccgactccctacgcccgcccccaatccagccgcaatccaccctgcgaatgcggcgaccgtcgcgttccggccggccgcccgtccgcccgccgctatggcactatccactaaccagacacagcgtccagccaagcttttgccgccgcccacttctctcccacctcccctccactcttttgcttgtcgcggggttagaatcccatggcgctatcggccgagatccgcttcggccaccagatcccctatcccactacgacactgactcctacgaggaggaggaagaagaggaagaggaagacgaggaggagttcgagggggtggagggcggaggagatggatgaggtgacggtttcgtctccgctgatgctgccggcaacggaggccaggggaggggtgtccgtggtcgagatggtgatgggggcgcttcggaggtcgctcatgttgtgcagcagcagcgccggcgccggcgccggcgtgcgcgagccggagcaggaggaggacggggtgactcccccgggtggtatgcaaataggggggccaacggatgtgcggcacgtctcacacgtcaccttcgaccgcttcattggcttcctcgacctccccgctgacctcgagcccgacgtgcctcgccccgtgccgagcgcaaggtgaaagcatacctcgatcgcaagtcactggcaaattctctgaacgacataaagaccgtagttatgcaacttcacgacctcatcagtgttatagacttatagtcatcattgttacactactatttatgggcattgcgacaaccaagattcttgttgtcatctcgtcccagcttctggttgcgggattcatatttgggaatgcatgcaagactgtatttgaggcccttatatttgtattcatcatgcatccatttgaggttgctaaccgctgtgttatcgacgaaacacaggtacctggagagcaaaccaacgcattggcaccctacccacactgtaaatctcaaggacatcttggatgtgaacaagattaacatgtctctctcagtccagcacaccatgaactttcaaaacatccgggagaagaacatcaggaggtctgagctcgttatggagttgaagaaaatattcgaggagatgtccattcggtaccaccttctaccccagaaagttgaactcacctacgtcgactcgaacccactgcccatgggtccttctcatacaagatagaagatgggtgaagacttttaagtctcatactgacaacttgatccgtttcatgggatctgacaactgatggctagctgtgcagtctgttctgaagttactaaaactctgcatagtagatattagctcgtagaataatttgtcagataatgcatttgtaagcggtgatggtactggtgatcaatgctttgggattggccattacaccatttgattatctacaccgtttggtgcatcacaatcgaaaatgttgcgaaatagccactactaaagaaattcagctgggagattgaagtgggcctgtcgaaatgttattcttcacaatagtaccatgtaattcagctgtgagactggtagtcactcttgtgcatattttttgttggcaaaaatctacttcatgtccggtgttcaagaggttcctgagcttcaagaagaagcatagggggagggaggtcactgtaatcgactgcatgtcgccgcccgtgccctggccagccgacgacgccagcggcaggtggcagcctgctagctggtgggtcgggcaaacacatgatgggcttctctgatgttgcctctgatgat

SEQ ID NO: 82518 - DNA, 3014 bp, Zea Mays
ctgagggcctgttcgtttgtccaggattaggccaggattcattccaacttatcaaaacttatataaattagagaaacaatccggccaggaaccgttccaggccttcaatccgtgaaaaacgaacaggccctgatcgatcgttcgacggaacttctgcacccccttccttttcgcagtccgggcgtcgtctccatcgatcgcatctttactaactattaagagcctattgtagaccgcccccgcctcctacgcccgcccgcaagcccgcaaatcacgccgcgaaccgccgcagactgaccccgactccctacgcccgcccccaatccagccgcaatccaccctgcgaatgcggcgaccgtcgcgttccggccggccgcccgtccgcccgccgctatggcactatccactaaccagacacagcgtccagccaagcttttgccgccgcccacttctctcccacctcccctccactcttttgcttgtcgcggggttagaatcccatggcgctatcggccgagatccgcttcggccaccagatcccctatcccactacgacactgactcctacgaggaggaggaagaagaggaagaggaagacgaggaggagttcgagggggtggagggcggaggagatggatgaggtgacggtttcgtctccgctgatgctgccggcaacggaggccaggggaggggtgtccgtggtcgagatggtgatgggggcgcttcggaggtcgctcatgttgtgcagcagcagcgccggcgccggcgccggcgtgcgcgagccggagcaggaggaggacggggtgactcccccgggtggtatgcaaataggggggccaacggatgtgcggcacgtctcacacgtcaccttcgaccgcttcattggcttcctcgacctccccgctgacctcgagcccgacgtgcctcgccccgtgccgagcgcaaggatacgcgggaagaaagccaaggtcaatttccgggatgaagcggcggcagcaggtgctcagaagccagccgcaaccgcaactactccaactgcttgtgccagcgcagcgaggctaggtcctccaccgccgaagttccgtgctgacgaggttttcgggaacatgaacggtggcagcaacgatctgttcgcgattatgttcgcgttcagtgacagtagtagtcaggtcgttcgtgtggagccaggtgagggcgccgccggtttcctccccgcagtggaagtgttggacgacgagcctctgttgcccggcagtaagaggtctgcggctaacatgctgctgctctccggccagagcagcgactcgtatggctcttgtgacttggggtgggactgggacgatgacaccatgacctcagactacgcctcagtctttgctcctgctgctcccagtaacgttgtgccagcatggtacacgcaaggtggaccggcgtcgaagagaacgaggagcagctatggctacggtgtggcgatgctccagcagggagatggcgcgcaggccatgccgggcggctttgaccctgagacgaactaccagtaccagctgttgccttacgtcgtcgagagcagcccgtcggacggcgcgtcgacgcacgacatggactgccttcaaatgatgcgagctggtgatgttccacaggatggggcgagcagtggtggtggtggtggtggcggcggcgatatctggagccttgacgagctgctcatggccgctggcgcttactgagaaaagctatgtgcatcgcatgtactagacggttacttgttgtgccgtgaatggagtgtttctcagtttcgttttgcttttaaatttttttattattccaggtctcctgcttgtggtgatgatgcaggagagccatggtgggtgaaagcatacctcgatcgcaagtcactggcaaattctctgaacgacataaagaccgtagttatgcaacttcacgacctcatcagtgttatagacttatagtcatcattgttacactactatttatgggcattgcgacaaccaagattcttgttgtcatctcgtcccagcttctggttgcgggattcatatttgggaatgcatgcaagactgtatttgaggcccttatatttgtattcatcatgcatccatttgaggttgctaaccgctgtgttatcgacgaaacacaggtacctggagagcaaaccaacgcattggcaccctacccacactgtaaatctcaaggacatcttggatgtgaacaagattaacatgtctctctcagtccagcacaccatgaactttcaaaacatccgggagaagaacatcaggaggtctgagctcgttatggagttgaagaaaatattcgaggagatgtccattcggtaccaccttctaccccagaaagttgaactcacctacgtcgactcgaacccactgcccatgggtccttctcatacaagatagaagatgggtgaagacttttaagtctcatactgacaacttgatccgtttcatgggatctgacaactgatggctagctgtgcagtctgttctgaagttactaaaactctgcatagtagatattagctcgtagaataatttgtcagataatgcatttgtaagcggtgatggtactggtgatcaatgctttgggattggccattacaccatttgattatctacaccgtttggtgcatcacaatcgaaaatgttgcgaaatagccactactaaagaaattcagctgggagattgaagtgggcctgtcgaaatgttattcttcacaatagtaccatgtaattcagctgtgagactggtagtcactcttgtgcatattttttgttggcaaaaatctacttcatgtccggtgttcaagaggttcctgagcttcaagaagaagcatagggggagggaggtcactgtaatcgactgcatgtcgccgcccgtgccctggccagccgacgacgccagcggcaggtggcagcctgctagctggtgggtcgggcaaacacatgatgggcttctctgatgttgcctctgatgat

SEQ ID NO: 82519 - DNA, 3688 bp, Zea Mays
gctggagtacttgtatgacagattcacagcagtctgagggcctgttcgtttgtccaggattaggccaggattcattccaacttatcaaaacttatataaattagagaaacaatccggccaggaaccgttccaggccttcaatccgtgaaaaacgaacaggccctgatcgatcgttcgacggaacttctgcacccccttccttttcgcagtccgggcgtcgtctccatcgatcgcatctttactaactattaagagcctattgtagaccgcccccgcctcctacgcccgcccgcaagcccgcaaatcacgccgcgaaccgccgcagactgaccccgactccctacgcccgcccccaatccagccgcaatccaccctgcgaatgcggcgaccgtcgcgttccggccggccgcccgtccgcccgccgctatggcactatccactaaccagacacagcgtccagccaagcttttgccgccgcccacttctctcccacctcccctccactcttttgcttgtcgcggggttagaatcccatggcgctatcggccgagatccgcttcggccaccagatcccctatcccactacgacactgactcctacgaggaggaggaagaagaggaagaggaagacgaggaggagttcgagggggtggagggcggaggagatggatgaggtgacggtttcgtctccgctgatgctgccggcaacggaggccaggggaggggtgtccgtggtcgagatggtgatgggggcgcttcggaggtcgctcatgttgtgcagcagcagcgccggcgccggcgccggcgtgcgcgagccggagcaggaggaggacggggtgactcccccgggtggtatgcaaataggggggccaacggatgtgcggcacgtctcacacgtcaccttcgaccgcttcattggcttcctcgacctccccgctgacctcgagcccgacgtgcctcgccccgtgccgagcgcaaggatacgcgggaagaaagccaaggtcaatttccgggatgaagcggcggcagcaggtgctcagaagccagccgcaaccgcaactactccaactgcttgtgccagcgcagcgaggctaggtcctccaccgccgaagttccgtgctgacgaggttttcgggaacatgaacggtggcagcaacgatctgttcgcgattatgttcgcgttcagtgacagtagtagtcaggtcgttcgtgtggagccaggtgagggcgccgccggtttcctccccgcagtggaagtgttggacgacgagcctctgttgcccggcagtaagaggtctgcggctaacatgctgctgctctccggccagagcagcgactcgtatggctcttgtgacttggggtgggactgggacgatgacaccatgacctcagactacgcctcagtctttgctcctgctgctcccagtaacgttgtgccagcatggtacacgcaaggtggaccggcgtcgaagagaacgaggagcagctatggctacggtgtggcgatgctccagcagggagatggcgcgcaggccatgccgggcggctttgaccctgagacgaactaccagtaccagctgttgccttacgtcgtcgagagcagcccgtcggacggcgcgtcgacgcacgacatggactgccttcaaatgatgcgagctggtgatgttccacaggatggggcgagcagtggtggtggtggtggtggcggcggcgatatctggagccttgacgagctgctcatggccgctggcgcttactgagaaaagctatgtgcatcgcatgtactagacggttacttgttgtgccgtgaatggagtgtttctcagtttcgttttgcttttaaatttttttattattccaggtctcctgcttgtggtgatgatgcaggagagccatggtgggtaggtactatgcttttgctgccagtggaactgtaagacaatgtttatatagtatctactatgttggtgcgtcgatggttggttggaggcgagtttgagactgattcagtaatttaccttgtgttctgatgcagtcataactatcggtattctgatatagtaatttaccttatatagtttgagactgtaagacaatgtttatatagtaatttaccttatatagtatctactattttaattttgtgttctgatgcagttataactatcggtattgagccttgtgtggagcagaaacttgtaacataatatgcataatttgaggattatatgatttctgtgtagttgcctttttacttctgtatttcgacatcattccattttttttgttgttgcaaatcatttgattccttgaaacagaaataaatacacaatacatgctaatgaaaatttggcaatacatgttttgctttgtaaattttgatgtagtcattgcaaatcatttggcatgtattggacgatatctgtttgcattcctgatcttctcaactaccaggtgaaagcatacctcgatcgcaagtcactggcaaattctctgaacgacataaagaccgtagttatgcaacttcacgacctcatcagtgttatagacttatagtcatcattgttacactactatttatgggcattgcgacaaccaagattcttgttgtcatctcgtcccagcttctggttgcgggattcatatttgggaatgcatgcaagactgtatttgaggcccttatatttgtattcatcatgcatccatttgaggttgctaaccgctgtgttatcgacgaaacacagatgatcgtcgaggaaattaatatattaaccactgttctcttcaagaatgacaaccagtttaggcagctttgaggtccaaaattaaagggtacctggagagcaaaccaacgcattggcaccctacccacactgtaaatctcaaggacatcttggatgtgaacaagattaacatgtctctctcagtccagcacaccatgaactttcaaaacatccgggagaagaacatcaggaggtctgagctcgttatggagttgaagaaaatattcgaggagatgtccattcggtaccaccttctaccccagaaagttgaactcacctacgtcgactcgaacccactgcccatgggtccttctcatacaagatagaagatgggtgaagacttttaagtctcatactgacaacttgatccgtttcatgggatctgacaactgatggctagctgtgcagtctgttctgaagttactaaaactctgcatagtagatattagctcgtagaataatttgtcagataatgcatttgtaagcggtgatggtactggtgatcaatgctttgggattggccattacaccatttgattatctacaccgtttggtgcatcacaatcgaaaatgttgcgaaatagccactactaaagaaattcagctgggagattgaagtgggcctgtcgaaatgttattcttcacaatagtaccatgtaattcagctgtgagactggtagtcactcttgtgcatattttttgttggcaaaaatctacttcatgtccggtgttcaagaggttcctgagcttcaagaagaagcatagggggagggaggtcactgtaatcgactgcatgtcgccgcccgtgccctggccagccgacgacgccagcggcaggtggcagcctgctagctggtgggtcgggcaaacacatgatgggcttctctgatgttgcctctgatgat

SEQ ID NO: 82520 - DNA, 3621 bp, Zea Mays
caactacctgcaccaaaccgtgctggagtacttgtatgacagattcacagcagtctgagggcctgttcgtttgtccaggattaggccaggattcattccaacttatcaaaacttatataaattagagaaacaatccggccaggaaccgttccaggccttcaatccgtgaaaaacgaacaggccctgatcgatcgttcgacggaacttctgcacccccttccttttcgcagtccgggcgtcgtctccatcgatcgcatctttactaactattaagagcctattgtagaccgcccccgcctcctacgcccgcccgcaagcccgcaaatcacgccgcgaaccgccgcagactgaccccgactccctacgcccgcccccaatccagccgcaatccaccctgcgaatgcggcgaccgtcgcgttccggccggccgcccgtccgcccgccgctatggcactatccactaaccagacacagcgtccagccaagcttttgccgccgcccacttctctcccacctcccctccactcttttgcttgtcgcggggttagaatcccatggcgctatcggccgagatccgcttcggccaccagatcccctatcccactacgacactgactcctacgaggaggaggaagaagaggaagaggaagacgaggaggagttcgagggggtggagggcggaggagatggatgaggtgacggtttcgtctccgctgatgctgccggcaacggaggccaggggaggggtgtccgtggtcgagatggtgatgggggcgcttcggaggtcgctcatgttgtgcagcagcagcgccggcgccggcgccggcgtgcgcgagccggagcaggaggaggacggggtgactcccccgggtggtatgcaaataggggggccaacggatgtgcggcacgtctcacacgtcaccttcgaccgcttcattggcttcctcgacctccccgctgacctcgagcccgacgtgcctcgccccgtgccgagcgcaaggatacgcgggaagaaagccaaggtcaatttccgggatgaagcggcggcagcaggtgctcagaagccagccgcaaccgcaactactccaactgcttgtgccagcgcagcgaggctaggtcctccaccgccgaagttccgtgctgacgaggttttcgggaacatgaacggtggcagcaacgatctgttcgcgattatgttcgcgttcagtgacagtagtagtcaggtcgttcgtgtggagccaggtgagggcgccgccggtttcctccccgcagtggaagtgttggacgacgagcctctgttgcccggcagtaagaggtctgcggctaacatgctgctgctctccggccagagcagcgactcgtatggctcttgtgacttggggtgggactgggacgatgacaccatgacctcagactacgcctcagtctttgctcctgctgctcccagtaacgttgtgccagcatggtacacgcaaggtggaccggcgtcgaagagaacgaggagcagctatggctacggtgtggcgatgctccagcagggagatggcgcgcaggccatgccgggcggctttgaccctgagacgaactaccagtaccagctgttgccttacgtcgtcgagagcagcccgtcggacggcgcgtcgacgcacgacatggactgccttcaaatgatgcgagctggtgatgttccacaggatggggcgagcagtggtggtggtggtggtggcggcggcgatatctggagccttgacgagctgctcatggccgctggcgcttactgagaaaagctatgtgcatcgcatgtactagacggttacttgttgtgccgtgaatggagtgtttctcagtttcgttttgcttttaaatttttttattattccaggtctcctgcttgtggtgatgatgcaggagagccatggtgggtaggtactatgcttttgctgccagtggaactgtaagacaatgtttatatagtatctactatgttggtgcgtcgatggttggttggaggcgagtttgagactgattcagtaatttaccttgtgttctgatgcagtcataactatcggtattctgatatagtaatttaccttatatagtttgagactgtaagacaatgtttatatagtaatttaccttatatagtatctactattttaattttgtgttctgatgcagttataactatcggtattgagccttgtgtggagcagaaacttgtaacataatatgcataatttgaggattatatgatttctgtgtagttgcctttttacttctgtatttcgacatcattccattttttttgttgttgcaaatcatttgattccttgaaacagaaataaatacacaatacatgctaatgaaaatttggcaatacatgttttgctttgtaaattttgatgtagtcattgcaaatcatttggcatgtattggacgatatctgtttgcattcctgatcttctcaactaccaggtgaaagcatacctcgatcgcaagtcactggcaaattctctgaacgacataaagaccgtagttatgcaacttcacgacctcatcagtgttatagacttatagtcatcattgttacactactatttatgggcattgcgacaaccaagattcttgttgtcatctcgtcccagcttctggttgcgggattcatatttgggaatgcatgcaagactgtatttgaggcccttatatttgtattcatcatgcatccatttgaggttgctaaccgctgtgttatcgacgaaacacaggtacctggagagcaaaccaacgcattggcaccctacccacactgtaaatctcaaggacatcttggatgtgaacaagattaacatgtctctctcagtccagcacaccatgaactttcaaaacatccgggagaagaacatcaggaggtctgagctcgttatggagttgaagaaaatattcgaggagatgtccattcggtaccaccttctaccccagaaagttgaactcacctacgtcgactcgaacccactgcccatgggtccttctcatacaagatagaagatgggtgaagacttttaagtctcatactgacaacttgatccgtttcatgggatctgacaactgatggctagctgtgcagtctgttctgaagttactaaaactctgcatagtagatattagctcgtagaataatttgtcagataatgcatttgtaagcggtgatggtactggtgatcaatgctttgggattggccattacaccatttgattatctacaccgtttggtgcatcacaatcgaaaatgttgcgaaatagccactactaaagaaattcagctgggagattgaagtgggcctgtcgaaatgttattcttcacaatagtaccatgtaattcagctgtgagactggtagtcactcttgtgcatattttttgttggcaaaaatctacttcatgtccggtgttcaagaggttcctgagcttcaagaagaagcatagggggagggaggtcactgtaatcgactgcatgtcgccgcccgtgccctggccagccgacgacgccagcggcaggtggcagcctgctagctggtgggtcgggcaaacacatgatgggcttctctgatgttgcctctgatgat

SEQ ID NO: 82521 - DNA, 1387 bp, Zea Mays
ggcgcgttggccgcggccggtggccacgtgctcagcgccgtgccgatcgatggcaggccatctttccggtagcggtgaaagcatacctcgatcgcaagtcactggcaaattctctgaacgacataaagaccgtagttatgcaacttcacgacctcatcagtgttatagacttatagtcatcattgttacactactatttatgggcattgcgacaaccaagattcttgttgtcatctcgtcccagcttctggttgcgggattcatatttgggaatgcatgcaagactgtatttgaggcccttatatttgtattcatcatgcatccatttgaggttgctaaccgctgtgttatcgacgaaacacaggtaacttctacatcactctttctggtaccagtttccattgatttcccatgttaccgacatgaatgtactctgatgatagatgatcgtcgaggaaattaatatattaaccactgttctcttcaagaatgacaaccagtttaggcagctttgaggtccaaaattaaagggtacctggagagcaaaccaacgcattggcaccctacccacactgtaaatctcaaggacatcttggatgtgaacaagattaacatgtctctctcagtccagcacaccatgaactttcaaaacatccgggagaagaacatcaggaggtctgagctcgttatggagttgaagaaaatattcgaggagatgtccattcggtaccaccttctaccccagaaagttgaactcacctacgtcgactcgaacccactgcccatgggtccttctcatacaagatagaagatgggtgaagacttttaagtctcatactgacaacttgatccgtttcatgggatctgacaactgatggctagctgtgcagtctgttctgaagttactaaaactctgcatagtagatattagctcgtagaataatttgtcagataatgcatttgtaagcggtgatggtactggtgatcaatgctttgggattggccattacaccatttgattatctacaccgtttggtgcatcacaatcgaaaatgttgcgaaatagccactactaaagaaattcagctgggagattgaagtgggcctgtcgaaatgttattcttcacaatagtaccatgtaattcagctgtgagactggtagtcactcttgtgcatattttttgttggcaaaaatctacttcatgtccggtgttcaagaggttcctgagcttcaagaagaagcatagggggagggaggtcactgtaatcgactgcatgtcgccgcccgtgccctggccagccgacgacgccagcggcaggtggcagcctgctagctggtgggtcgggcaaacacatgatgggcttctctgatgttgcctctgatgat

SEQ ID NO: 82522 - DNA, 397 bp, Zea Mays
ctcgtccccatttcctccccatgtcccgtcggtttctctcatgccaatttctctcgccctggttctctcccgctcgtcgccgcagagttggagtcgccgagagcgctgtccgcgccgaatggtactcgccgtcgaactccgtcgtgatcgcgattcgtttctgagcttcgaggaatcgacggtcaagctttggcgaccaagtgatcgaactcttcgagttctacgagatcgaagatcctgagcatctgtttggtgaaggcaagtgtcctctgacccattatgccccatttactttataattcactgtcccgcatactatgaacaacctaagtattgactagctttctatttacctggtccttgattaccttttgggctactatggttagattcatgc

SEQ ID NO: 82523 - DNA, 558 bp, Zea Mays
aagctccacacaacaacaaaaaaaaaaacccaggaggtctgcgattcgatcaatcaacaagacagagatggcaagaatgtacaaatcaggctgttacagggggggcttgcattgtacacacccaacctggcctagcctaccctactacatccatcatacatcatcccctgcagaaactccactcccgcatgcatcatccatccctcgttcacaacaactccacacgcttcaaaaccctgttcctgctttttcctccccgtcctgacctccagggcttttttttttaccccctcccatgcatgatgctcagctctaccaattgcctccaagcctcccgcgaccatggactgataacaaacaactccccgccatgtgccaaacttatgcgttagcatacccatgcaacatgtgattttcctttgctcggccggtccggtccggtcggctccaggtgggagtttcattcatgcattctcggccggaaaacccccgaagctcccctcaagctcccctcgccacgcgcccgcttcgggcgccactccgtgtgcgccttcacta

SEQ ID NO: 82524 - DNA, 1619 bp, Zea Mays
tcttctcgcctcgcctcgtctcctctgttctccagttctctcatagtcactcccccaactctgctgcttcccgtggccgtggttcaaaattcgaatccagaaagacttccccaagcattttccgtttctttaaaccgtcatcgtcctccctcgtgctagcctcgctcgttgcgcgttcaaatttcgaaccacctccgccttcgacgccccaaaccctagcccgacccctcctcctccacctgcgccaccgcccaccatgagctccgccgccgcgccagctgccgtcggcagcggcaaggagcttgccaacccgcccgccgacggaatcaccaacctccgcttctccaaccacagcaacaacctcctcgtctcctcatgggacaagacggtgcggctctacgacgccgacgccaacgtgctcaagggggagttcatgcaccccggggccgtcctcgactgctgcttccacgacgactcctcgggctttagcgccggtgccgaccacaccgtgcggaggttggtatttagctcgtccaaggaagatgttttggggcggcatgatggtccggttcgttgcgtggaatactcttatgctgcaggtcaagtcatcaccggcagctgggataaaactgtaaaatgctgggatccaagaggagttagtggaccagagcgcacccttgttgggacatatgctcaacctgaacgtgtatattctctttcgttagtaggaaataggttggttgttgcaacagctggaagacatgtaaatatttatgatctgcgcaatatgtctcaacctgagcaaaaaagagactcttctttgaaatatcaaacacgatgtgttcgatgttttcccaacggaacaggatatgctcttagttctgttgaagggcgagtttctatggaattctttgatctatctgagtctgctcaatctaaaaagtatgctttcaagtgtcatcggaagtctgaggccggcagggacaccgtttatcctgtcaatgcaattgctttccatcccatatatggaacatttgccaccggagggtgtgatggatttgtgaatgtgtgggatggcattaacaagaaaagactatatcagtactcgaagtacgcatcaagcatcgctgctctatcattcagtaaggatgggcatctgcttgctgtggcatccagctacacttatgaagagggagaaaaaactgaatgaagtcgaggtgaagccgaagcccaaggcattggcagccccccagtagtgctgtgacctgttctggaggctagatgacccgtacttctctgcgttgatgtcaattacattagttgacggagtgcttgtttgtgttgaaagagctgaaacgcctgtgtttcttaatctggaaccctcttctcccgttttacttgtccgtggaaacatttcatgttccagctggttgtatattccgaaacagaccatgtttaagttcactcggttcttcgttgacttaagttatttatcaaatatttaagtatcgtacgtaagtttgaaacctggggggaagaactatgctggctttgttgtactgccaatttcaatttaggaaggatgaaattgaagtttggacttgtgccgcataggcaaa

SEQ ID NO: 82525 - DNA, 1058 bp, Zea Mays
cccacgccgcggaatcttctcgcctcgcctcgtctcctctgttctccagttctctcatagtcactcccccaactctgctgcttcccgtggccgtggttcaaaattcgaatccagaaagacttccccaagcattttccgtttctttaaaccgtcatcgtcctccctcgtgctagcctcgctcgttgcgcgttcaaatttcgaaccacctccgccttcgacgccccaaaccctagcccgacccctcctcctccacctgcgccaccgcccaccatgagctccgccgccgcgccagctgccgtcggcagcggcaaggagcttgccaacccgcccgccgacggaatcaccaacctccgcttctccaaccacagcaacaacctcctcgtctcctcatgggacaagacggtgcggctctacgacgccgacgccaacgtgctcaagggggagttcatgcaccccggggccgtcctcgactgctgcttccacgacgactcctcgggctttagcgccggtgccgaccacaccgtgcggaggttggtatttagctcgtccaaggaagatgttttggggcggcatgatggtccggttcgttgcgtggaatactcttatgctgcaggtcaagtcatcaccggcagctgggataaaactgtaaaatgctgggatccaagaggagttagtggaccagagcgcacccttgttgggacatatgctcaacctgaacgtgtatattctctttcgttagtaggaaataggttggttgttgcaacagctggaagacatgtaaatatttatgatctgcgcaatatgtctcaacctgagcaaaaaagagactcttctttgaaatatcaaacacgatgtgttcgatgttttcccaacggaacagattaggggcgcctcaagattctgtccgtacagggccatgccaggttcaataagtacaattcaatctttatttgtgagtttgagttgaggattcttggtaggctcctccaaatggatctattatgtttaattacgaagtcaaataatcatctgaacagcacatggtttgtgtcttttaa

SEQ ID NO: 82526 - DNA, 2698 bp, Zea Mays
ccgccggccgtgggctgccgcatcccggcctggtgccctccggcggccgcatccaaacccccccaccccctcgcgtagataagcctagtaatcagtctcggcggcgcgggacgctgtggcgggggagaccagtgcgagactgcgctgtcttgtccattggggggatttggggctgtgcgcgaggcagttaataatgcccgtcctctccccaagtcagagtccgctgccatggccgtcgccgtcgccgtcgacgtcccctcctgcatccagctcctccgctcctgcagcgcggtcgccggccggcagctccaccagctcctcctcaaatccggccacgtcccctcctcgctcccgcccactaactccgtcctcctcatgtacgcgcgcggctctccgctccactcccgcgacgcccgccgcctgttcgacgaaatgcccacgaagaactgcttctcctataactccatcatcaccgccctcttcaagtccggagaccaccgtgcggctctccgcgtgtttcgctccatgcctgacaggaacaccttctcctacaacgcggtgataactggcctcactggtgctggggatctcgacaccgcgagtgagttgctagatgagatgcccgtgaaggacgccgtggcttgcaacgctgtgttgcatagtggttggcgcctgtgctgatcggacgcagtatgagattgggaggcaagctcacacccggttggtggttgccaacaccgggattgattcgatattgggctgcgcgttgattgacatgtattgcaagtgtggggatttggactccgctcaccaagttcttgacaggttagaacatgtcgatgagatttcgctgtccgcattggtctatggctacgcatcttgcggacagttgcacaaggcgttatgtcttttcgacaagatggagagccccagcattgctctatggacgtctcttatcagtggcatgctgaagcctggtcagcagacgcaagcttgtgctttaaagagtggggctgtcaatgacttgatagcagcaagtgctctcattgacttctactcgaaatgcggcctctgggcagatgcctgccaagctttcagtgagcttaggcatcatgacaccattgtgctcaactcaatgatcactgtatactcaaactgtggccaaatagatgaggctagaagagtttttcgtttgatccctagcaagagtgtcatctcatggaattctatgattgttgggttcagtcaaaacgggcatgctcttgatgcattggagctgttctgtgagatgcaccggcttggtttgcagcttgacaatgtagctatatccagtgtccttagtgcatcaggcagcatctgctctgtaagttccggggagcagatttttggtcttgctattgcgcttggtctgcagtctgaccatattgtagcctcctcgctcattgacctatactgcaaatgtggtaacttggccaatggacgcaggatcttcagtggtattgctaatccagacgaagtcctgtggaactcaatgcttataggttatgcttctaacgggtatggactcgaggcactgaaacttctagatttaatgcaaagtaggggtctgaagccaagcgaacggacatttgttggtgtcctttctgcatgctgtcattctgggcttgtggaagagggattgagatggttttaccggatgaaggaagattttggcgtgagtccatcagctgagcattatgcatgtgtgactgacctgttggtccgagcaggtcgactggatgaagcagttgagttcatagagaacatgcctttcaaagctgatgcaattagttggacttctattattggaggatgcaaagcccagggcaatgaggttctgttggacaaggttgcaaacaaattgatggaaacaggattgtcaacacattcaagtttgtatgtgcagctgtcaagcacactcgcagctcatggggattgggacaaatcagctgagattaggagtatgatgcatgacagaagaatctcaaagaatgctgggcgcagttgggttgacagggcatagaggaaatgaccagtgtcacctcccacaggcgtctcggtccattttctcttgggccttccctattggctttggtttcttcgatgtgttcttccgctagttaggaagtggtaacaaacaacgatcctgctaaaatatgtgcttttgatcatttgcttagttgaaccatatgaggtgatttcttggatgtggattcctgaagcatgcacaggttaatgctaatgattcagtccatgatatcttcgacatcaaaattgaccataatgaaaatgtgtcaaccaccaaaaagaaaatctttagctctaaagaagagaaaggaagggctctgaagttgaataatgaacacggtctagcccagcaatccctacagcggccaaatcattgcgtctctggggtgggcacaggatggagagtggagactctggggtgggcataggaaagagactccggcatcaagcaaacagttaattgatgagcagccgtactgatgcgcggtgagaaacgtgagcggcgcgccacatcggacaatggcagacatcaaatcaaggtccatctattgtgatcttgtcatgttcttgtatcttcgcaatggacaaaagggggttggacagtagtacctaggattatgtgcgcttgtct

SEQ ID NO: 82527 - DNA, 2780 bp, Zea Mays
ccgccggccgtgggctgccgcatcccggcctggtgccctccggcggccgcatccaaacccccccaccccctcgcgtagataagcctagtaatcagtctcggcggcgcgggacgctgtggcgggggagaccagtgcgagactgcgctgtcttgtccattggggggatttggggctgtgcgcgaggcagttaataatgcccgtcctctccccaagtcagagtccgctgccatggccgtcgccgtcgccgtcgacgtcccctcctgcatccagctcctccgctcctgcagcgcggtcgccggccggcagctccaccagctcctcctcaaatccggccacgtcccctcctcgctcccgcccactaactccgtcctcctcatgtacgcgcgcggctctccgctccactcccgcgacgcccgccgcctgttcgacgaaatgcccacgaagaactgcttctcctataactccatcatcaccgccctcttcaagtccggagaccaccgtgcggctctccgcgtgtttcgctccatgcctgacaggaacaccttctcctacaacgcggtgataactggcctcactggtgctggggatctcgacaccgcgagtgagttgctagatgagatgcccgtgaaggacgccgtggcttgcaacgctgtgttgcatagtggttggcgcctgtgctgatcggacgcagtatgagattgggaggcaagctcacacccggttggtggttgccaacaccgggattgattcgatattgggctgcgcgttgattgacatgtattgcaagtgtggggatttggactccgctcaccaagttcttgacaggttagaacatgtcgatgagatttcgctgtccgcattggtctatggctacgcatcttgcggacagttgcacaaggcgttatgtcttttcgacaagatggagagccccagcattgctctatggacgtctcttatcagtggttgtaaccctgcctatcatggagatggtgcttttgttctttttgtaaggatgttgcggtcagaaatgttgcctaattctactatttatgccattgttctgaacatgtgtggctttttaggcatgctgaagcctggtcagcagacgcaagcttgtgctttaaagagtggggctgtcaatgacttgatagcagcaagtgctctcattgacttctactcgaaatgcggcctctgggcagatgcctgccaagctttcagtgagcttaggcatcatgacaccattgtgctcaactcaatgatcactgtatactcaaactgtggccaaatagatgaggctagaagagtttttcgtttgatccctagcaagagtgtcatctcatggaattctatgattgttgggttcagtcaaaacgggcatgctcttgatgcattggagctgttctgtgagatgcaccggcttggtttgcagcttgacaatgtagctatatccagtgtccttagtgcatcaggcagcatctgctctgtaagttccggggagcagatttttggtcttgctattgcgcttggtctgcagtctgaccatattgtagcctcctcgctcattgacctatactgcaaatgtggtaacttggccaatggacgcaggatcttcagtggtattgctaatccagacgaagtcctgtggaactcaatgcttataggttatgcttctaacgggtatggactcgaggcactgaaacttctagatttaatgcaaagtaggggtctgaagccaagcgaacggacatttgttggtgtcctttctgcatgctgtcattctgggcttgtggaagagggattgagatggttttaccggatgaaggaagattttggcgtgagtccatcagctgagcattatgcatgtgtgactgacctgttggtccgagcaggtcgactggatgaagcagttgagttcatagagaacatgcctttcaaagctgatgcaattagttggacttctattattggaggatgcaaagcccagggcaatgaggttctgttggacaaggttgcaaacaaattgatggaaacaggattgtcaacacattcaagtttgtatgtgcagctgtcaagcacactcgcagctcatggggattgggacaaatcagctgagattaggagtatgatgcatgacagaagaatctcaaagaatgctgggcgcagttgggttgacagggcatagaggaaatgaccagtgtcacctcccacaggcgtctcggtccattttctcttgggccttccctattggctttggtttcttcgatgtgttcttccgctagttaggaagtggtaacaaacaacgatcctgctaaaatatgtgcttttgatcatttgcttagttgaaccatatgaggtgatttcttggatgtggattcctgaagcatgcacaggctaatgattcagtccatgatatcttcgacatcaaaattgaccataatgaaaatgtgtcaaccaccaaaaagaaaatctttagctctaaagaagagaaaggaagggctctgaagttgaataatgaacacggtctagcccaggtaagctgtaagagcaccctttgcattttggttgacccagcaaatgctagttacacatgcgcaaaggaggctcttttgtttactcaaccacagttctacaattctattcggttcatggatgctccagaagagttgcttttgtggaatatgttgtttgtgaataacatagaggtcgatcaactctccagaagagctgttttgtgaacaatacagacatttatgtgaacatggatccaagttttctctctc

SEQ ID NO: 82528 - DNA, 2786 bp, Zea Mays
ccgccggccgtgggctgccgcatcccggcctggtgccctccggcggccgcatccaaacccccccaccccctcgcgtagataagcctagtaatcagtctcggcggcgcgggacgctgtggcgggggagaccagtgcgagactgcgctgtcttgtccattggggggatttggggctgtgcgcgaggcagttaataatgcccgtcctctccccaagtcagagtccgctgccatggccgtcgccgtcgccgtcgacgtcccctcctgcatccagctcctccgctcctgcagcgcggtcgccggccggcagctccaccagctcctcctcaaatccggccacgtcccctcctcgctcccgcccactaactccgtcctcctcatgtacgcgcgcggctctccgctccactcccgcgacgcccgccgcctgttcgacgaaatgcccacgaagaactgcttctcctataactccatcatcaccgccctcttcaagtccggagaccaccgtgcggctctccgcgtgtttcgctccatgcctgacaggaacaccttctcctacaacgcggtgataactggcctcactggtgctggggatctcgacaccgcgagtgagttgctagatgagatgcccgtgaaggacgccgtggcttgcaacgctgtgttgcatagtggttggcgcctgtgctgatcggacgcagtatgagattgggaggcaagctcacacccggttggtggttgccaacaccgggattgattcgatattgggctgcgcgttgattgacatgtattgcaagtgtggggatttggactccgctcaccaagttcttgacaggttagaacatgtcgatgagatttcgctgtccgcattggtctatggctacgcatcttgcggacagttgcacaaggcgttatgtcttttcgacaagatggagagccccagcattgctctatggacgtctcttatcagtggttgtaaccctgcctatcatggagatggtgcttttgttctttttgtaaggatgttgcggtcagaaatgttgcctaattctactatttatgccattgttctgaacatgtgtggctttttaggcatgctgaagcctggtcagcagacgcaagcttgtgctttaaagagtggggctgtcaatgacttgatagcagcaagtgctctcattgacttctactcgaaatgcggcctctgggcagatgcctgccaagctttcagtgagcttaggcatcatgacaccattgtgctcaactcaatgatcactgtatactcaaactgtggccaaatagatgaggctagaagagtttttcgtttgatccctagcaagagtgtcatctcatggaattctatgattgttgggttcagtcaaaacgggcatgctcttgatgcattggagctgttctgtgagatgcaccggcttggtttgcagcttgacaatgtagctatatccagtgtccttagtgcatcaggcagcatctgctctgtaagttccggggagcagatttttggtcttgctattgcgcttggtctgcagtctgaccatattgtagcctcctcgctcattgacctatactgcaaatgtggtaacttggccaatggacgcaggatcttcagtggtattgctaatccagacgaagtcctgtggaactcaatgcttataggttatgcttctaacgggtatggactcgaggcactgaaacttctagatttaatgcaaagtaggggtctgaagccaagcgaacggacatttgttggtgtcctttctgcatgctgtcattctgggcttgtggaagagggattgagatggttttaccggatgaaggaagattttggcgtgagtccatcagctgagcattatgcatgtgtgactgacctgttggtccgagcaggtcgactggatgaagcagttgagttcatagagaacatgcctttcaaagctgatgcaattagttggacttctattattggaggatgcaaagcccagggcaatgaggttctgttggacaaggttgcaaacaaattgatggaaacaggattgtcaacacattcaagtttgtatgtgcagctgtcaagcacactcgcagctcatggggattgggacaaatcagctgagattaggagtatgatgcatgacagaagaatctcaaagaatgctgggcgcagttgggttgacagggcatagaggaaatgaccagtgtcacctcccacaggcgtctcggtccattttctcttgggccttccctattggctttggtttcttcgatgtgttcttccgctagttaggaagtggtaacaaacaacgatcctgctaaaatatgtgcttttgatcatttgcttagttgaaccatatgaggtgatttcttggatgtggattcctgaagcatgcacaggttaatgctaatgattcagtccatgatatcttcgacatcaaaattgaccataatgaaaatgtgtcaaccaccaaaaagaaaatctttagctctaaagaagagaaaggaagggctctgaagttgaataatgaacacggtctagcccaggtaagctgtaagagcaccctttgcattttggttgacccagcaaatgctagttacacatgcgcaaaggaggctcttttgtttactcaaccacagttctacaattctattcggttcatggatgctccagaagagttgcttttgtggaatatgttgtttgtgaataacatagaggtcgatcaactctccagaagagctgttttgtgaacaatacagacatttatgtgaacatggatccaagttttctctctc

SEQ ID NO: 82529 - DNA, 1032 bp, Zea Mays
ctcccctccccgcgtccgccgattgtttgtgtggttggggtcccccgcccgatgcttggcggcgcaacggcgcctataaatccttggcctctcctctttctggcaacacaaaacacatccatcctccttgcaactccagtgctgctcactgccactgccagcagatcgagctgctccgtctcacaaaccctctagcttgctttgctgctccacctgcaagtctgcaaccgcgtacagagatgtcgacggtgagccgtgcgtccctcgaccagaagctcgccctcgccaagcgctgctcccgagaggcgaccctcgccggagccaaggcggcagccgtggcgactatcgcctccgcgatccccaccctggccagcgtgcggatgctgccatgggccaaggccaacatcaaccccaccggccaggcgctcatcgtctccacggtggctgggatggcctacttcatcgccgccgacaagaagatcctgtcgctggcgaggcgccactcgttcgagcaagcccctgaccacctcaagaacacctccttccagggcaccggccgtccccacccggctttcttcaggccgtgagacgtggccttcgtccagagctagctacctacctctttcagttcgatcgtcgtcagtgcaaagcaccaccaatgcctgaataaatttaactacgaggctagctgctgaacatcgatctgctactgctagtattactacggcgaggctgctgaacagcgctgtagagtagtattggtgctcagttcagaatgtataatgttacttctaccgattaaactgttaaaaaaccctagtacgcttatgtggtcaaataccacttatatctgtgagcagtgtcgcatctctatataaaggaatatgtatcttctcagaaagaggttagagacccaactctacatactgtttttttaatgtgttttctgagtgtgtggattgctagaaaagaaaacgtgcttctaccgacttttcgcgtctatactgctgacaggaggggaaatgagcaaat

SEQ ID NO: 82530 - DNA, 1032 bp, Zea Mays
cttctcccctcccctccccgcgtccgccgattgtttgtgtggttggggtcccccgcccgatgcttggcggcgcaacggcgcctataaatccttggcctctcctctttctggcaacacaaaacacatccatcctccttgcaactccagtgctgctcactgccactgccagcagatcgagctgctccgtctcacaaaccctctagcttgctttgctgctccacctgcaagtctgcaaccgcgtacagagatgtcgacggtgagccgtgcgtccctcgaccagaagctcgccctcgccaagcgctgctcccgagaggcgaccctcgccggagccaaggcggcagccgtggcgactatcgcctccgcgatccccacccgtgcggatgctgccatgggccaaggccaacatcaaccccaccggccaggcgctcatcgtctccacggtggctgggatggcctacttcatcgccgccgacaagaagatcctgtcgctggcgaggcgccactcgttcgagcaagcccctgaccacctcaagaacacctccttccagggcaccggccgtccccacccggctttcttcaggccgtgagacgtggccttcgtccagagctagctacctacctctttcagttcgatcgtcgtcagtgcaaagcaccaccaatgcctgaataaatttaactacgaggctagctgctgaacatcgatctgctactgctagtattactacggcgaggctgctgaacagcgctgtagagtagtattggtgctcagttcagaatgtataatgttacttctaccgattaaactgttaaaaaaccctagtacgcttatgtggtcaaataccacttatatctgtgagcagtgtcgcatctctatataaaggaatatgtatcttctcagaaagaggttagagacccaactctacatactgtttttttaatgtgttttctgagtgtgtggattgctagaaaagaaaacgtgcttctaccgacttttcgcgtctatactgctgacaggaggggaaatgagcaaat

SEQ ID NO: 82531 - DNA, 835 bp, Zea Mays
cgcttctcccctcccctccccgcgtccgccgattgtttgtgtggttggggtcccccgcccgatgcttggcggcgcaacggcgcctataaatccttggcctctcctctttctggcaacacaaaacacatccatcctccttgcaactccagtgctgctcactgccactgccagcagatcgagctgctccgtctcacaaaccctctagcttgctttgctgctccacctgcaagtctgcaaccgcgtacagagatgtcgacggtgagccgtgcgtccctcgaccagaagctcgccctcgccaagcgccactcgttcgagcaagcccctgaccacctcaagaacacctccttccagggcaccggccgtccccacccggctttcttcaggccgtgagacgtggccttcgtccagagctagctacctacctctttcagttcgatcgtcgtcagtgcaaagcaccaccaatgcctgaataaatttaactacgaggctagctgctgaacatcgatctgctactgctagtattactacggcgaggctgctgaacagcgctgtagagtagtattggtgctcagttcagaatgtataatgttacttctaccgattaaactgttaaaaaaccctagtacgcttatgtggtcaaataccacttatatctgtgagcagtgtcgcatctctatataaaggaatatgtatcttctcagaaagaggttagagacccaactctacatactgtttttttaatgtgttttctgagtgtgtggattgctagaaaagaaaacgtgcttctaccgacttttcgcgtctatactgctgacaggaggggaaatgagcaaat

SEQ ID NO: 82532 - DNA, 1128 bp, Zea Mays
gccgcttctcccctcccctccccgcgtccgccgattgtttgtgtggttggggtcccccgcccgatgcttggcggcgcaacggcgcctataaatccttggcctctcctctttctggcaacacaaaacacatccatcctccttgcaactccagtgctgctcactgccactgccagcagatcgagctgctccgtctcacaaaccctctagcttgctttgctgctccacctgcaagtctgcaaccgcgtacagagatgtcgacggtgagccgtgcgtccctcgaccagaagctcgccctcgccaagcgctgctcccgagaggcgaccctcgccggagccaaggcggcagccgtggcgactatcgcctccgcgatccccaccccgtacgtacgtacgtacgcgtcgatcggtcgcgaaacagcccgtcgtcggccagtctctaataactgatcgtcgcttcttcagctggccagcgtgcggatgctgccatgggccaaggccaacatcaaccccaccggccaggcgctcatcgtctccacggtggctgggatggcctacttcatcgccgccgacaagaagatcctgtcgctggcgaggcgccactcgttcgagcaagcccctgaccacctcaagaacacctccttccagggcaccggccgtccccacccggctttcttcaggccgtgagacgtggccttcgtccagagctagctacctacctctttcagttcgatcgtcgtcagtgcaaagcaccaccaatgcctgaataaatttaactacgaggctagctgctgaacatcgatctgctactgctagtattactacggcgaggctgctgaacagcgctgtagagtagtattggtgctcagttcagaatgtataatgttacttctaccgattaaactgttaaaaaaccctagtacgcttatgtggtcaaataccacttatatctgtgagcagtgtcgcatctctatataaaggaatatgtatcttctcagaaagaggttagagacccaactctacatactgtttttttaatgtgttttctgagtgtgtggattgctagaaaagaaaacgtgcttctaccgacttttcgcgtctatactgctgacaggaggggaaatgagcaaat

SEQ ID NO: 82533 - DNA, 748 bp, Zea Mays
cccctgcaaagccaacatacatggccactaaccactttatttttttacaagaaaatagcacacacaaagttggttaactggtaataacataaattaaacttacacattctgaatttagcacaccaacactactttacagcgctgtgttcagcgcgcagctagcctcgtagtagtagtagttatactagcgcatcgacgttcagcagcctcgcaattacagtagtttattcaggcatgcatcggtgggcatttggtgcttgcattggcaaactggaaaaagaggtgctcaggggcttgctcgaacgagtggcgcctcgccagcgacaggatcttcttgtcggcggcgatgaagtaggccatcccagccaccgtggagacgatgagcgcctggccggtggggttgatgttggccttggcccatggcagcatccgcacgctggccagggtggggatcgcggaggcgatagtcgccaccgctgccgccttggctccggcgagggtcgcctctcgggagcaacgcttggcgagggcgagcttctggtcgagggacgcacggctcaccgtcgtcgacatctctgtgtgcgcggttgcagacttgcaggtgcagcagcaaagcaagagggtttgtgagacggagcagctcgatctgctggcagtggcagtgagcagcactggagttgcaaggagagcgagcgagctagcgaggatggatgtgttgccagacgcaggagaggccaaggatttatag

SEQ ID NO: 82534 - DNA, 1597 bp, Zea Mays
atccgtagctggcacgtcacaacccaggttgccccggcccgaagaatcctcctccctcagattcgaatccggcccgtgtctctcctcctcttctcttcttctgcgacccgcacgaggcaggcctcttcctctctctttggctctttgctttgctttccccaaaccgtcctctgctctgctcctcccgctcccttcccgaagtcgccgggagccacaagcccacacgcattcccctccctcgcgctctctccccgctccgctgtcaccaaccccgcctgcctatttaccggccgcgtcgcccaccgccgcacgccttcccacccacccccgcgcctgcctgctccccgacaccgggggcgccccccacgacgccccggccccgccacggcggcgacagcaagccgggacatggcgcgcggcggcctcgcccgcctgctcgccacgctcatcctcttcctcctgctcgccacgcccctcgccgccggaccttcactcgccgagtcagaggcggacctcgcgcggggcacgtccgaggcagcgccggacgcgcagcagcacctcctggccgcgcccgctccgccggacgcgcagcagcacctcctgccgcgcccgctcgtcatcgagctcccgtcggcgcgggccggggccgagctcgacgccgacgccgacgccgacgccgtggtaacggtcgacgtgcgctgcgccagctggcggctcgcggccgaggccaacaacctcgcgccgtgggcggcggtgccgcccgaatgcgcgccgcacgtgcgggactacgtcaccggctccgcctaccgctccgacctcgacctcgtggcgcgggagtcggccgcctacgcgcgcgccgccgcgccggccggcgccgccgacggacgcgacgcctgggtgttcgacgtcgacgagacgctgctctccaatctcccatactacgccgagcacggctacggggccgagttgttcgaccaccacaagttcgacgagtgggtggaaaggggcgaggcggccgccatcccttccagcttgaagctctacaacgaggtccgcgggctgggattcaagaccttcctgctcacgggcagaagcgaggcgcaccgaggagtcacggtggagaacctcaacaagcaggggttccatgactgggagaagctcatactcagcaggtgaccgcgagaaaacagcgacagtctacaaatcagagaagagggacgaaatggaacaggagggttacaggatcctaggcaactccggcgaccaatggagcgacctgctgggatcttccatgagcgctcgctctttcaagctccctaacccaatgtactatatcccgtgacagaaagaaactggagaacagggcgggtgaaaggtgctctgcgtttactggatgcacattctaccaggccctcggctgatgatggaaaatgaaaaataattttgcaatggaattaaactgtacaaaatgcttttctccaacttcgtgtagtacacattgcctgtaatgttcgacggtaacgacaacatgcgaataattgaccaggccaccagggatatgccttgagtcgacaagtgcagggttgtagactcgtag

SEQ ID NO: 82535 - DNA, 3090 bp, Zea Mays
atctaacgaaagagcccccaaaaccttcccagaaaggcgacggagtcaggttcgaatcgaaatcggggtcaccgcggcggcggcggcggcggcgggtctactcatcagagactacagagcagggggtctcacgctccggcggcgggacgatggccatggcgccgtcctcctcttcctccggtggcggcggcggcgacggcgccaacgccgccgacgcgatggctctcgtgcaggggtacacggccgaggagctcgccatcgcgggggagttcctcaccacctggctccccttcctctctgccggcctctgtccctcctgcgcctcctcgctccgcggccgcgtcgactccctgatcacgcgaggtaaccggcgtttatgcgaccgtaccctcatgctactagggtttctcgtttagttcttgtgcctgacgtccatccaactaggccgcgcagctgaggaatcgccgccggtcgatcagattgagccgtcagggtgggactcggatccagcggacccgcagaaccttcctttcgagccgagtggttgggattcggatccgcccccacccccgccgccggcgccggcgccggcgccggtggagaaaccgaggatgtcgtgggcggacatggcgcaggaggacgagctcgccgcggcggcggaggatgacgcggcggccgcagcggccgacgagggggaggacggggccgaggcggggaggcccaaggtgccgctcacgagggagcagcgggaacagaggaggctcagtagcttggtgcgcaacaaggagttcaggtgctacgagagagttcgtggccagctcgtcaacatcctcgctggccttgagcttcatgccggcgtgttcagcgcagctgagcagcggcgaattgtccaatgtgtgtatgacctccaggcaagagggcagcgtggggagctcggagagcgcacatatacagaaccccaaaaatggatgcgtggtaaaggccgggtaacaatccaatttggatgctgttacaattacgctacggtacttttcttcgaaaattccatcttgtgaactatatctgtccatttaagcattgttgaacactgaagaaaacattgttgaaaccccatctataattctaatggtaaacctatcatggcaggataagaaaggaaatccaccaggcattatacggaccattgtttctgatccaatgcctgacctctttaagactatgattaagagattggtacgatggcaagttctgcctgcaacttgtgtaccggacagctgcattgtaaatatatatgaacctggagattgcatcccaccacatatagatagccatgattttgttaggccattttgcactgtttctttcctcagcgaatgcaacattctttttggacccaacttgaaagttgctgcccctggagaattcatcggttcaattgcgatccctctccctgtcgggtacatattctgtcatgttcttttcatttgcatatagatttcttatgctagttgcacttgtttattgttttatactatgtggatagtttgatgatagttttgtttcttgacatctcaaagttgtgaatatatatgaatgtcaagactgtttagtgggtcatttgaagtctgtagataattgtttgttgcatcatacagcgatttgcttaaattgtctcctttgccttgtatttactttttatacaaaatatgtttttgctgctaatgtctatgtactatgatttatcgcgggcttgcagcatgtcttatttatttttaacatttgaatttggtgtatcttgtttccattttaatgactatagtcgcatatatctttagttttatgatttgtacaattgtgtccttgttttccagtggtactgttcacaaaactagtaattgctaaatcgttaggccatcagattaattgtacggctctcttactacatatgaaaatccacagatctgtgctagtcctgaatggcaatggtgctgatgtagcaaaacattgtgtcccagcagtccctaccaaaaggatatccattacattcagaaaaatggacccagcaaagcgtccatttggctttgaagatgacccggaactacttaatcttgctcctctagggacagttgtacaagaaactggcatatcatcagatgaaggcaagggcaagctacctgacgtccaaataacaaatatgggcaaagcatccagaggcaagaggtctaaaggaagaacagctgctgggaaatatgggagcggcattcttggagaacagtctcctgggcatgcccaagcccctgcagtggaagtgcagtcactacggaatccgcatggccagcgtcctgtctccgcttcaagtgctgagagggaaaggaattctgctgggaggtcaagggaatcgagacatcaatctagtacgcttgtggtgcactcacaagtggacaatagcaggcagtggccacgtcggtcggcgcaagagaggtggcatagtaatggcatgagtttctctgaagatggtgtgggatccgcggaaaggagaccacgggtggagcatagacagatttcattgataaaccaaactataagcgacgacatggattccctgtcgctctcaggccgtgaatcaggcgaccagcctcgtgctagtgtgcggaccgtgtataacaagcccagggaggaccagattaagcctagatgattgagctcttgggttgctcgtgtctgcatactttcatgcgaagacccgatgacatcaaaaatgatatttactataaactgtattgtatattttcattgggtttcggtgtcatgaaagcaccaaaaagttaagcgtagaattcctacgtgtactgaatgaacttaattgagacgaaatcagttgcaatcgggcgcctgttctgtagataaaatctcatgtaattttgactgatgcattggtgatctggcttacaattcatttgcaatttgatgcaaatcctagctggactgtgttaccaactatatacaatgggattggcgatctggtttgatacgctgttgtctccttggtgtgcgcgggggaacacagcaataacgaggattggaacgagg

SEQ ID NO: 82536 - DNA, 2518 bp, Zea Mays
gtccgtttcttcttttcgtcaccgttctggccgtcccagcgagcgacggttaggattaagatttctggcctccacgagccagagcccagcgcggctttattattggtattattattattctgtacagcaaaacgctaggttatctaacgaaagagcccccaaaaccttcccagaaaggcgacggagtcaggttcgaatcgaaatcggggtcaccgcggcggcggcggcggcggcgggtctactcatcagagactacagagcagggggtctcacgctccggcggcgggacgatggccatggcgccgtcctcctcttcctccggtggcggcggcggcgacggcgccaacgccgccgacgcgatggctctcgtgcaggggtacacggccgaggagctcgccatcgcgggggagttcctcaccacctggctccccttcctctctgccggcctctgtccctcctgcgcctcctcgctccgcggccgcgtcgactccctgatcacgcgagctgaggaatcgccgccggtcgatcagattgagccgtcagggtgggactcggatccagcggacccgcagaaccttcctttcgagccgagtggttgggattcggatccgcccccacccccgccgccggcgccggcgccggcgccggtggagaaaccgaggatgtcgtgggcggacatggcgcaggaggacgagctcgccgcggcggcggaggatgacgcggcggccgcagcggccgacgagggggaggacggggccgaggcggggaggcccaaggtgccgctcacgagggagcagcgggaacagaggaggctcagtagcttggtgcgcaacaaggagttcaggtgctacgagagagttcgtggccagctcgtcaacatcctcgctggccttgagcttcatgccggcgtgttcagcgcagctgagcagcggcgaattgtccaatgtgtgtatgacctccaggcaagagggcagcgtggggagctcggagagcgcacatatacagaaccccaaaaatggatgcgtggtaaaggccgggtaacaatccaatttggatgctgttacaattacgctacggataagaaaggaaatccaccaggcattatacggaccattgtttctgatccaatgcctgacctctttaagactatgattaagagattggtacgatggcaagttctgcctgcaacttgtgtaccggacagctgcattgtaaatatatatgaacctggagattgcatcccaccacatatagatagccatgattttgttaggccattttgcactgtttctttcctcagcgaatgcaacattctttttggacccaacttgaaagttgctgcccctggagaattcatcggttcaattgcgatccctctccctgtcggatctgtgctagtcctgaatggcaatggtgctgatgtagcaaaacattgtgtcccagcagtccctaccaaaaggatatccattacattcagaaaaatggacccagcaaagcgtccatttggctttgaagatgacccggaactacttaatcttgctcctctagggacagttgtacaagaaactggcatatcatcagatgaaggcaagggcaagctacctgacgtccaaataacaaatatgggcaaagcatccagaggcaagaggtctaaaggaagaacagctgctgggaaatatgggagcggcattcttggagaacagtctcctgggcatgcccaagcccctgcagtggaagtgcagtcactacggaatccgcatggccagcgtcctgtctccgcttcaagtgctgagagggaaaggaattctgctgggaggtcaagggaatcgagacatcaatctagtacgcttgtggtgcactcacaagtggacaatagcaggcagtggccacgtcggtcggcgcaagagaggtggcatagtaatggcatgagtttctctgaagatggtgtgggatccgcggaaaggagaccacgggtggagcatagacagatttcattgataaaccaaactataagcgacgacatggattccctgtcgctctcaggccgtgaatcaggcgaccagcctcgtgctagtgtgcggaccgtgtataacaagcccagggaggaccagattaagcctagatgattgagctcttgggttgctcgtgtctgcatactttcatgcgaagacccgatgacatcaaaaatgatatttactataaactgtattgtatattttcattgggtttcggtgtcatgaaagcaccaaaaagttaagcgtagaattcctacgtgtactgaatgaacttaattgagacgaaatcagttgcaatcgggcgcctgttctgtagataaaatctcatgtaattttgactgatgcattggtgatctggcttacaattcatttgcaatttgatgcaaatcctagctggactgtgttaccaactatatacaatgggattggcgatctggtttgatacgctgttgtctccttggtgtgcgcgggggaacacagcaataacgaggattggaacgagg

SEQ ID NO: 82537 - DNA, 1332 bp, Zea Mays
cagcgccgcacgaatctcggcgcggtccgcgcctgcatcttctccctcgttatccgctgggtcactcgctcgtcgctcccaagtcccaccaagctgtcccccgaccactccgccgcccgctccaatggcggcgccggccagctcctcatgcttccacccacgcgcgaccgccagcccgccgtcttctctcacgtcggcaccaaggtcttcgtcgggctcagggcgcagaccaagctcggttcgtcggagtcgtcatgcccgaatgtcagcgctgggttccacactgcggtcaaccggagaatctctctcaggttgtccaaaaagaaggcgaccagagcccgcatctcgatgatgcctattggtactccacgtgtgccttaccgaacacctggtgaaggaacctggcaatggcttgacatatggaacgctctgtaccgtgagcggattatcttcattggggacaatatagatgaagaattcagcaaccaagtgttggcaagcatgctctatcttgacagcattgataattccaaaaagataatgctatacattaatggaccaggaggagatcttactccgtgtatggcactatatgataccatgctaagtctaaaaagtcctattggcactcactgcttgggctttgcattcaacctggcaggattcatccttgcagccggtgaaaagggttcacgcactggtatgcctctatgccggatttcactccaatcacctgccggagcagctcgaggacaggctgacgatatagaaaacgaagcaaacgagcttatccgcatcaagaactatctctatggcaagctcgcggggcacacaggccattctgtcgagaagatccatgaggacctgtctagggtgaagcgcttcgacgccgaaggggctctcgagtacgggatcatcgaccgtattgtcaggccgtctaggatcaagaaagagggctccactgctcaaaggagggacatgcggaatctgggacttggctaataatagacgatcgaaatcctgttgtatcagaattttttgtgcaagggatgcgcttattatgggagagcgagcgatgcactgttccaagctctacgccggcgtaggtgttttgttgtgtcagctgtgcttttgctaactgtcagcactactattataatatatttgctgggattgttgatgagcacggcaaagaaaaagaccagagatgcgagggcactggcctctaggcgtctcgtctcttggacaactcttgtaccaatcaatcaaccaggtgcccatgctctggatggggactacagttatatgcagggctaccactacgcttttttt

SEQ ID NO: 82538 - DNA, 4040 bp, Zea Mays
acggtagtcatcatcattagcataaaaatactccacctcaactaacaagacgaacttgatcacctcaccacaaccaattggacggatcaactcgtacacacaggcttgattactactaataaccctgttgtttcctgctttcagaacgacaactgccggctctcaaatccaccatcatctaatttaaataaattaaacaccgacagctgctaatacacatggaaaacaaaaaaaagtgttcatcatttcaactgctccaaaacctgcgctttttgcagtacgttcgtctatattacaaaacgtgaaggatgacgaagggtacagcagtaacagatttctaacagatacgtaatgcagcttcattgagctgctttcctgaaaatgctttcctgaaaaacatattcaggctactccagcacaagcatcaccaatgctgtcactttgtgtaataaaaagagtgagaaaaaatagtttgaaagggctttcattggttcttcctttagccaaccgtattcagcagcagttgggatcacatatctgagagactgagacagaccaaagataggcttcttgctccagtgcttgtttatcgttctttagcttgaacatgtccttctcaaatctcgtaaggagcagcagttggattcacatatctgagacagaccaaagataggcttcttgctccagtgcttgcttctcgttcttcagccctgcaacaaactgtttgatcggcgaaacgtgtttacatgatggcatttaagcgaaacgtacgtttccataacgacataaatccaaatttctctccctcgtcttgtcctgtcttgttctgttgctttcgccgctgaaaagaagtcgcaagcagctatgctggagctggagtcatccccaatggagcggccgacggacctcctagtcgacgaggtcgatggtgccttgtcctcagcgtggctaccagaggagttggttgggagcgatattcccgtgcacgagacagggatctccctcaatccgtggccgatgacagatggagctctgacgattgatgcagttgacagttcttggttgaaagctctgaaatgcatgatctctagaaaccagtttggtaatgtattgctcggtttctgaaccaatttttctctagaattcttctatacaactactgcaacctatggtttccgtgcttccaaaattctggattgtgctcctgaaatgctgcaattctgatgttgttattgtgcagctgaaacaaccaatagctgctactggattggtgtttcgacacagttttcagaaatgttgttgccgacacgagaagaaaaactgaaactgcattcttgtatacaagttttcctttgtccctttctgctgtccaagcaaactgaagaacacaagaagcaaactgaaggacacaggaagcatttgcctgcattttttccattgaagtgcaagcaaagtgaagaacaccggaagcacaataattcaacaacaaaggccattggccagtccataaaacaaaaggctgttcaacagaacatattacaaacgacaccacactaaatagataagaagcacatgtcacgaaggacagccttatctcgtcgaagaagacaacggcggcgatggatgagatgaagagaggagcagcggaagccaacgaggcttggacctttggccatgcttgatggccatggaatttcgaggttgaggctgcttcgaattaggattaggacggatgcgtgcagtttggcaggagaagatgccgtgcacgactccgccccctgcgcggcaacatcgccgcaacaaaactggggtcttggacagatttgatcggcgaaagcagcttcggcgtcctaccagatttgggaatccacacagatccgccggagtgcatgggaaacgaaaagcgacgtcggccattccgttgcgcggcaggccaggcactcgtatcgacgacagtcgcgacggccgagtactccatgcgggtggcggacacgacggcggctaccgtcttggattgggacgtggcagcgatgcaggcggcaggcccagctcgagtacgtagtgcctgttttcccaatcggctgaacgcgtgcagcggcggcggtcgtacgtaggaatccgtcactgatttggccaccaacaacacacaaccatagtacgtgatgccctgcaaccacccacacgtggacgtggctgaggaacaccggccgcgtgtcacccggcgactgtgcatcaggccggccgcgcgctagtcgcagcggccaagtagaagtagtcgtgtgtatatcttccagcccgtctgctcgccggccgtctccgtatctatccacccacccccacgccgcgcgcacctgcatcgaccgcccgtgctcacctccacccagcaccacaccacctacaagaacgagccagcatcccgccatgccgatcggcagcggctgcaccacccaggcgctggcggcgatgcacggaggaggcgagccagaggtggtcgagccccaccgccggctgctgcagcagcgcatggagccgctgtcgtcgttccgcccgccggcggacagcgacgtggacagggacgactgcaggcggctgacgcggctgctggtgaacgtgacggtggaccgcagcctgtggcccgtccacctcgtgctgggcgccgacgccaccgtcgccgacctcgtgcgcgccgccgtcgccgcctacgcccgcgagggccgccgcccgccgctcgccggcgcggcggccgacggcttcgagctgcacctcgacaagtactcgctccagagcttgaggctggaggacaaggtgctggaccttggctctcgcaacttcttcctctgcgcgcggagacctgcggggctcggcttgacgacctgatgagagcctggttggttggatcgatcggatccgatcgacggtgcacgcacgtgcagcctcgagtcgtcgatcgtggcaaggtcacatgcgaagaaggggttgcgagtgcagcaggtattcaggccttcagggtttggagatggagatggcgatggcgaacgaccttgaatgttggagttcctgtcgagccatttctttatcgcgtcaatctgcgagagagatgcaaaccgaaagaggggtaatatggtcagctgagaagatgtagaaaaagaaataaaataaaataataaagaaaagatcagaataagagttgagagtactgtaataaagaagtcatttaagggctttagttcacggactaaagtttttgtttgattttagaaactaaaattattcagaacaccaaaaagtagaattaatatagtttagttccttttagttgttcattgagggactacagactaaaacagtttagtccctgatttagttctatcgtttggcaatttagagactaaggtcctgtttggaatagctccagctcagctccaaaaaatttggtggagctggtcatcgagtgcttcagaaaatcgtgaactggaactgtaggccttaagaagacatttaggccccgtttgggagggcttcactttaagaattgcggcttcagttttccagcttcactacgaaacaacttcaatagatttattaagcagggttcaagagtgtttgacttgcacatagactctagcttctataatacaattagtttgtgagaatttccttaattaccattgatgattagcgggtggagaaaaagacttgaatcggtaggtcatgtaaccaatgatatggtgagtaatttttttgcaacttcatgaggagatatgaaaacgttttttaatcaccctttgaggaacttcaaaaatttcatgaaagggcctctagcctagttgtttagatggcctgagtaacactccttaggtcttaggttcgactccatatggaagtgaatttcaggctatggttaaaaaggtcctctcgtctgtctcgcgccaaagcataggtctaaggcccgatcgtttctcacatgggctacggtgccgctatatatgggtggggcaggggttcgtggggtttctcaacctacgtgagaagatcttctt

SEQ ID NO: 82539 - DNA, 2245 bp, Zea Mays
ctcccctcacagtcacactgtcacagtccgctcactctacatcactctgtccgggtcctccctccgccacttcaagccccctctgttcccatggccaccacgagcttccgctcactcctgctcctgttcctctccgtcctcggcgcctccgcgcgcaacgaggaggacgcccgcgcgctcgcggcgctcaagcgggcgctagacccggccggccgggtcctcggctcctgggacccctccggcgacccatgcgccggctcattcgtcggcctgacctgcggccgcgacggccgcgtcaccgccgtatcgctgcagggccgcgggctctcgggaaccctgccgccggcggtcgccgggctgcggcggctccaggggctgtacctccactacaacggcatcaaggggcccattccgcgggagattgggaagctgtccgagctcacggacctgtacctcgacgtgaaccatctcaccgggcccgtgcccgtggagattgctgccattgccaacctccaagtgttgcagcttggttacaatcagttgacaggcagcatacctccccagctgggcaacctgaataagctaaccgtgctcgcgatgcagtctaatcagcttgatggagccattccggcaacccttggtgagctaacacagctgagacggcttgatttgagcttcaacagcctgtttggttcaatcccatccaagattgctgaggttccattgcttgaggtctttgatgttcgcaacaacaccctttctgggagtgtccctgttggattgaggagactgaatggtggcttccagtatatgaataacaaagggctttgtggcgctggcttcagtttgctagagctttgcctttcttcagaggatggcctgaagcccagcaagcccgagccttttggaccagacggtactgtcaagacaaggcaggtgcctcaatcagcaaatccagacggctgctcaggcgctagctgctcaaagtccgcaaacgcgtcccaaggagttcttatcgtcgctgttgtcgcggcggtgatcggtgctgcattttgcggtttatttgcgttctcctggtaccgccggcagaaacagaagatcggaagctcgctggaggtttctgatagcaggctcagcaccgaccatttccagcagaaggaagcctgcagaaggagcgcctctcctttgatcagcgtcgagtactcgaacagctgggacccgttgtctgcaggtggggctggtgttggatcacccggtcaagtagttggtgatagcttcagattcaacctagaggagaggggaatgcttcctcgtgtatgacttcatggttaatggctgcctgtcgcggtatctggacgtcaaggatggttcttccggtgctaccgttcttgattggcctacaagagtttccatcatcagaggcattgcgaaaggaattgagtacctccacagcaagaagggcagcaagccaccggtggtgcaccagaacatatcggccgacaagatcctccttgaccaccacctggcgccgaggctctcggtgccggggctgcacaagctcctcgcagacgacgtcgtcttctcggccctgaaagcgagcgccgccatgggctacctcgcgcccgagtacgccgccacgggccggttcacggacaagagcgacgtcttcgcgttcggggtcgtggtcctccaggtcctcacgggaaggagggacgtctcccagctgaaggtcggcgccgccgctgtcagcgacctcggcggcctggtcgacgcgaacctcgacggcgcgttctcgagaacggaggcggcgaggctggcggctgttgctgcgtattgcacgagcgagacgccaggtcagcggccgaccatggaggccgtggttcagcagctcagcagcacccagtgagtgagtgagttacaagctgctgccgaggtgtagtgtctagcgaagtagcgagtgagtcgtgtgatgacacggtgatggaatggaagctaggctggctgggtattgcggtcagagatgatggattgtgggagcgatggtagtgaactgatgttttgtaatgacggggcaatgacccagttgccacttacatgctagtggagttttgattattgtagttaaccagtctactgatcgttgtatttgatgacccagttcctaatgtgtattaggttctgaatttgataagcatgtttgtttggctctaatatgtattgccttatataatttttataatatttt

SEQ ID NO: 82540 - DNA, 1474 bp, Zea Mays
gacgatttcacaacaaaaaaaggggacaacagtggttgataacctgttgaacagtgaggatgtccactacatgctcggggccttgaggactcttggtctctctgtcgaagcggacaaagctgccaaaagagctgtagttgttggctgtggtggaaagttcccagttgaggattctaaagaggaagtgcagctcttcttggggaatgctggaactgcaatgcggccattgacagcagctgttactgctgctggtggaaatgcaacttacgtgcttgatggagtaccaagaatgagggagagacccattggcgacttggttgtcggattgaagcagcttggtgcagatgttgattgtttccttggcactgactgcccacctgttcgtgtcaatggaatcggagggctacctggtggcaaggtcaagctgtctggctccatcagcagtcagtacttgagtgccttgctgatggctgctcctttggctcttggggatgtggagattgaaatcattgataaattaatctccattccctacgtcgaaatgacattgagattgatggagcgttttggtgtgaaagcagagcattctgatagctgggacagattctacattaagggaggtcaaaaatacaagtcccctaaaaatgcctatgttgaaggtgatgcctcaagcgcaagctatttcttggctggtgctgcaattactggagggactgtgactgtggaaggttgtggcaccaccagtttgcagggtgatgtgaagtttgctgaggtactggagatgatgggagcgaaggttacatggaccgagactagcgtaactgttactggcccaccgcgggagccatttgggaggaaacacctcaaggcgattgatgtcaacatgaacaagatgcctgatgtcgccatgactcttgctgtggttgccctctttgccgatggcccgacagccatcagagacgtggcttcctggagagtaaaggagaccgagaggatggttgcgatccggacggagctaaccaagctgggagcatctgttgaggaagggccggactactgcatcatcacgccgccggagaagctgaacgtgacggcgatcgacacgtacgacgaccacaggatggccatggccttctcccttgccgcctgtgccgaggtccccgtgaccatccgggaccctgggtgcacccggaagaccttccccgactacttcgatgtgctgagcactttcgtcaagaattaataaagcgtgcgatactaccacgcagcttgattgaagtgataggcttgtgctgaggaaatacatttcttttgttctgttttttctctttcacgggattaagttttgagtctgtaacgttagttgtttgtagcaagtttctatttcggatcttaagtttgtgcactgtaagccaaatttcatttcaagagtggttcgttggaataataagaataataaattacgtttcagtgg

SEQ ID NO: 82541 - DNA, 2259 bp, Zea Mays
gccgactgaaaatgcatacgtcgtcggaagtggcagctccaatgacgtggctcgttctcacgctcctgctctcatcagcggtttacttttgccttcttcctttgattttttgtccttcgattggatggcacccgccgacgatttacatttcacctacgcatacgcatgtgccgcaggccgccgccgtggagacggtgaaagtggtcaccaccccagtcttccctcagatccctcggctccaggcaagcaaagacttccaggtggtggtgcgcctcgaggcgccaccggtggcgcagcagaaggcgcgcgtccccgtcgacctcgccgtggtgctcgatgtgggtgccggtggcggtggcagcaccggctcggcgaggctggatgcggtgaagaaggccgtcaagtttatcatcgggcagatccatgacaacgaccgtctcgccgtcgtcgggccgtcgcccaaccgccggctagtcatcgggtttccgagcactcacgaggctcgacagaatgccgaaaaatccgtcgacgacctggagccccgtggcgagttcgcgtccggcgccggcttggaggaggccgtcaagctgatccgaacaactggagtctcagatcctcggggagttaccggcgacggcgagcgggagcagccgcgcgcgcttcgtcatcctggtgaccgacacggcggtgacggagggcagcggcggcagattcggcaagctgcggcgcgagctcctccccccggtgcacacgttcggcctcggcgcggggcacgaccccagggcgctgctctccatcgccagggagtcccagggcacctactccttcgtcgacgaccagaacacggacggcatcacgggcgccatcgccatctgcctcagcgggctcaaggacgtggtcgccgtcggcacgcgcgtccgcgttgaggcgcctgtcgggagcggggtcacgatcgagaggatcgagtcggggggggtgcctgctctgccttcgacgtcggcgatgacgacctcctcttccgtcgacaacggaggctgcgacaagcaacagctgctcaccgtcaccttcgccggccactacgccaccagggacgagggaggtgccacgtctccagcttctccaagtccgacagtgaccaccacagcaatcttgtacgtgcaaaggccgccgccggaagccctcgacgtcgccggcggcggcgcgctgttcagagtccccgtccccgcggtgatgaacctcatcgcgcggttcggcgtgctggagatggtgaccaccttcgtcgagaacgagatctggcggcttagttcttccagttccagcacggtggaagtggcgacaaagctgcggacgcagtgggagcagttcgtgcaggcccggcagttctggagcggcctggacctgggagtcctcgacgtcgaggtcaacaggatggcgagcatcctagaagcagcaggaacccgaatcggttcgtcggcgacggcctacatgctgtcgtggctgtcgagctaccagatgcagcggccgacggccatgggctcgccgagcatcgtggccgccgcgttcgtcaccgtgaagatgcagctcacgctgcagcaggcgaccatcgtcaccattcgtccacaaccatgcatcggcggctgcccggcgtgcgagtgcgggtgcgaggaccgctgcgtgcagccactgccgccgccggtgctcctgccgtccggacgcggcgacgacacctaccgcgtcaaccccgcgtacccgcagggcgtactgttcaacgccatcaaccaagcaatggagcagatgtacctggcgttggtccgggcgagcaatctgacgcgttgcgacgacgctgcccgcgtcgagttgttcctgccggcatgatccggcgaccgatcgacgacgactcacggggtacgggcaactcgccgccgatcgatccatcaaggatctagctagctgtaccgtctaccgtataccgttctagtaggctagtagtatacggtggtgtgcttaactatacaagctaagtactgtacgaccaagcttagcttgtcataaataagcaatcgatcatacgcactccataactagtacatgctcgtatgcgttgccttgtgctctcatttcctttctatccagaaaccctctacactacatctacacagttatgtacttatgttactcgccaacgagcattttcgatgcatggattggccttgcctccataatctactgctaggcagtttgatatcaatatttcgtaac

SEQ ID NO: 82542 - DNA, 2601 bp, Zea Mays
ctgattgatcttgctatcaagaacaactgcctgatcggtggtgacgacttcaagagtgggaagaccaagatgaaatcggtcctggttgatttccttgttggtgctggaataaagtatgtgctgtacgtgggagacagtaagagggctatggacgagtacacatcagagatcttcatgggcagcaagaacaccatcgtgctacacaacacctatgaggactcgctcctcaccacaccgatcatccttgatctggtgctcctggctgagctcagcaccaggatccagctaaaacctgagggaacggacaagttccactccttccacccggtggccaccatccttagctacctcaccaaggcaccactggaaatagtgaggagctgccattgttcaaggatagctgcagaaaattagacttacaacgtgtgtgattgagaaatgagaagcctcctcacacaacacagccgactgaaaatgcatacgtcgtcggaagtggcagctccaatgacgtggctcgttctcacgctcctgctctcatcagcggccgccgccgtggagacggtgaaagtggtcaccaccccagtcttccctcagatccctcggctccaggcaagcaaagacttccaggtggtggtgcgcctcgaggcgccaccggtggcgcagcagaaggcgcgcgtccccgtcgacctcgccgtggtgctcgatgtgggtgccggtggcggtggcagcaccggctcggcgaggctggatgcggtgaagaaggccgtcaagtttatcatcgggcagatccatgacaacgaccgtctcgccgtcgtcgggccgtcgcccaaccgccggctagtcatcgggtttccgagcactcacgaggctcgacagaatgccgaaaaatccgtcgacgacctggagccccgtggcgagttcgcgtccggcgccggcttggaggaggccgtcaagatcctcggggagttaccggcgacggcgagcgggagcagccgcgcgcgcttcgtcatcctggtgaccgacacggcggtgacggagggcagcggcggcagattcggcaagctgcggcgcgagctcctccccccggtgcacacgttcggcctcggcgcggggcacgaccccagggcgctgctctccatcgccagggagtcccagggcacctactccttcgtcgacgaccagaacacggacggcatcacgggcgccatcgccatctgcctcagcgggctcaaggacgtggtcgccgtcggcacgcgcgtccgcgttgaggcgcctgtcgggagcggggtcacgatcgagaggatcgagtcggggggggtgcctgctctgccttcgacgtcggcgatgacgacctcctcttccgtcgacaacggaggctgcgacaagcaacagctgctcaccgtcaccttcgccggccactacgccaccagggacgagggaggtgccacgtctccagcttctccaagtccgacagtgaccaccacagcaatcttgtacgtgcaaaggccgccgccggaagccctcgacgtcgccggcggcggcgcgctgttcagagtccccgtccccgcggtgatgaacctcatcgcgcggttcggcgtgctggagatggtgaccaccttcgtcgagaacgagatctggcggcttagttcttccagttccagcacggtggaagtggcgacaaagctgcggacgcagtgggagcagttcgtgcaggcccggcagttctggagcggcctggacctgggagtcctcgacgtcgaggtcaacaggatggcgagcatcctagaagcagcaggaacccgaatcggttcgtcggcgacggcctacatgctgtcgtggctgtcgagctaccagatgcagcggccgacggccatgggctcgccgagcatcgtggccgccgcgttcgtcaccgtgaagatgcagctcacgctgcagcaggcgaccatcgtcaccattcgtccacaaccatgcatcggcggctgcccggcgtgcgagtgcgggtgcgaggaccgctgcgtgcagccactgccgccgccggtgctcctgccgtccggacgcggcgacgacacctaccgcgtcaaccccgcgtacccgcagggcgtactgttcaacgccatcaaccaagcaatggagcagatgtacctggcgttggtccgggcgagcaatctgacgcgttgcgacgacgctgcccgcgtcgagttgttcctgccggcatgatccggcgaccgatcgacgacgactcacggggtacgggcaactcgccgccgatcgatccatcaaggatctagctagctgtaccgtctaccgtataccgttctagtaggctagtagtatacggtggtgtgcttaactatacaagctaagtactgtacgaccaagcttagcttgtcataaataagcaatcgatcatacgcactccataactagtacatgctcgtatgcgttgccttgtgctctcatttcctttctatccagaaaccctctacactacatctacacagttatgtacttatgttactcgccaacgagcattttcgatgcatggattggccttgcctccataatctactgctaggcagtttgatatcaatatttcgtaac

SEQ ID NO: 82543 - DNA, 866 bp, Zea Mays
ctgattgatcttgctatcaagaacaactgcctgatcggtggtgacgacttcaagagtgggaagaccaagatgaaatcggtcctggttgatttccttgttggtgctggaataaaggacaagttccactccttccacccggtggccaccatccttagctacctcaccaaggcaccactggttccgcccggcacactggtggtgaacgctctggcaaagcagagggcggtgctggagaacatcatgagggcctgcgttggcctggccctagagaacaacatgatcctagagtacaagtgagcgaagtggcgtggcctgcagctggatatgcaggaggctgcatggagggaactagagaggcgagaatagctgtgggattatgttggcttctcgtgttttcttttgtgttctttcctggtcatcgttgtcgcgctattgtattttatttgttggactctcgtgccaacaatgtcatcaaacgtgtatggtggtgcgtgcctgagactgacaatgtacgagggaacttctaccgacaggtgtggcacgtactctgcaatgacgagacaatgcaaattgtggcatatatcgaagtctacatgataatgatggttgaaatgtagtagtgaaacaactacataaaaataacaaaaattatgtatagccaggatcacaaatgtattatgaagcattttcttataacaatataagacacattttgtatataagttaccatggtattatatgtttccgttgcaacgcacgggcactatatatatataggtgttctctatgacaaaagtcctctctggaaattaaaagtgatgctaaaaattaagatttgcttgtggtatttaaaaaaaagagtaact

SEQ ID NO: 82544 - DNA, 1162 bp, Zea Mays
ctgattgatcttgctatcaagaacaactgcctgatcggtggtgacgacttcaagagtgggaagaccaagatgaaatcggtcctggttgatttccttgttggtgctggaataaaggtccaaggagatctccaagagcaacgtggtggatgacatggtctcaagcaatgccattctctatgggcctggcgagcatcccgatctcgttgttgtcatcaagattttatgtgctgtacgtgggagacagtaagagggctatggacgagtacacatcagagatcttcatgggcagcaagaacaccatcgtgctacacaacacctatgaggactcgctcctcaccacaccgatcatccttgatctggtgctcctggctgagctcagcaccaggatccagctaaaacctgagggaacggacaagttccactccttccacccggtggccaccatccttagctacctcaccaaggcaccactggttccgcccggcacactggtggtgaacgctctggcaaagcagagggcggtgctggagaacatcatgagggcctgcgttggcctggccctagagaacaacatgatcctagagtacaagtgagcgaagtggcgtggcctgcagctggatatgcaggaggctgcatggagggaactagagaggcgagaatagctgtgggattatgttggcttctcgtgttttcttttgtgttctttcctggtcatcgttgtcgcgctattgtattttatttgttggactctcgtgccaacaatgtcatcaaacgtgtatggtggtgcgtgcctgagactgacaatgtacgagggaacttctaccgacaggtgtggcacgtactctgcaatgacgagacaatgcaaattgtggcatatatcgaagtctacatgataatgatggttgaaatgtagtagtgaaacaactacataaaaataacaaaaattatgtatagccaggatcacaaatgtattatgaagcattttcttataacaatataagacacattttgtatataagttaccatggtattatatgtttccgttgcaacgcacgggcactatatatatataggtgttctctatgacaaaagtcctctctggaaattaaaagtgatgctaaaaattaagatttgcttgtggtatttaaaaaaaagagtaact

SEQ ID NO: 82545 - DNA, 1114 bp, Zea Mays
gttttatggtgttgcatttctgttcaaagacttattatacttgttgcatgtttgtagggctgattgatcttgctatcaagaacaactgcctgatcggtggtgacgacttcaagagtgggaagaccaagatgaaatcggtcctggttgatttccttgttggtgctggaataaagtatgtgctgtacgtgggagacagtaagagggctatggacgagtacacatcagagatcttcatgggcagcaagaacaccatcgtgctacacaacacctatgaggactcgctcctcaccacaccgatcatccttgatctggtgctcctggctgagctcagcaccaggatccagctaaaacctgagggaacggacaagttccactccttccacccggtggccaccatccttagctacctcaccaaggcaccactggttccgcccggcacactggtggtgaacgctctggcaaagcagagggcggtgctggagaacatcatgagggcctgcgttggcctggccctagagaacaacatgatcctagagtacaagtgagcgaagtggcgtggcctgcagctggatatgcaggaggctgcatggagggaactagagaggcgagaatagctgtgggattatgttggcttctcgtgttttcttttgtgttctttcctggtcatcgttgtcgcgctattgtattttatttgttggactctcgtgccaacaatgtcatcaaacgtgtatggtggtgcgtgcctgagactgacaatgtacgagggaacttctaccgacaggtgtggcacgtactctgcaatgacgagacaatgcaaattgtggcatatatcgaagtctacatgataatgatggttgaaatgtagtagtgaaacaactacataaaaataacaaaaattatgtatagccaggatcacaaatgtattatgaagcattttcttataacaatataagacacattttgtatataagttaccatggtattatatgtttccgttgcaacgcacgggcactatatatatataggtgttctctatgacaaaagtcctctctggaaattaaaagtgatgctaaaaattaagatttgcttgtggtatttaaaaaaaagagtaact

SEQ ID NO: 82546 - DNA, 798 bp, Zea Mays
cagcaaccagcaagcggcaagcgcgcgcacacaccaaacgcaactgcaactgcaactgcaagagcacgccacagcagaaaccaacagttccacacgaagcaaaaaaaggggaccctacccctctgccgatttccatccgccgccgtcgtctgtgaccgaccagaccatggacaagatcctggccttctccatcctgagctcgtcgccggcggacatctccgcggccggcctctcctcctcctcctccgccgcccggctctcgtggcgggctcggccccaggcggcggcggcggacgcggcgccaacgccgaggcaggagaaggcggccgaccagcgggccccggcggccgagcgccggcgggagacgcggccgcggttcgcgcccgagttcgacgggctgcactgcttcgagtccatcgtctccgcctgaacttcgaggggcctcctcgtcacatgccgcccccgcgcttggattcgttcctgtcggcggtcaccgagtgaaaaggcgacggcgacgagtaatttgtacagacctgttgtactgtataccgcacccaaaaagtgaatggattaccttcgtttcatactttggtttcgttataaggtttggtccgatgcgtcttcggccttcaattgtggcagaagatggaatttgtgggaggttcccatgaatgtgatcaccttcgattcgattcgacactgaaaaaaaaaaatgcagaggacaggaacaaataaatgttccccatcccacctggtaattgagcagttccctgtatgtacaacacgcggagtcccaat

SEQ ID NO: 82547 - DNA, 2317 bp, Zea Mays
atcgtggggggcgcgggcggaggagagcgtggcgagggccgagagcagcgcgcggccgggtcacgcaacgcgccccacgtactgccctccccctccgcgcgcgctagaaataccgaggcctggaccggggggggccccgtcacatccatccatcgaccgatcgatcgccacagccaacaccacccgccgaggcgacgcgacagccgccaggaggaaggaataaactcactgccagccagtgaagggggagaagtgtactgctccgtccaccagtgcgcgcaccgcccggcagggctgctcatctcgtcgacgaccagtggattaatcggcatggcggctctagccacgtcgcagctcgtcgcaacgcgcgccggcctgggcgtcccggacgcgtccacgttccgccgcggcgccgcgcagggcctgagggggggccggacggcgtcggcggcggacacgctcagcatgcggaccagcgcgcgcgcggcgcccaggctccagcaccagcagcagcagcaggcgcgccgcggggccaggttcccgtcgctcgtcgtgtgcgccagcgccggcatgaacgtcgtcttcgtcggcgccgagatggcgccgtggagcaagaccggcggcctcggcgacgtcctcggcggcctgccgccggccatggccgcgaatgggcaccgtgtcatggtcgtctctccccgctacgaccagtacaaggacgcctggaacggactacagggacaaccagctgcggttcagcctgctatgccaggcagcacttgaagctccaaggatcctgagcctcaacaacaacccatacttctccggaccatacggggaggacgtcgtgttcgtctgcaacgactggcacaccggccctctctcgtgctacctcaagagcaactaccagtcccacggcatctacagggacgcaaagaccgctttctgcatccacaacatctcctaccagggccggttcgccttctccgactacccggagctgaacctcccggagagattcaagtcgtccttcgatttcatcgacggctacgagaagcccgtggaaggccggaagatcaactggatgaaggccgggatcctcgaggccgacagggtcctcaccctcgacaacatcatgcgcctcaccggcatcaccggcatcgtcaacggcatggacgtcagcgagtgggaccccagcagggacaagtacatcgccgtgaagtacgacgtgtcgacggccgtggaggccaaggcgctgaacaaggaggcgctgcaggcggaggtcgggctcccggtggaccggaacatcccgctggtggcgttcatcggcaggctggaagagcagaagggacccgacgtcatggcggccgccatcccgcagctcatggagatggtggaggacgtgcagatcgttctgctgggcacgggcaagaagaagttcgagcgcatgctcatgagcgccgaggagaagttcccaggcaaggtgcgcgccgtggtcaagttcaacgcggcgctggcgcaccacatcatggccggcgccgacgtgctcgccgtcaccagccgcttcgagccctgcggcctcatccagctgcaggggatgcgatacggaacgccctgcgcctgcgcgtccaccggtggactcgtcgacaccatcatcgaaggcaagaccgggttccacatgggccgcctcagcgtcgactgcaacgtcgtggagccggcggacgtcaagaaggtggccaccaccttgcagcgcgccatcaaggtggtcggcacgccggcgtacgaggagatggtgaggaactgcatgatccaggatctctcctggaagggccctgccaagaactgggagaacgtgctgctcagcctcggggtcgccggcggcgagccaggggtcgaaggcgaggagatcgcgccgctcgccaaggagaacgtggccgcgccctgaagagttcggcctgcaggccccctgatctcgcgcgtggtgcaaacatgttgggacatcttcttatatatgctgtttcgtttatgtgatatggacaagtatgtgtagctgcttgcttgtgctagtgtaatatagtgtagtggtggccagtggcacaacctaataagcgcatgaactaatttgcttgcgtgtgtagttaagtaccgatcggtaatttttatattgcgagtaaataaatggacctgtagtggtggagtaaataatccctgctgttcggtgttcttatcgcttctcgtatagatgttatatagagtacattttctttctgaatcctacgtttttcaagtgtttttgaattaattcctgtgaaatttctat

SEQ ID NO: 82548 - DNA, 2146 bp, Zea Mays
gtatcgtggggggcgcgggcggaggagagcgtggcgagggccgagagcagcgcgcggccgggtcacgcaacgcgccccacgtactgccctccccctccgcgcgcgctagaaataccgaggcctggaccggggggggccccgtcacatccatccatcgaccgatcgatcgccacagccaacaccacccgccgaggcgacgcgacagccgccaggaggaaggaataaactcactgccagccagtgaagggggagaagtgtactgctccgtccaccagtgcgcgcaccgcccggcagggctgctcatctcgtcgacgaccagtacaaggacgcctgggacaccagcgtcgtgtccgagatcaagatgggagacaggtacgagacggtcaggttcttccactgctacaagcgcggagtggaccgcgtgttcgttgaccacccactgttcctggagagggtttggggaaagaccgaggagaagatctacgggcctgacgctggaacggactacagggacaaccagctgcggttcagcctgctatgccaggcagcacttgaagctccaaggatcctgagcctcaacaacaacccatacttctccggaccatacggggaggacgtcgtgttcgtctgcaacgactggcacaccggccctctctcgtgctacctcaagagcaactaccagtcccacggcatctacagggacgcaaagaccgctttctgcatccacaacatctcctaccagggccggttcgccttctccgactacccggagctgaacctcccggagagattcaagtcgtccttcgatttcatcgacggctacgagaagcccgtggaaggccggaagatcaactggatgaaggccgggatcctcgaggccgacagggtcctcaccgtcagcccctactacgccgaggagctcatctccggcatcgccaggggctgcgagctcgacaacatcatgcgcctcaccggcatcaccggcatcgtcaacggcatggacgtcagcgagtgggaccccagcagggacaagtacatcgccgtgaagtacgacgtgtcgacggccgtggaggccaaggcgctgaacaaggaggcgctgcaggcggaggtcgggctcccggtggaccggaacatcccgctggtggcgttcatcggcaggctggaagagcagaagggacccgacgtcatggcggccgccatcccgcagctcatggagatggtggaggacgtgcagatcgttctgctgggcacgggcaagaagaagttcgagcgcatgctcatgagcgccgaggagaagttcccaggcaaggtgcgcgccgtggtcaagttcaacgcggcgctggcgcaccacatcatggccggcgccgacgtgctcgccgtcaccagccgcttcgagccctgcggcctcatccagctgcaggggatgcgatacggaacgccctgcgcctgcgcgtccaccggtggactcgtcgacaccatcatcgaaggcaagaccgggttccacatgggccgcctcagcgtcgactgcaacgtcgtggagccggcggacgtcaagaaggtggccaccaccttgcagcgcgccatcaaggtggtcggcacgccggcgtacgaggagatggtgaggaactgcatgatccaggatctctcctggaagggccctgccaagaactgggagaacgtgctgctcagcctcggggtcgccggcggcgagccaggggtcgaaggcgaggagatcgcgccgctcgccaaggagaacgtggccgcgccctgaagagttcggcctgcaggccccctgatctcgcgcgtggtgcaaacatgttgggacatcttcttatatatgctgtttcgtttatgtgatatggacaagtatgtgtagctgcttgcttgtgctagtgtaatatagtgtagtggtggccagtggcacaacctaataagcgcatgaactaatttgcttgcgtgtgtagttaagtaccgatcggtaatttttatattgcgagtaaataaatggacctgtagtggtggagtaaataatccctgctgttcggtgttcttatcgcttctcgtatagatgttatatagagtacattttctttctgaatcctacgtttttcaagtgtttttgaattaattcctgtgaaatttctat

SEQ ID NO: 82549 - DNA, 2377 bp, Zea Mays
agctatatataaccacctccattgtagcttgtttccttgtacccggcttccctcgtcaccggctccggctccggcaccggctcaatacaatcccatcaccgatcattcattccctttgcctacgactgctacctccccctccttccatcttcgatagacgaccaaataatggcggtattcgacgtctgaatcctcgtactgatcttatactgcatacagacagacagacccttcttcttccttagttccctatagctagctctagctaggagaccgatcatgagcatctcggtgaacgggcagtcggtggtgccgccggggttccgtttccacccgacggaggaggagctgctgacctactacctgaagaagaaggtggcgtcggagcgcatcgacctggacgtcatccgcgacgtcgacctgaacaagctggagccatgggacatccaagagaagtgccgcatcggttcgggcccccagaacgactggtacttcttcagccacaaggacaagaagtacccgacggggacgcgcaccaaccgcgccaccgccgccgggttctggaaggccaccggccgcgacaaggccatctacgcctcgccgggcgcccgccgcatcggcatgcgcaagacgctcgtcttctacaagggccgcgccccgcacgggcagaagtccgactggatcatgcacgagtaccgcctcgaggcgcccgtcgacgccggcgccggcgccgcgcaccacctgctgctccccgccgccgaacatcctccctactacacctcgccgccgcaggcgccttcttctactactaccgcaacgatccgtggcgcggcgggagaccaagcggcgcaggagcaggaggggtgggtgatctgcagggtgttcaagaagaagaacctcgtgcaccacggccagagcagcggcgtgaagcagcaggcagcaggagacgaccacgcggcgtcccatacggcggcggcggcagcgcacatggacgagagcagcccgagccagtgctcgtcggtgaccgtcatcagcgaccacgtgcacgccaacgttaacgacaagcagcagcaggcgcaggcgtcgttgctgatgatgcacacgcaccactccgccagcagcgacgacgacgcgctggaccacatcctgcagcagtacatgggcggcggcaggcaggcgcccgcgccggacaccaagccggcgctgctggagcagctggaccatctgcaccaccaccttgccgcagcgcctactactagggccgccgccggcttctactacgggaagttcatgaagctcccgcccctcgagcacgccggcctgccgccaagcccaccaccaccaggagcgcgcgagtacggcgccgccgccgccgccggctgggacgacgacgacgacgcgctggaccgcctcgccgcctacgaccacctcaacggcctctccaacgacgcgtccaagaacatggccgccgccgccgtggacggcgacctgtggagcctcgcacggtccgtgtcggcgctgcacgcggacttgaccatgaacaacaacgtctagctcccgaccaacaacaacagggccccgatacacatccatatggcgtgtgcatgcatgcatgcacgcattgcataccgcgcgcaccactaaccactcgaccagcatgcatgcatacgtgcgcaccccacccgcgcccggggccgctagtgcgtcgtgctcccgtagtgcgtgcatgcatggccgccgcacgtacgtattgcacgctcgctcgcgcgtacgtgtacgtacgtacgtacgtgcgcgaataagctagctagccctaggatcggaaacatatgtatgcatatccattgcatggccggatgtacatcaggagctgctgctggtgtatgtccgccgccgccgtccaaactccaaagtgagctgagatcgatcgatcgagctcgctcgctccaggtgtgcagtacgtacgtacgtaagcgcctgtgtatgtgtaagcagacagcgtggtagtagctctagctagtagaacatacttacacacactatatactgcataccgtttgtacctatcatatatagattactactgtattattgcaaaccgctttggggggtttttttagggagtgcagtgaggtgtgatatcatttcacctaatttaatttgctagtgctacctcgtgtgttgcatgaattgttaactaccgtgacgatttggacccgttaccggtgttaaatgcatagaaagtcaaaatctctactaaaattttcaaatcccatccagtccgtgtggtgcaggaataataaccgaacaaaagcctaaaacgtcttcgatttaagggcatgtatgaatccaagagctaaacaaaaaagggatataa

SEQ ID NO: 82550 - DNA, 1612 bp, Zea Mays
atgatactgacttgccatattagtctcaaattctcaataatattgacccaggtagcaggtccagatccagcagaaagacaagtgaagggcagccttagagcagggtgcaggcgtacagcatcaacaggacatgcaaaaaggcacaaaagaacatgcagataagaacacacaagagcataaatacaaaacagaataaaagtatgaaacaactcaaacagcagattaaaccgccatgggagtggtgtggtggtgatgatatccgaataagtatccgttttcatccctaatcccaatgtaagtggaactgtgctggttgtcacatatccaaatgaccatcctagtcagagccacaaacaaaaagggatgattaaaataggcttcatgagggaagagggttagctctgatagatactattgctcaatggcaggcaatttataaaaggttgaacatcatcgcccctcatcagcaatccattcatcggtccgagtccatttccatggccaacatggttggactaaataaattttcacttgggacttcgctcaagtcagaaaaacacctctttatatctccagatcctgaattcctgatcccttacgcattgcccatccaaatgaaccgaggtggtgaggatgaggagcatacggctaggaacattcggagcaaagcagagtggcaaggtatcatgtgctcaaagcagaatatcagatcgcagcacacaatgccaaccctatggcaggcacggaggcacccgtgtcttcgttggacccttcgcgccggcaacaagcacccagcagggagaaatttggaattgtgtcattatgaaacgtgggttttgctatattgccatcaaatgaatgggtttcatccagatgccattatgaaccatggtgtacacgctaaaatgtcatttggttgtttaacaaaaactaaaataactccaatttaattgtagaaaaccaacagattgtcttgcccctctcctccttttccctttctctacgtcacgtgtgtttcttctttccagtgttgagcccgcgcctgcaaggggcttgcgctggtgctcttcggccccgcgccacgcctgcagctggttgcccgcgccttgcagctctcccgccaagtgtgcgccgctcatcctcatcagacgatggaggcgtgctactgcttgtcctcatcggcgtcgtcgcccttcagcgtccatcctcgtcgggaagctggtgaacaacatgatctcgtggcgaggggactcggcgttgcgcgacggcgaggatgccaagctggacctatccaggggcatgtacgacacaggcgaccacgtgaagttcgggacgcgtcggcgttcctggtgtacaagcccgccaacgcgacgtacatgtcttcgctcctcctcgaccacatcgagcggctgtttgcattcgccgacgcataccggggctcctacacgcgcacgttcctggagctcagcgactactacaactccactatgtaccaggacgagctcatgtagcctatgggcggccgcctgtaccatgccgccggcaaccgcagctacctcatgagattccttgggtccagcctccgcgtcgagtgcacgcgagatgcttgtcg

SEQ ID NO: 82551 - DNA, 3606 bp, Zea Mays
cagcatcacccttattcaatcatgcaaaacgacttcacatttctcttgcagcgcaacttagtcatctcaatgtaagtggaactgtgctggttgtcacatctctgaatgactatcctaggcagaaccacaaacaaaaaggggtgattaaaataagcttcaagaggagagagggttagctctaattagacactcgtagctgccttcattgttcagtgccatgcaatccagaaaaggttgagcatcatcgcccctcatcactcatcagccgttcagcactccattcacagaataggacccctttccatgtccaacgtggtgcccaggtctttgttggacccttcgccaggtttgtcaggcacttttccggcaatgagcatccactaggtatgcccttcctgcggtgcagaacacacacacacacacacagagagagagagagagaggagacaaggtgaacacgagaagaaaaggcaggggtgaacagggtcatcagagcagatggcaacacaggcaacagcagtggatctggggatcatcactgcagcgcatctgtgctaaagagtaatgacgagagaatcatcatgaccaatacatgtatccaatccagccagccagcagtagacttgtttttttttgggtgactgctagaggcgcaaggcatcctagttaagaagcaaacagagatagaaccaccttctagtaaggcatgggccatcctagttaagcagcaaacatcataaaatatcccagtccagctcataagatggtagtagagtgcagaagctcgttaatggaaagttgaaccatcatagccacccaagtgcagtatgaaacaaaaaaacatagtcataaagcatcgcagcataaaccatacaaaaagggcttagcatcacctgtgctcaatcatagaaaccaggtcctcccttctcttgctgcccaatttactcatcctaatgtgagtggaactgttatgaccggcagcacaacagccctaataaaatcagctagttgtttagatggataagcgccagtcgtagtctggggatagagtttgtttggatgtatgagaacaaacagagtttgtttagaaggataagaaattggttagataaaatattagataaggacggttgctaatgtacccttcgatcaatgaaagagtaagcaggcaagtatcttgcccgtgcttccccaaacccatatactgctcgccgcatacggttcatccaaggtactgttcattcgcgtcactattcacctacaactactgttcgccacgctgcgtgaacagttcctcgtcccttcgactcttccagctagcagccacggtgcccaagctccgtggtcctgagcctcaaccttcccctcaccacacataccacctcagaagtcgcagttccaacaggaactgtgcttgttgtcatccaagtgaccatcctaggcaaaaccacgaacaaaaagggatggctgaacaggcaagtgtgtgcccctatggcaagtcaacttacctgattagtgattactcgcctagcactatctgtgtgatagtccaagttggaattgacttgattagagcaggagctggaagtgaaaatggcacaaacattcccagctgtggtgctgattccttgcttaacaaggttctgtaagccgtaaaacctagctttcatagctatcaacgagtcgttacctagctggagattaacttcctacctttggaactaatcagttgtctctcaacactgaaaagctctaaggattcagcttttgcagcaagtgattctgtcgccagcaaagtgccggattaagacctggcaaagggcccaacaagaccaaggcacctgcatagagcggcagctgccacccagtgatcaacatgaaagagagcacaagcggagagaagaggaaggggagaaaaggcaagggtgaaggagagaagatggcaaaaaagttaaatgttccagaggcaactgcaggggaaggagatcaccaatgcagcgaatcaggagaagtattcatgttccagccatcagtagcgaagatatgtgaacaaccactaatcccaatcaaagcatctccaatatttcccagaacccactcccaatcttggtttttttggcaggattgaaagaaaaccctctccaacaacttgtcatcccaactcccaatgtttccgcacttggcaaaatcgattgatatgcatgtgaacaacacagaaagaaatagtctgctcatatgtgaatagcacatgcatagagaagctttcacgcacatgaccagaaagtacagtcgtgctcatggctatgatgtagcatgtgtatccgtttgactgatcaatcaagattcatcaaggccatgggacgtgattaggaccactaatgcctcatgccacagaagtaaggacacattagcgaaccacttataagtattagtggacgattgaatctagttaaatgagtgtggaaaagaaaatcgttctttagaacaaaatgagcaattcatccaactaagtttgagcatccaaaccaaaaacacgaggaatctatgcaccgaatttacccaagtcaagaatattgtgacatcaaatcaatgttgacaattcgccccatcagtatcatgatcctgatcccaagttgaaatcactgaaaatggtaggatacacagacgaaatagactcgtaaacaaaagtatatgacagaacaaaaagagtaatgtcatgttggatggctcagatgtgccccagtatcaacacaatacttgcagaagaaacgtgtactccctccatccctttctaaatgaactttttgagtaggattgttcagttggatatatactacaccaccaccatagcaatgacaacaactagttgcaaaccggttgcttgtacatggtacaagccatcctagtttagcagcatattgagcaaaataccaaaggtaagaatccagaatgctaaaacgtaatagctttatggagctggggcatttgatcgtcacagccactgaagaacagttccaaacaagaaaggaagaccatcagacaagcgacaaaaaatatctgaagaacaaagggatgcataggaactaccaaaacggaccaatgttgcaccctgcacagctgtaatagttatgatggaccagaagaagtaattgggaaaacacaatgccctcttatttccaaactacccagttccaacagtagtgagacataactcatgaaattctgcaataaattctgggatgaacaaagttatcagaaagtatccatcatgcaaaacacggctattgcaaacaattatagcagaatcaatgtcagaaactaggaaacatctcaacctactgataaatggaatccaaaggtaaatgcatggtgtttgacaaatgcaacaaaaggaatggagttagaaaatatgtaggttagacaagaaaacacacagcaacaacatattcaacagaaaagggaagagacaacataaactcatgtttcttattcccttttctttgcatgtatgtgttgaaaggggggctcagcttcgcctttgcccaatcatttaaccttatccccatcatcttttatcaccacatcaacttctcctgacatgataag

SEQ ID NO: 82552 - DNA, 1618 bp, Zea Mays
cagctgcaaaatgaatagcatttgtaaacaggcttgtaagatttattactgatccgtgaagcggcaacggcagtagagaagtccaagcaaaccgagaagaggtggcggccaccgttgctaccacgtgttggagcgagacggggaatggcgcagcggtggccggtgccccagacaagtgaagagcgccaacaggacatggaaaagagcacaaaagaacaagacgacacagtacaagatacaaaacggaatagaaagtatgaaccgactcaaagagcacattaactggatcagcggcaatacaaaccgccggagcgaggggtgcagtcgtactagaagaaaaggaggtaacttgagtgactcaaatctaaccattatcagcacaatggcaattgtgtaagaaaaaaaaacaaaccactcaatctgacatgaacaagaaaaaaaaagaacttgctacaactcccgaatctatcaacgcttggaaaaaacacgcagagatacacggatgaccgctactccctatcatggggaggtgaatttgttgtcaaggatgcacaacctgtcttttcttttggtgactgctagagatgctctaaggtgcaaggcatcctagttaaagcagcaaacagatatagaatcaccttctagtaaggcatgggccatcgtagtaaagcagcaaacgtcaaagaatatcccaggtatcatcagctcagaagatggtagagtgcagaagctctgtaatggaaagcagaacaatcttagccactcaagcgcggtatgaaacaaaaaacagagccataaagcaccgctgcataaaccatacgaaaggggctcagctcagcatctcctttgctcaatcatagaaatcaggccctcccttctctttctgcccaatctactcatcctattgtgagtggaactgtcctggttgtcatatatccatccaggtgaccatcctaggcagaaccacaaacaaaaagggattattaaataggctaccagacacgcagctgccttggttgctcaatggcgtgcgactccgaaaaggttgagcatcatcgcccttcgtcagcagtccatttcacatattcgagtccatttccatgtcctctaagagcaaggttaacaacatagcagccttgattgctcaaaggtgcttgtgtcaaccatgatacagatcattgcctcacattggaattttatttcatcgttattgagcggcacttaggtaggaacttatgacatggaactaacttagcatatcagtcctacaaacattaaccaagggcgcaggttcaaatccagcagcaaggcaaatgaagaacagcccaaaatcagggcatatcatcaacaggacttgcaaagtagcacaaaagaacaagcagatatgagcacacgagtacaaaacagaataaaagctttaaccaattcaaagagcagattagctgtctcattagctgcaacatcagcaaaaccaatcattaaaacaccatgggaattgggggtaagggggcaggagtattcagacagtggtactaggaggaaaaaggtcacttgagtggctcagattcaaccattatcatcatagcaagtgcaatttatagtggaagcacaatgtaac

SEQ ID NO: 82553 - DNA, 2293 bp, Zea Mays
aaaccctggttctaccacgcgactaactgagccgccgacgccaggcctccacgccgcatccgcgtgaccgcgcctccgagctccatagccccgggccgccggcgccgggccatcgtgatctcgtccgcctcccagcatcgaccggacctgcccgcagcccgcgcccaggccatcgcgccgccgacccgagcttcgccaggcgcctaggccgctcgcccgcccggccggcaggacgactgggcgagctcctccccgcggaggcggggacggcggacccgcccccaggccgagtcgccgagctccgtcccgcgcgggcgcccccctgcccagtcccagccgccccgctcctgtcccggccaggctcagctccgccctgttccggcctctgtacagcatccaggcacgacgacgcgagacgagatggcaggcctcgaacggcctcgccgccgccctccgccagaccccgtcgccgtgctccggggccaccgcgccgcagtcaacgacgcctgcttccacccctccctccccctcctcttctccggcgcggccgacggggagctcagggcctgggacaccgcgagccaccgcaccgcttcctctgtgtgggctcatgctgggtcggtgggagtgtattctgtcgctgctggtgctggacttggcaataagataatcagccagggcagggatgggacttgtaaatgttgggcgattgaagaagctgggctttcaaggaagccactacttacaatcaaaacaagtacataccatttctgcaagatgtcactggtgaagtcttcttttacacatgccactgaatctggctctagcagctcagctagtgacgtggaaccacaaatagtgccaactgaaaatgcagaatgccatggtgtaaaccctacaataggcccccaagaacatgatcaatgcactacctctaatgggcataatatgctggcaattgctggtcaagaatcctctcaggttgagctttgggacattacaagtgctagaaagatcgtaaccttgccccaaacatgtagtgccaatgcgacagatcatcctactaagaaaaaggttatgaagatggaagcactctttggtgggatgtacgaaagcctggattacctttatcttcagtgaagtatcattcagaatcaggtgtgcagctttatccattgctattgatggattttgcaatggtggaatctcaggaggtgctgatgataaagtagtcatgttcacgctcgaccatccaaagggcacatttattcttaggaaagaaatagaactcgagcgaccgggtattgctggcacagcaattcgtccagacaacaagatcgctgcaaccgctggctgggatcacaggattcgagtgtacaactacaacaaaggaaatgctctagccgtgttgaagtatcacagtgcttcgtgcaatgcagtgaccttctcatctgactgcaagctcatggcttcctgctcggcggataccacggttgcgctgtgggacctctatcccccaaaaccccaaagcaaagcggacatcacagaaacagacgaggcctcctgctagctcatgtagtttgggccttcctgataccttctggcagaattttggagcttccgtgcaatgaaaatctgaacttgtcgcaacagtgcaagcgatttattctttttcgtcaaagaaaagagtaagttatgatgtgccttccacagggaaacgcaaacgtatgcatgcaactgttgttaggaacggttctcttgatttctttatttttcattgaaattctactcggtttcgtggaacagttgtagtgtctcaagagcatgaaattgatttaaaggcaaggcagttgaagaactgactctttgaatactcagatgattgatttgaacaaatttctgcaaatttccagtacactgtacacctacatttgctactgttcgatccaatggcagtactgaaccgggatgcagttcttgctgttgtgcatgtccaggaaagagggtatcgtatcccaatgttccatgtagttggggggttctattgctagaaaagaacattagtccttgctgactcggtgactccaatgcgatgcgagcccatgaacgacggtcctaaccttcacgcgcaacagccgcaatcgccgctcgttctagttctttggcgtcggccagccacggccgcctcaacgccgccgtatcttcaacgtcacttgcggcatccgacgacggagccgaggtgccatcgaaggtgccgtcgaacggcgcctcgcagaaggccatcgcggccacg

SEQ ID NO: 82554 - DNA, 2167 bp, Zea Mays
aaaccctggttctaccacgcgactaactgagccgccgacgccaggcctccacgccgcatccgcgtgaccgcgcctccgagctccatagccccgggccgccggcgccgggccatcgtgatctcgtccgcctcccagcatcgaccggacctgcccgcagcccgcgcccaggccatcgcgccgccgacccgagcttcgccaggcgcctaggccgctcgcccgcccggccggcaggacgactgggcgagctcctccccgcggaggcggggacggcggacccgcccccaggccgagtcgccgagctccgtcccgcgcgggcgcccccctgcccagtcccagccgccccgctcctgtcccggccaggctcagctccgccctgttccggcctctgtacagcatccaggcacgacgacgcgagacgagatggcaggcctcgaacggcctcgccgccgccctccgccagaccccgtcgccgtgctccggggccaccgcgccgcagtcaacgacgcctgcttccacccctccctccccctcctcttctccggcgcggccgacggggagctcagggcctgggacaccgcgagccaccgcaccgcttcctctgtgtgggctcatgctgggtcggtgggagtgtattctgtcgctgctggtgctggacttggcaataagataatcagccagggcagggatgggacttgtaaatgttgggcgattgaagaagctgggctttcaaggaagccactacttacaatcaaaacaagtacataccatttctgcaagatgtcactggtgaagtcttcttttacacatgccactgaatctggctctagcagctcagctagtgacgtggaaccacaaatagtgccaactgaaaatgcagaatgccatggtgtaaaccctacaataggcccccaagaacatgatcaatgcactacctctaatgggcataatatgctggcaattgctggtcaagaatcctctcaggttgagctttgggacattacaagtgctagaaagatcgtaaccttgccccaaacatgtagtgccaatgcgacagatcatcctactaagaaaaaggttatgaagatggaagcactctttggtgggatgtacgaaagcctggattacctttatcttcagtgaagtatcattcagaatcagctttatccattgctattgatggattttgcaatggtggaatctcaggaggtgctgatgataaagtagtcatgttcacgctcgaccatccaaagggcacatttattcttaggaaagaaatagaactcgagcgaccgggtattgctggcacagcaattcgtccagacaacaagatcgctgcaaccgctggctgggatcacaggattcgagtgtacaactacaacaaaggaaatgctctagccgtgttgaagtatcacagtgcttcgtgcaatgcagtgaccttctcatctgactgcaagctcatggcttcctgctcggcggataccacggttgcgctgtgggacctctatcccccaaaaccccaaagcaaagcggacatcacagaaacagacgaggcctcctgctagctcatgtagtttgggccttcctgataccttctggcagaattttggagcttccgtgcaatgaaaatctgaacttgtcgcaacagtgcaagcgatttattctttttcgtcaaagaaaagattgtagtgtctcaagagcatgaaattgatttaaaggcaaggcagttgaagaactgactctttgaatactcagatgattgatttgaacaaatttctgcaaatttccagtacactgtacacctacatttgctactgttcgatccaatggcagtactgaaccgggatgcagttcttgctgttgtgcatgtccaggaaagagggtatcgtatcccaatgttccatgtagttggggggttctattgctagaaaagaacattagtccttgctgactcggtgactccaatgcgatgcgagcccatgaacgacggtcctaaccttcacgcgcaacagccgcaatcgccgctcgttctagttctttggcgtcggccagccacggccgcctcaacgccgccgtatcttcaacgtcacttgcggcatccgacgacggagccgaggtgccatcgaaggtgccgtcgaacggcgcctcgcagaaggccatcgcggccacg

SEQ ID NO: 82555 - DNA, 2409 bp, Zea Mays
aaaccctggttctaccacgcgactaactgagccgccgacgccaggcctccacgccgcatccgcgtgaccgcgcctccgagctccatagccccgggccgccggcgccgggccatcgtgatctcgtccgcctcccagcatcgaccggacctgcccgcagcccgcgcccaggccatcgcgccgccgacccgagcttcgccaggcgcctaggccgctcgcccgcccggccggcaggacgactgggcgagctcctccccgcggaggcggggacggcggacccgcccccaggccgagtcgccgagctccgtcccgcgcgggcgcccccctgcccagtcccagccgccccgctcctgtcccggccaggctcagctccgccctgttccggcctctgtacagcatccaggcacgacgacgcgagacgagatggcaggcctcgaacggcctcgccgccgccctccgccagaccccgtcgccgtgctccggggccaccgcgccgcagtcaacgacgcctgcttccacccctccctccccctcctcttctccggcgcggccgacggggagctcagggcctgggacaccgcgagccaccgcaccgcttcctctgtgtgggctcatgctgggtcggtgggagtgtattctgtcgctgctggtgctggacttggcaataagataatcagccagggcagggatgggacttgtaaatgttgggcgattgaagaagctgggctttcaaggtatcatttgctcacgctatttgagttcaaaaaacaactcatttttcttcaggagaggaagccactacttacaatcaaaacaagtacataccatttctgcaagatgtcactggtgaagtcttcttttacacatgccactgaatctggctctagcagctcagctagtgacgtggaaccacaaatagtgccaactgaaaatgcagaatgccatggtgtaaaccctacaataggcccccaagaacatgatcaatgcactacctctaatgggcataatatgctggcaattgctggtcaagaatcctctcaggttgagctttgggacattacaagtgctagaaagatcgtaaccttgccccaaacatgtagtgccaatgcgacagatcatcctactaagaaaaagggactatgcatggctgtgcaagctttcatcccccatgaatccgcaggctacgtaaatattttgtcaagttatgaagatggaagcactctttggtgggatgtacgaaagcctggattacctttatcttcagtgaagtatcattcagaatcagctttatccattgctattgatggattttgcaatggtggaatctcaggaggtgctgatgataaagtagtcatgttcacgctcgaccatccaaagggcacatttattcttaggaaagaaatagaactcgagcgaccgggtattgctggcacagcaattcgtccagacaacaagatcgctgcaaccgctggctgggatcacaggattcgagtgtacaactacaacaaaggaaatgctctagccgtgttgaagtatcacagtgcttcgtgcaatgcagtgaccttctcatctgactgcaagctcatggcttcctgctcggcggataccacggttgcgctgtgggacctctatcccccaaaaccccaaagcaaagcggacatcacagaaacagacgaggcctcctgctagctcatgtagtttgggccttcctgataccttctggcagaattttggagcttccgtgcaatgaaaatctgaacttgtcgcaacagtgcaagcgatttattctttttcgtcaaagaaaagagtaagttatgatgtgccttccacagggaaacgcaaacgtatgcatgcaactgttgttaggaacggttctcttgatttctttatttttcattgaaattctactcggtttcgtggaacagttgtagtgtctcaagagcatgaaattgatttaaaggcaaggcagttgaagaactgactctttgaatactcagatgattgatttgaacaaatttctgcaaatttccagtacactgtacacctacatttgctactgttcgatccaatggcagtactgaaccgggatgcagttcttgctgttgtgcatgtccaggaaagagggtatcgtatcccaatgttccatgtagttggggggttctattgctagaaaagaacattagtccttgctgactcggtgactccaatgcgatgcgagcccatgaacgacggtcctaaccttcacgcgcaacagccgcaatcgccgctcgttctagttctttggcgtcggccagccacggccgcctcaacgccgccgtatcttcaacgtcacttgcggcatccgacgacggagccgaggtgccatcgaaggtgccgtcgaacggcgcctcgcagaaggccatcgcggccacg

SEQ ID NO: 82556 - DNA, 2307 bp, Zea Mays
aaaccctggttctaccacgcgactaactgagccgccgacgccaggcctccacgccgcatccgcgtgaccgcgcctccgagctccatagccccgggccgccggcgccgggccatcgtgatctcgtccgcctcccagcatcgaccggacctgcccgcagcccgcgcccaggccatcgcgccgccgacccgagcttcgccaggcgcctaggccgctcgcccgcccggccggcaggacgactgggcgagctcctccccgcggaggcggggacggcggacccgcccccaggccgagtcgccgagctccgtcccgcgcgggcgcccccctgcccagtcccagccgccccgctcctgtcccggccaggctcagctccgccctgttccggcctctgtacagcatccaggcacgacgacgcgagacgagatggcaggcctcgaacggcctcgccgccgccctccgccagaccccgtcgccgtgctccggggccaccgcgccgcagtcaacgacgcctgcttccacccctccctccccctcctcttctccggccagggcagggatgggacttgtaaatgttgggcgattgaagaagctgggctttcaaggaagccactacttacaatcaaaacaagtacataccatttctgcaagatgtcactggtgaagtcttcttttacacatgccactgaatctggctctagcagctcagctagtgacgtggaaccacaaatagtgccaactgaaaatgcagaatgccatggtgtaaaccctacaataggcccccaagaacatgatcaatgtatcgaggcaacacttaaaccgctcttgtaaagtcagataacttttttttggtgttattgaccttaacaacatttgggttggctaggcactacctctaatgggcataatatgctggcaattgctggtcaagaatcctctcaggttgagctttgggacattacaagtgctagaaagatcgtaaccttgccccaaacatgtagtgccaatgcgacagatcatcctactaagaaaaagggactatgcatggctgtgcaagctttcatcccccatgaatccgcaggctacgtaaatattttgtcaagttatgaagatggaagcactctttggtgggatgtacgaaagcctggattacctttatcttcagtgaagtatcattcagaatcagctttatccattgctattgatggattttgcaatggtggaatctcaggaggtgctgatgataaagtagtcatgttcacgctcgaccatccaaagggcacatttattcttaggaaagaaatagaactcgagcgaccgggtattgctggcacagcaattcgtccagacaacaagatcgctgcaaccgctggctgggatcacaggattcgagtgtacaactacaacaaaggaaatgctctagccgtgttgaagtatcacagtgcttcgtgcaatgcagtgaccttctcatctgactgcaagctcatggcttcctgctcggcggataccacggttgcgctgtgggacctctatcccccaaaaccccaaagcaaagcggacatcacagaaacagacgaggcctcctgctagctcatgtagtttgggccttcctgataccttctggcagaattttggagcttccgtgcaatgaaaatctgaacttgtcgcaacagtgcaagcgatttattctttttcgtcaaagaaaagagtaagttatgatgtgccttccacagggaaacgcaaacgtatgcatgcaactgttgttaggaacggttctcttgatttctttatttttcattgaaattctactcggtttcgtggaacagttgtagtgtctcaagagcatgaaattgatttaaaggcaaggcagttgaagaactgactctttgaatactcagatgattgatttgaacaaatttctgcaaatttccagtacactgtacacctacatttgctactgttcgatccaatggcagtactgaaccgggatgcagttcttgctgttgtgcatgtccaggaaagagggtatcgtatcccaatgttccatgtagttggggggttctattgctagaaaagaacattagtccttgctgactcggtgactccaatgcgatgcgagcccatgaacgacggtcctaaccttcacgcgcaacagccgcaatcgccgctcgttctagttctttggcgtcggccagccacggccgcctcaacgccgccgtatcttcaacgtcacttgcggcatccgacgacggagccgaggtgccatcgaaggtgccgtcgaacggcgcctcgcagaaggccatcgcggccacg

SEQ ID NO: 82557 - DNA, 2376 bp, Zea Mays
aaaccctggttctaccacgcgactaactgagccgccgacgccaggcctccacgccgcatccgcgtgaccgcgcctccgagctccatagccccgggccgccggcgccgggccatcgtgatctcgtccgcctcccagcatcgaccggacctgcccgcagcccgcgcccaggccatcgcgccgccgacccgagcttcgccaggcgcctaggccgctcgcccgcccggccggcaggacgactgggcgagctcctccccgcggaggcggggacggcggacccgcccccaggccgagtcgccgagctccgtcccgcgcgggcgcccccctgcccagtcccagccgccccgctcctgtcccggccaggctcagctccgccctgttccggcctctgtacagcatccaggcacgacgacgcgagacgagatggcaggcctcgaacggcctcgccgccgccctccgccagaccccgtcgccgtgctccggggccaccgcgccgcagtcaacgacgcctgcttccacccctccctccccctcctcttctccggggctcatgctgggtcggtgggagtgtattctgtcgctgctggtgctggacttggcaataagataatcagccagggcagggatgggacttgtaaatgttgggcgattgaagaagctgggctttcaaggaagccactacttacaatcaaaacaagtacataccatttctgcaagatgtcactggtgaagtcttcttttacacatgccactgaatctggctctagcagctcagctagtgacgtggaaccacaaatagtgccaactgaaaatgcagaatgccatggtgtaaaccctacaataggcccccaagaacatgatcaatgtatcgaggcaacacttaaaccgctcttgtaaagtcagataacttttttttggtgttattgaccttaacaacatttgggttggctaggcactacctctaatgggcataatatgctggcaattgctggtcaagaatcctctcaggttgagctttgggacattacaagtgctagaaagatcgtaaccttgccccaaacatgtagtgccaatgcgacagatcatcctactaagaaaaagggactatgcatggctgtgcaagctttcatcccccatgaatccgcaggctacgtaaatattttgtcaagttatgaagatggaagcactctttggtgggatgtacgaaagcctggattacctttatcttcagtgaagtatcattcagaatcagctttatccattgctattgatggattttgcaatggtggaatctcaggaggtgctgatgataaagtagtcatgttcacgctcgaccatccaaagggcacatttattcttaggaaagaaatagaactcgagcgaccgggtattgctggcacagcaattcgtccagacaacaagatcgctgcaaccgctggctgggatcacaggattcgagtgtacaactacaacaaaggaaatgctctagccgtgttgaagtatcacagtgcttcgtgcaatgcagtgaccttctcatctgactgcaagctcatggcttcctgctcggcggataccacggttgcgctgtgggacctctatcccccaaaaccccaaagcaaagcggacatcacagaaacagacgaggcctcctgctagctcatgtagtttgggccttcctgataccttctggcagaattttggagcttccgtgcaatgaaaatctgaacttgtcgcaacagtgcaagcgatttattctttttcgtcaaagaaaagagtaagttatgatgtgccttccacagggaaacgcaaacgtatgcatgcaactgttgttaggaacggttctcttgatttctttatttttcattgaaattctactcggtttcgtggaacagttgtagtgtctcaagagcatgaaattgatttaaaggcaaggcagttgaagaactgactctttgaatactcagatgattgatttgaacaaatttctgcaaatttccagtacactgtacacctacatttgctactgttcgatccaatggcagtactgaaccgggatgcagttcttgctgttgtgcatgtccaggaaagagggtatcgtatcccaatgttccatgtagttggggggttctattgctagaaaagaacattagtccttgctgactcggtgactccaatgcgatgcgagcccatgaacgacggtcctaaccttcacgcgcaacagccgcaatcgccgctcgttctagttctttggcgtcggccagccacggccgcctcaacgccgccgtatcttcaacgtcacttgcggcatccgacgacggagccgaggtgccatcgaaggtgccgtcgaacggcgcctcgcagaaggccatcgcggccacg

SEQ ID NO: 82558 - DNA, 2394 bp, Zea Mays
aaaccctggttctaccacgcgactaactgagccgccgacgccaggcctccacgccgcatccgcgtgaccgcgcctccgagctccatagccccgggccgccggcgccgggccatcgtgatctcgtccgcctcccagcatcgaccggacctgcccgcagcccgcgcccaggccatcgcgccgccgacccgagcttcgccaggcgcctaggccgctcgcccgcccggccggcaggacgactgggcgagctcctccccgcggaggcggggacggcggacccgcccccaggccgagtcgccgagctccgtcccgcgcgggcgcccccctgcccagtcccagccgccccgctcctgtcccggccaggctcagctccgccctgttccggcctctgtacagcatccaggcacgacgacgcgagacgagatggcaggcctcgaacggcctcgccgccgccctccgccagaccccgtcgccgtgctccggggccaccgcgccgcagtcaacgacgcctgcttccacccctccctccccctcctcttctccggcgcggccgacggggagctcagggcctgggacaccgcgagccaccgcaccgcttcctctgtgtgggctcatgctgggtcggtgggagtgtattctgtcgctgctggtgctggacttggcaataagataatcagccagggcagggatgggacttgtaaatgttgggcgattgaagaagctgggctttcaaggaagccactacttacaatcaaaacaagtacataccatttctgcaagatgtcactggtgaagtcttcttttacacatgccactgaatctggctctagcagctcagctagtgacgtggaaccacaaatagtgccaactgaaaatgcagaatgccatggtgtaaaccctacaataggcccccaagaacatgatcaatgtatcgaggcaacacttaaaccgctcttgtaaagtcagataacttttttttggtgttattgaccttaacaacatttgggttggctaggcactacctctaatgggcataatatgctggcaattgctggtcaagaatcctctcaggttgagctttgggacattacaagtgctagaaagatcgtaaccttgccccaaacatgtagtgccaatgcgacagatcatcctactaagaaaaagggactatgcatggctgtgcaagctttcatcccccatgaatccgcaggctacgtaaatattttgtcaagttatgaagatggaagcactctttggtgggatgtacgaaagcctggattacctttatcttcagtgaagtatcattcagaatcaggaggtgctgatgataaagtagtcatgttcacgctcgaccatccaaagggcacatttattcttaggaaagaaatagaactcgagcgaccgggtattgctggcacagcaattcgtccagacaacaagatcgctgcaaccgctggctgggatcacaggattcgagtgtacaactacaacaaaggaaatgctctagccgtgttgaagtatcacagtgcttcgtgcaatgcagtgaccttctcatctgactgcaagctcatggcttcctgctcggcggataccacggttgcgctgtgggacctctatcccccaaaaccccaaagcaaagcggacatcacagaaacagacgaggcctcctgctagctcatgtagtttgggccttcctgataccttctggcagaattttggagcttccgtgcaatgaaaatctgaacttgtcgcaacagtgcaagcgatttattctttttcgtcaaagaaaagagtaagttatgatgtgccttccacagggaaacgcaaacgtatgcatgcaactgttgttaggaacggttctcttgatttctttatttttcattgaaattctactcggtttcgtggaacagttgtagtgtctcaagagcatgaaattgatttaaaggcaaggcagttgaagaactgactctttgaatactcagatgattgatttgaacaaatttctgcaaatttccagtacactgtacacctacatttgctactgttcgatccaatggcagtactgaaccgggatgcagttcttgctgttgtgcatgtccaggaaagagggtatcgtatcccaatgttccatgtagttggggggttctattgctagaaaagaacattagtccttgctgactcggtgactccaatgcgatgcgagcccatgaacgacggtcctaaccttcacgcgcaacagccgcaatcgccgctcgttctagttctttggcgtcggccagccacggccgcctcaacgccgccgtatcttcaacgtcacttgcggcatccgacgacggagccgaggtgccatcgaaggtgccgtcgaacggcgcctcgcagaaggccatcgcggccacg

SEQ ID NO: 82559 - DNA, 2431 bp, Zea Mays
aaaccctggttctaccacgcgactaactgagccgccgacgccaggcctccacgccgcatccgcgtgaccgcgcctccgagctccatagccccgggccgccggcgccgggccatcgtgatctcgtccgcctcccagcatcgaccggacctgcccgcagcccgcgcccaggccatcgcgccgccgacccgagcttcgccaggcgcctaggccgctcgcccgcccggccggcaggacgactgggcgagctcctccccgcggaggcggggacggcggacccgcccccaggccgagtcgccgagctccgtcccgcgcgggcgcccccctgcccagtcccagccgccccgctcctgtcccggccaggctcagctccgccctgttccggcctctgtacagcatccaggcacgacgacgcgagacgagatggcaggcctcgaacggcctcgccgccgccctccgccagaccccgtcgccgtgctccggggccaccgcgccgcagtcaacgacgcctgcttccacccctccctccccctcctcttctccggcgcggccgacggggagctcagggcctgggacaccgcgagccaccgcaccgcttcctctgtgtgggctcatgctgggtcggtgggagtgtattctgtcgctgctggtgctggacttggcaataagataatcagccagggcagggatgggacttgtaaatgttgggcgattgaagaagctgggctttcaaggaagccactacttacaatcaaaacaagtacataccatttctgcaagatgtcactggtgaagtcttcttttacacatgccactgaatctggctctagcagctcagctagtgacgtggaaccacaaatagtgccaactgaaaatgcagaatgccatggtgtaaaccctacaataggcccccaagaacatgatcaatgtatcgaggcaacacttaaaccgctcttgtaaagtcagataacttttttttggtgttattgaccttaacaacatttgggttggctaggcactacctctaatgggcataatatgctggcaattgctggtcaagaatcctctcaggttgagctttgggacattacaagtgctagaaagatcgtaaccttgccccaaacatgtagtgccaatgcgacagatcatcctactaagaaaaagggactatgcatggctgtgcaagctttcatcccccatgaatccgcaggctacgtaaatattttgtcaagatggaagcactctttggtgggatgtacgaaagcctggattacctttatcttcagtgaagtatcattcagaatcagctttatccattgctattgatggattttgcaatggtggaatctcaggaggtgctgatgataaagtagtcatgttcacgctcgaccatccaaagggcacatttattcttaggaaagaaatagaactcgagcgaccgggtattgctggcacagcaattcgtccagacaacaagatcgctgcaaccgctggctgggatcacaggattcgagtgtacaactacaacaaaggaaatgctctagccgtgttgaagtatcacagtgcttcgtgcaatgcagtgaccttctcatctgactgcaagctcatggcttcctgctcggcggataccacggttgcgctgtgggacctctatcccccaaaaccccaaagcaaagcggacatcacagaaacagacgaggcctcctgctagctcatgtagtttgggccttcctgataccttctggcagaattttggagcttccgtgcaatgaaaatctgaacttgtcgcaacagtgcaagcgatttattctttttcgtcaaagaaaagagtaagttatgatgtgccttccacagggaaacgcaaacgtatgcatgcaactgttgttaggaacggttctcttgatttctttatttttcattgaaattctactcggtttcgtggaacagttgtagtgtctcaagagcatgaaattgatttaaaggcaaggcagttgaagaactgactctttgaatactcagatgattgatttgaacaaatttctgcaaatttccagtacactgtacacctacatttgctactgttcgatccaatggcagtactgaaccgggatgcagttcttgctgttgtgcatgtccaggaaagagggtatcgtatcccaatgttccatgtagttggggggttctattgctagaaaagaacattagtccttgctgactcggtgactccaatgcgatgcgagcccatgaacgacggtcctaaccttcacgcgcaacagccgcaatcgccgctcgttctagttctttggcgtcggccagccacggccgcctcaacgccgccgtatcttcaacgtcacttgcggcatccgacgacggagccgaggtgccatcgaaggtgccgtcgaacggcgcctcgcagaaggccatcgcggccacg

SEQ ID NO: 82560 - DNA, 2322 bp, Zea Mays
aaaccctggttctaccacgcgactaactgagccgccgacgccaggcctccacgccgcatccgcgtgaccgcgcctccgagctccatagccccgggccgccggcgccgggccatcgtgatctcgtccgcctcccagcatcgaccggacctgcccgcagcccgcgcccaggccatcgcgccgccgacccgagcttcgccaggcgcctaggccgctcgcccgcccggccggcaggacgactgggcgagctcctccccgcggaggcggggacggcggacccgcccccaggccgagtcgccgagctccgtcccgcgcgggcgcccccctgcccagtcccagccgccccgctcctgtcccggccaggctcagctccgccctgttccggcctctgtacagcatccaggcacgacgacgcgagacgagatggcaggcctcgaacggcctcgccgccgccctccgccagaccccgtcgccgtgctccggggccaccgcgccgcagtcaacgacgcctgcttccacccctccctccccctcctcttctccggcgcggccgacggggagctcagggcctgggacaccgcgagccaccgcaccgcttcctctgtgtggttcgacacttctgctcttgtgctctctgcagccatgagcgatttagttttgtgccagatttggtgtgatggcaattgcatgatatttttgtagggctcatgctgggtcggtgggagtgtattctgtcgctgctggtgctggacttggcaataagataatcagccagggcagggatgggacttgtaaatgttgggcgattgaagaagctgggctttcaaggtatcatttgctcacgctatttgagttcaaaaaacaactcatttttcttcaggagaggcaggaagccactacttacaatcaaaacaagtacataccatttctgcaagatgtcactggtgaagtcttcttttacacatgccactgaatctggctctagcagctcagctagtgacgtggaaccacaaatagtgccaactgaaaatgcagaatgccatggtgtaaaccctacaataggcccccaagaacatgatcaatgcactacctctaatgggcataatatgctggcaattgctggtcaagaatcctctcaggttgagctttgggacattacaagtgctagaaagatcgtaaccttgccccaaacatgtagtgccaatgcgacagatcatcctactaagaaaaaggttatgaagatggaagcactctttggtgggatgtacgaaagcctggattacctttatcttcagtgaagtatcattcagaatcagctttatccattgctattgatggattttgcaatggtggaatctcaggaggtgctgatgataaagtagtcatgttcacgctcgaccatccaaagggcacatttattcttaggaaagaaatagaactcgagcgaccgggtattgctggcacagcaattcgtccagacaacaagatcgctgcaaccgctggctgggatcacaggattcgagtgtacaactacaacaaaggaaatgctctagccgtgttgaagtatcacagtgcttcgtgcaatgcagtgaccttctcatctgactgcaagctcatggcttcctgctcggcggataccacggttgcgctgtgggacctctatcccccaaaaccccaaagcaaagcggacatcacagaaacagacgaggcctcctgctagctcatgtagtttgggccttcctgataccttctggcagaattttggagcttccgtgcaatgaaaatctgaacttgtcgcaacagtgcaagcgatttattctttttcgtcaaagaaaagattgtagtgtctcaagagcatgaaattgatttaaaggcaaggcagttgaagaactgactctttgaatactcagatgattgatttgaacaaatttctgcaaatttccagtacactgtacacctacatttgctactgttcgatccaatggcagtactgaaccgggatgcagttcttgctgttgtgcatgtccaggaaagagggtatcgtatcccaatgttccatgtagttggggggttctattgctagaaaagaacattagtccttgctgactcggtgactccaatgcgatgcgagcccatgaacgacggtcctaaccttcacgcgcaacagccgcaatcgccgctcgttctagttctttggcgtcggccagccacggccgcctcaacgccgccgtatcttcaacgtcacttgcggcatccgacgacggagccgaggtgccatcgaaggtgccgtcgaacggcgcctcgcagaaggccatcgcggccacg

SEQ ID NO: 82561 - DNA, 2229 bp, Zea Mays
aaaccctggttctaccacgcgactaactgagccgccgacgccaggcctccacgccgcatccgcgtgaccgcgcctccgagctccatagccccgggccgccggcgccgggccatcgtgatctcgtccgcctcccagcatcgaccggacctgcccgcagcccgcgcccaggccatcgcgccgccgacccgagcttcgccaggcgcctaggccgctcgcccgcccggccggcaggacgactgggcgagctcctccccgcggaggcggggacggcggacccgcccccaggccgagtcgccgagctccgtcccgcgcgggcgcccccctgcccagtcccagccgccccgctcctgtcccggccaggctcagctccgccctgttccggcctctgtacagcatccaggcacgacgacgcgagacgagatggcaggcctcgaacggcctcgccgccgccctccgccagaccccgtcgccgtgctccggggccaccgcgccgcagtcaacgacgcctgcttccacccctccctccccctcctcttctccggcgcggccgacggggagctcagggcctgggacaccgcgagccaccgcaccgcttcctctgtgtgggctcatgctgggtcggtgggagtgtattctgtcgctgctggtgctggacttggcaataagataatcagccagggcagggatgggacttgtaaatgttgggcgattgaagaagctgggctttcaaggaagccactacttacaatcaaaacaagtacataccatttctgcaagatgtcactggtgaagtcttcttttacacatgccactgaatctggctctagcagctcagctagtgacgtggaaccacaaatagtgccaactgaaaatgcagaatgccatggtgtaaaccctacaataggcccccaagaacatgatcaatgttgagctttgggacattacaagtgctagaaagatcgtaaccttgccccaaacatgtagtgccaatgcgacagatcatcctactaagaaaaaggttatgaagatggaagcactctttggtgggatgtacgaaagcctggattacctttatcttcagtgaagtatcattcagaatcagctttatccattgctattgatggattttgcaatggtggaatctcaggaggtgctgatgataaagtagtcatgttcacgctcgaccatccaaagggcacatttattcttaggaaagaaatagaactcgagcgaccgggtattgctggcacagcaattcgtccagacaacaagatcgctgcaaccgctggctgggatcacaggattcgagtgtacaactacaacaaaggaaatgctctagccgtgttgaagtatcacagtgcttcgtgcaatgcagtgaccttctcatctgactgcaagctcatggcttcctgctcggcggataccacggttgcgctgtgggacctctatcccccaaaaccccaaagcaaagcggacatcacagaaacagacgaggcctcctgctagctcatgtagtttgggccttcctgataccttctggcagaattttggagcttccgtgcaatgaaaatctgaacttgtcgcaacagtgcaagcgatttattctttttcgtcaaagaaaagagtaagttatgatgtgccttccacagggaaacgcaaacgtatgcatgcaactgttgttaggaacggttctcttgatttctttatttttcattgaaattctactcggtttcgtggaacagttgtagtgtctcaagagcatgaaattgatttaaaggcaaggcagttgaagaactgactctttgaatactcagatgattgatttgaacaaatttctgcaaatttccagtacactgtacacctacatttgctactgttcgatccaatggcagtactgaaccgggatgcagttcttgctgttgtgcatgtccaggaaagagggtatcgtatcccaatgttccatgtagttggggggttctattgctagaaaagaacattagtccttgctgactcggtgactccaatgcgatgcgagcccatgaacgacggtcctaaccttcacgcgcaacagccgcaatcgccgctcgttctagttctttggcgtcggccagccacggccgcctcaacgccgccgtatcttcaacgtcacttgcggcatccgacgacggagccgaggtgccatcgaaggtgccgtcgaacggcgcctcgcagaaggccatcgcggccacg

SEQ ID NO: 82562 - DNA, 2369 bp, Zea Mays
aaaccctggttctaccacgcgactaactgagccgccgacgccaggcctccacgccgcatccgcgtgaccgcgcctccgagctccatagccccgggccgccggcgccgggccatcgtgatctcgtccgcctcccagcatcgaccggacctgcccgcagcccgcgcccaggccatcgcgccgccgacccgagcttcgccaggcgcctaggccgctcgcccgcccggccggcaggacgactgggcgagctcctccccgcggaggcggggacggcggacccgcccccaggccgagtcgccgagctccgtcccgcgcgggcgcccccctgcccagtcccagccgccccgctcctgtcccggccaggctcagctccgccctgttccggcctctgtacagcatccaggcacgacgacgcgagacgagatggcaggcctcgaacggcctcgccgccgccctccgccagaccccgtcgccgtgctccggggccaccgcgccgcagtcaacgacgcctgcttccacccctccctccccctcctcttctccggcgcggccgacggggagctcagggcctgggacaccgcgagccaccgcaccgcttcctctgtgtgggctcatgctgggtcggtgggagtgtattctgtcgctgctggtgctggacttggcaataagataatcagccagggcagggatgggacttgtaaatgttgggcgattgaagaagctgggctttcaaggaagccactacttacaatcaaaacaagtacataccatttctgcaagatgtcactggtgaagtcttcttttacacatgccactgaatctggctctagcagctcagctagtgacgtggaaccacaaatagtgccaactgaaaatgcagaatgccatggtgtaaaccctacaataggcccccaagaacatgatcaatgcactacctctaatgggcataatatgctggcaattgctggtcaagaatcctctcaggaggaaaaactcttcaggttgagctttgggacattacaagtgctagaaagatcgtaaccttgccccaaacatgtagtgccaatgcgacagatcatcctactaagaaaaagggactatgcatggctgtgcaagctttcatcccccatgaatccgcaggctacgtaaatattttgtcaagttatgaagatggaagcactctttggtgggatgtacgaaagcctggattacctttatcttcagtgaagtatcattcagaatcagctttatccattgctattgatggattttgcaatggtggaatctcaggaggtgctgatgataaagtagtcatgttcacgctcgaccatccaaagggcacatttattcttaggaaagaaatagaactcgagcgaccgggtattgctggcacagcaattcgtccagacaacaagatcgctgcaaccgctggctgggatcacaggattcgagtgtacaactacaacaaaggaaatgctctagccgtgttgaagtatcacagtgcttcgtgcaatgcagtgaccttctcatctgactgcaagctcatggcttcctgctcggcggataccacggttgcgctgtgggacctctatcccccaaaaccccaaagcaaagcggacatcacagaaacagacgaggcctcctgctagctcatgtagtttgggccttcctgataccttctggcagaattttggagcttccgtgcaatgaaaatctgaacttgtcgcaacagtgcaagcgatttattctttttcgtcaaagaaaagagtaagttatgatgtgccttccacagggaaacgcaaacgtatgcatgcaactgttgttaggaacggttctcttgatttctttatttttcattgaaattctactcggtttcgtggaacagttgtagtgtctcaagagcatgaaattgatttaaaggcaaggcagttgaagaactgactctttgaatactcagatgattgatttgaacaaatttctgcaaatttccagtacactgtacacctacatttgctactgttcgatccaatggcagtactgaaccgggatgcagttcttgctgttgtgcatgtccaggaaagagggtatcgtatcccaatgttccatgtagttggggggttctattgctagaaaagaacattagtccttgctgactcggtgactccaatgcgatgcgagcccatgaacgacggtcctaaccttcacgcgcaacagccgcaatcgccgctcgttctagttctttggcgtcggccagccacggccgcctcaacgccgccgtatcttcaacgtcacttgcggcatccgacgacggagccgaggtgccatcgaaggtgccgtcgaacggcgcctcgcagaaggccatcgcggccacg

SEQ ID NO: 82563 - DNA, 1893 bp, Zea Mays
aaaccctggttctaccacgcgactaactgagccgccgacgccaggcctccacgccgcatccgcgtgaccgcgcctccgagctccatagccccgggccgccggcgccgggccatcgtgatctcgtccgcctcccagcatcgaccggacctgcccgcagcccgcgcccaggccatcgcgccgccgacccgagcttcgccaggcgcctaggccgctcgcccgcccggccggcaggacgactgggcgagctcctccccgcggaggcggggacggcggacccgcccccaggccgagtcgccgagctccgtcccgcgcgggcgcccccctgcccagtcccagccgccccgctcctgtcccggccaggctcagctccgccctgttccggcctctgtacagcatccagccagggcagggatgggacttgtaaatgttgggcgattgaagaagctgggctttcaaggaagccactacttacaatcaaaacaagtacataccatttctgcaagatgtcactggtgaagtcttcttttacacatgccactgaatctggctctagcagctcagctagtgacgtggaaccacaaatagtgccaactgaaaatgcagaatgccatggtgtaaaccctacaataggcccccaagaacatgatcaatgcactacctctaatgggcataatatgctggcaattgctggtcaagaatcctctcaggttgagctttgggacattacaagtgctagaaagatcgtaaccttgccccaaacatgtagtgccaatgcgacagatcatcctactaagaaaaaggttatgaagatggaagcactctttggtgggatgtacgaaagcctggattacctttatcttcagtgaagtatcattcagaatcagctttatccattgctattgatggattttgcaatggtggaatctcaggaggtgctgatgataaagtagtcatgttcacgctcgaccatccaaagggcacatttattcttaggaaagaaatagaactcgagcgaccgggtattgctggcacagcaattcgtccagacaacaagatcgctgcaaccgctggctgggatcacaggattcgagtgtacaactacaacaaaggaaatgctctagccgtgttgaagtatcacagtgcttcgtgcaatgcagtgaccttctcatctgactgcaagctcatggcttcctgctcggcggataccacggttgcgctgtgggacctctatcccccaaaaccccaaagcaaagcggacatcacagaaacagacgaggcctcctgctagctcatgtagtttgggccttcctgataccttctggcagaattttggagcttccgtgcaatgaaaatctgaacttgtcgcaacagtgcaagcgatttattctttttcgtcaaagaaaagattgtagtgtctcaagagcatgaaattgatttaaaggcaaggcagttgaagaactgactctttgaatactcagatgattgatttgaacaaatttctgcaaatttccagtacactgtacacctacatttgctactgttcgatccaatggcagtactgaaccgggatgcagttcttgctgttgtgcatgtccaggaaagagggtatcgtatcccaatgttccatgtagttggggggttctattgctagaaaagaacattagtccttgctgactcggtgactccaatgcgatgcgagcccatgaacgacggtcctaaccttcacgcgcaacagccgcaatcgccgctcgttctagttctttggcgtcggccagccacggccgcctcaacgccgccgtatcttcaacgtcacttgcggcatccgacgacggagccgaggtgccatcgaaggtgccgtcgaacggcgcctcgcagaaggccatcgcggccacg

SEQ ID NO: 82564 - DNA, 2297 bp, Zea Mays
aaaccctggttctaccacgcgactaactgagccgccgacgccaggcctccacgccgcatccgcgtgaccgcgcctccgagctccatagccccgggccgccggcgccgggccatcgtgatctcgtccgcctcccagcatcgaccggacctgcccgcagcccgcgcccaggccatcgcgccgccgacccgagcttcgccaggcgcctaggccgctcgcccgcccggccggcaggacgactgggcgagctcctccccgcggaggcggggacggcggacccgcccccaggccgagtcgccgagctccgtcccgcgcgggcgcccccctgcccagtcccagccgccccgctcctgtcccggccaggctcagctccgccctgttccggcctctgtacagcatccaggcacgacgacgcgagacgagatggcaggcctcgaacggcctcgccgccgccctccgccagaccccgtcgccgtgctccggggccaccgcgccgcagtcaacgacgcctgcttccacccctccctccccctcctcttctccggggctcatgctgggtcggtgggagtgtattctgtcgctgctggtgctggacttggcaataagataatcagccagggcagggatgggacttgtaaatgttgggcgattgaagaagctgggctttcaaggaagccactacttacaatcaaaacaagtacataccatttctgcaagatgtcactggtgaagtcttcttttacacatgccactgaatctggctctagcagctcagctagtgacgtggaaccacaaatagtgccaactgaaaatgcagaatgccatggtgtaaaccctacaataggcccccaagaacatgatcaatgcactacctctaatgggcataatatgctggcaattgctggtcaagaatcctctcaggttgagctttgggacattacaagtgctagaaagatcgtaaccttgccccaaacatgtagtgccaatgcgacagatcatcctactaagaaaaagggactatgcatggctgtgcaagctttcatcccccatgaatccgcaggctacgtaaatattttgtcaagttatgaagatggaagcactctttggtgggatgtacgaaagcctggattacctttatcttcagtgaagtatcattcagaatcaggtgtgcagctttatccattgctattgatggattttgcaatggtggaatctcaggaggtgctgatgataaagtagtcatgttcacgctcgaccatccaaagggcacatttattcttaggaaagaaatagaactcgagcgaccgggtattgctggcacagcaattcgtccagacaacaagatcgctgcaaccgctggctgggatcacaggattcgagtgtacaactacaacaaaggaaatgctctagccgtgttgaagtatcacagtgcttcgtgcaatgcagtgaccttctcatctgactgcaagctcatggcttcctgctcggcggataccacggttgcgctgtgggacctctatcccccaaaaccccaaagcaaagcggacatcacagaaacagacgaggcctcctgctagctcatgtagtttgggccttcctgataccttctggcagaattttggagcttccgtgcaatgaaaatctgaacttgtcgcaacagtgcaagcgatttattctttttcgtcaaagaaaagagtaagttatgatgtgccttccacagggaaacgcaaacgtatgcatgcaactgttgttaggaacggttctcttgatttctttatttttcattgaaattctactcggtttcgtggaacagttgtagtgtctcaagagcatgaaattgatttaaaggcaaggcagttgaagaactgactctttgaatactcagatgattgatttgaacaaatttctgcaaatttccagtacactgtacacctacatttgctactgttcgatccaatggcagtactgaaccgggatgcagttcttgctgttgtgcatgtccaggaaagagggtatcgtatcccaatgttccatgtagttggggggttctattgctagaaaagaacattagtccttgctgactcggtgactccaatgcgatgcgagcccatgaacgacggtcctaaccttcacgcgcaacagccgcaatcgccgctcgttctagttctttggcgtcggccagccacggccgcctcaacgccgccgtatcttcaacgtcacttgcggcatccgacgacggagccgaggtgccatcgaaggtgccgtcgaacggcgcctcgcagaaggccatcgcggccacg

SEQ ID NO: 82565 - DNA, 2348 bp, Zea Mays
aaaccctggttctaccacgcgactaactgagccgccgacgccaggcctccacgccgcatccgcgtgaccgcgcctccgagctccatagccccgggccgccggcgccgggccatcgtgatctcgtccgcctcccagcatcgaccggacctgcccgcagcccgcgcccaggccatcgcgccgccgacccgagcttcgccaggcgcctaggccgctcgcccgcccggccggcaggacgactgggcgagctcctccccgcggaggcggggacggcggacccgcccccaggccgagtcgccgagctccgtcccgcgcgggcgcccccctgcccagtcccagccgccccgctcctgtcccggccaggctcagctccgccctgttccggcctctgtacagcatccaggcacgacgacgcgagacgagatggcaggcctcgaacggcctcgccgccgccctccgccagaccccgtcgccgtgctccggggccaccgcgccgcagtcaacgacgcctgcttccacccctccctccccctcctcttctccggcgcggccgacggggagctcagggcctgggacaccgcgagccaccgcaccgcttcctctgtgtgggctcatgctgggtcggtgggagtgtattctgtcgctgctggtgctggacttggcaataagataatcagggcagggatgggacttgtaaatgttgggcgattgaagaagctgggctttcaaggaagccactacttacaatcaaaacaagtacataccatttctgcaagatgtcactggtgaagtcttcttttacacatgccactgaatctggctctagcagctcagctagtgacgtggaaccacaaatagtgccaactgaaaatgcagaatgccatggtgtaaaccctacaataggcccccaagaacatgatcaatgcactacctctaatgggcataatatgctggcaattgctggtcaagaatcctctcaggttgagctttgggacattacaagtgctagaaagatcgtaaccttgccccaaacatgtagtgccaatgcgacagatcatcctactaagaaaaagggactatgcatggctgtgcaagctttcatcccccatgaatccgcaggctacgtaaatattttgtcaagttatgaagatggaagcactctttggtgggatgtacgaaagcctggattacctttatcttcagtgaagtatcattcagaatcagctttatccattgctattgatggattttgcaatggtggaatctcaggaggtgctgatgataaagtagtcatgttcacgctcgaccatccaaagggcacatttattcttaggaaagaaatagaactcgagcgaccgggtattgctggcacagcaattcgtccagacaacaagatcgctgcaaccgctggctgggatcacaggattcgagtgtacaactacaacaaaggaaatgctctagccgtgttgaagtatcacagtgcttcgtgcaatgcagtgaccttctcatctgactgcaagctcatggcttcctgctcggcggataccacggttgcgctgtgggacctctatcccccaaaaccccaaagcaaagcggacatcacagaaacagacgaggcctcctgctagctcatgtagtttgggccttcctgataccttctggcagaattttggagcttccgtgcaatgaaaatctgaacttgtcgcaacagtgcaagcgatttattctttttcgtcaaagaaaagagtaagttatgatgtgccttccacagggaaacgcaaacgtatgcatgcaactgttgttaggaacggttctcttgatttctttatttttcattgaaattctactcggtttcgtggaacagttgtagtgtctcaagagcatgaaattgatttaaaggcaaggcagttgaagaactgactctttgaatactcagatgattgatttgaacaaatttctgcaaatttccagtacactgtacacctacatttgctactgttcgatccaatggcagtactgaaccgggatgcagttcttgctgttgtgcatgtccaggaaagagggtatcgtatcccaatgttccatgtagttggggggttctattgctagaaaagaacattagtccttgctgactcggtgactccaatgcgatgcgagcccatgaacgacggtcctaaccttcacgcgcaacagccgcaatcgccgctcgttctagttctttggcgtcggccagccacggccgcctcaacgccgccgtatcttcaacgtcacttgcggcatccgacgacggagccgaggtgccatcgaaggtgccgtcgaacggcgcctcgcagaaggccatcgcggccacg

SEQ ID NO: 82566 - DNA, 2074 bp, Zea Mays
aaaccctggttctaccacgcgactaactgagccgccgacgccaggcctccacgccgcatccgcgtgaccgcgcctccgagctccatagccccgggccgccggcgccgggccatcgtgatctcgtccgcctcccagcatcgaccggacctgcccgcagcccgcgcccaggccatcgcgccgccgacccgagcttcgccaggcgcctaggccgctcgcccgcccggccggcaggacgactgggcgagctcctccccgcggaggcggggacggcggacccgcccccaggccgagtcgccgagctccgtcccgcgcgggcgcccccctgcccagtcccagccgccccgctcctgtcccggccaggctcagctccgccctgttccggcctctgtacagcatccagggcagggatgggacttgtaaatgttgggcgattgaagaagctgggctttcaaggaagccactacttacaatcaaaacaagtacataccatttctgcaagatgtcactggtgaagtcttcttttacacatgccactgaatctggctctagcagctcagctagtgacgtggaaccacaaatagtgccaactgaaaatgcagaatgccatggtgtaaaccctacaataggcccccaagaacatgatcaatgcactacctctaatgggcataatatgctggcaattgctggtcaagaatcctctcaggttgagctttgggacattacaagtgctagaaagatcgtaaccttgccccaaacatgtagtgccaatgcgacagatcatcctactaagaaaaagggactatgcatggctgtgcaagctttcatcccccatgaatccgcaggctacgtaaatattttgtcaagttatgaagatggaagcactctttggtgggatgtacgaaagcctggattacctttatcttcagtgaagtatcattcagaatcagctttatccattgctattgatggattttgcaatggtggaatctcaggaggtgctgatgataaagtagtcatgttcacgctcgaccatccaaagggcacatttattcttaggaaagaaatagaactcgagcgaccgggtattgctggcacagcaattcgtccagacaacaagatcgctgcaaccgctggctgggatcacaggattcgagtgtacaactacaacaaaggaaatgctctagccgtgttgaagtatcacagtgcttcgtgcaatgcagtgaccttctcatctgactgcaagctcatggcttcctgctcggcggataccacggttgcgctgtgggacctctatcccccaaaaccccaaagcaaagcggacatcacagaaacagacgaggcctcctgctagctcatgtagtttgggccttcctgataccttctggcagaattttggagcttccgtgcaatgaaaatctgaacttgtcgcaacagtgcaagcgatttattctttttcgtcaaagaaaagagtaagttatgatgtgccttccacagggaaacgcaaacgtatgcatgcaactgttgttaggaacggttctcttgatttctttatttttcattgaaattctactcggtttcgtggaacagttgtagtgtctcaagagcatgaaattgatttaaaggcaaggcagttgaagaactgactctttgaatactcagatgattgatttgaacaaatttctgcaaatttccagtacactgtacacctacatttgctactgttcgatccaatggcagtactgaaccgggatgcagttcttgctgttgtgcatgtccaggaaagagggtatcgtatcccaatgttccatgtagttggggggttctattgctagaaaagaacattagtccttgctgactcggtgactccaatgcgatgcgagcccatgaacgacggtcctaaccttcacgcgcaacagccgcaatcgccgctcgttctagttctttggcgtcggccagccacggccgcctcaacgccgccgtatcttcaacgtcacttgcggcatccgacgacggagccgaggtgccatcgaaggtgccgtcgaacggcgcctcgcagaaggccatcgcggccacg

SEQ ID NO: 82567 - DNA, 2078 bp, Zea Mays
aaaccctggttctaccacgcgactaactgagccgccgacgccaggcctccacgccgcatccgcgtgaccgcgcctccgagctccatagccccgggccgccggcgccgggccatcgtgatctcgtccgcctcccagcatcgaccggacctgcccgcagcccgcgcccaggccatcgcgccgccgacccgagcttcgccaggcgcctaggccgctcgcccgcccggccggcaggacgactgggcgagctcctccccgcggaggcggggacggcggacccgcccccaggccgagtcgccgagctccgtcccgcgcgggcgcccccctgcccagtcccagccgccccgctcctgtcccggccaggctcagctccgccctgttccggcctctgtacagcatccagccagggcagggatgggacttgtaaatgttgggcgattgaagaagctgggctttcaaggaagccactacttacaatcaaaacaagtacataccatttctgcaagatgtcactggtgaagtcttcttttacacatgccactgaatctggctctagcagctcagctagtgacgtggaaccacaaatagtgccaactgaaaatgcagaatgccatggtgtaaaccctacaataggcccccaagaacatgatcaatgcactacctctaatgggcataatatgctggcaattgctggtcaagaatcctctcaggttgagctttgggacattacaagtgctagaaagatcgtaaccttgccccaaacatgtagtgccaatgcgacagatcatcctactaagaaaaagggactatgcatggctgtgcaagctttcatcccccatgaatccgcaggctacgtaaatattttgtcaagttatgaagatggaagcactctttggtgggatgtacgaaagcctggattacctttatcttcagtgaagtatcattcagaatcagctttatccattgctattgatggattttgcaatggtggaatctcaggaggtgctgatgataaagtagtcatgttcacgctcgaccatccaaagggcacatttattcttaggaaagaaatagaactcgagcgaccgggtattgctggcacagcaattcgtccagacaacaagatcgctgcaaccgctggctgggatcacaggattcgagtgtacaactacaacaaaggaaatgctctagccgtgttgaagtatcacagtgcttcgtgcaatgcagtgaccttctcatctgactgcaagctcatggcttcctgctcggcggataccacggttgcgctgtgggacctctatcccccaaaaccccaaagcaaagcggacatcacagaaacagacgaggcctcctgctagctcatgtagtttgggccttcctgataccttctggcagaattttggagcttccgtgcaatgaaaatctgaacttgtcgcaacagtgcaagcgatttattctttttcgtcaaagaaaagagtaagttatgatgtgccttccacagggaaacgcaaacgtatgcatgcaactgttgttaggaacggttctcttgatttctttatttttcattgaaattctactcggtttcgtggaacagttgtagtgtctcaagagcatgaaattgatttaaaggcaaggcagttgaagaactgactctttgaatactcagatgattgatttgaacaaatttctgcaaatttccagtacactgtacacctacatttgctactgttcgatccaatggcagtactgaaccgggatgcagttcttgctgttgtgcatgtccaggaaagagggtatcgtatcccaatgttccatgtagttggggggttctattgctagaaaagaacattagtccttgctgactcggtgactccaatgcgatgcgagcccatgaacgacggtcctaaccttcacgcgcaacagccgcaatcgccgctcgttctagttctttggcgtcggccagccacggccgcctcaacgccgccgtatcttcaacgtcacttgcggcatccgacgacggagccgaggtgccatcgaaggtgccgtcgaacggcgcctcgcagaaggccatcgcggccacg

SEQ ID NO: 82568 - DNA, 2434 bp, Zea Mays
aaaccctggttctaccacgcgactaactgagccgccgacgccaggcctccacgccgcatccgcgtgaccgcgcctccgagctccatagccccgggccgccggcgccgggccatcgtgatctcgtccgcctcccagcatcgaccggacctgcccgcagcccgcgcccaggccatcgcgccgccgacccgagcttcgccaggcgcctaggccgctcgcccgcccggccggcaggacgactgggcgagctcctccccgcggaggcggggacggcggacccgcccccaggccgagtcgccgagctccgtcccgcgcgggcgcccccctgcccagtcccagccgccccgctcctgtcccggccaggctcagctccgccctgttccggcctctgtacagcatccaggcacgacgacgcgagacgagatggcaggcctcgaacggcctcgccgccgccctccgccagaccccgtcgccgtgctccggggccaccgcgccgcagtcaacgacgcctgcttccacccctccctccccctcctcttctccggcgcggccgacggggagctcagggcctgggacaccgcgagccaccgcaccgcttcctctggctcatgctgggtcggtgggagtgtattctgtcgctgctggtgctggacttggcaataagataatcagccagggcagggatgggacttgtaaatgttgggcgattgaagaagctgggctttcaaggaagccactacttacaatcaaaacaagtacataccatttctgcaagatgtcactggtgaagtcttcttttacacatgccactgaatctggctctagcagctcagctagtgacgtggaaccacaaatagtgccaactgaaaatgcagaatgccatggtgtaaaccctacaataggcccccaagaacatgatcaatgtatcgaggcaacacttaaaccgctcttgtaaagtcagataacttttttttggtgttattgaccttaacaacatttgggttggctaggcactacctctaatgggcataatatgctggcaattgctggtcaagaatcctctcaggttgagctttgggacattacaagtgctagaaagatcgtaaccttgccccaaacatgtagtgccaatgcgacagatcatcctactaagaaaaagggactatgcatggctgtgcaagctttcatcccccatgaatccgcaggctacgtaaatattttgtcaagttatgaagatggaagcactctttggtgggatgtacgaaagcctggattacctttatcttcagtgaagtatcattcagaatcagctttatccattgctattgatggattttgcaatggtggaatctcaggaggtgctgatgataaagtagtcatgttcacgctcgaccatccaaagggcacatttattcttaggaaagaaatagaactcgagcgaccgggtattgctggcacagcaattcgtccagacaacaagatcgctgcaaccgctggctgggatcacaggattcgagtgtacaactacaacaaaggaaatgctctagccgtgttgaagtatcacagtgcttcgtgcaatgcagtgaccttctcatctgactgcaagctcatggcttcctgctcggcggataccacggttgcgctgtgggacctctatcccccaaaaccccaaagcaaagcggacatcacagaaacagacgaggcctcctgctagctcatgtagtttgggccttcctgataccttctggcagaattttggagcttccgtgcaatgaaaatctgaacttgtcgcaacagtgcaagcgatttattctttttcgtcaaagaaaagagtaagttatgatgtgccttccacagggaaacgcaaacgtatgcatgcaactgttgttaggaacggttctcttgatttctttatttttcattgaaattctactcggtttcgtggaacagttgtagtgtctcaagagcatgaaattgatttaaaggcaaggcagttgaagaactgactctttgaatactcagatgattgatttgaacaaatttctgcaaatttccagtacactgtacacctacatttgctactgttcgatccaatggcagtactgaaccgggatgcagttcttgctgttgtgcatgtccaggaaagagggtatcgtatcccaatgttccatgtagttggggggttctattgctagaaaagaacattagtccttgctgactcggtgactccaatgcgatgcgagcccatgaacgacggtcctaaccttcacgcgcaacagccgcaatcgccgctcgttctagttctttggcgtcggccagccacggccgcctcaacgccgccgtatcttcaacgtcacttgcggcatccgacgacggagccgaggtgccatcgaaggtgccgtcgaacggcgcctcgcagaaggccatcgcggccacg

SEQ ID NO: 82569 - DNA, 1501 bp, Zea Mays
ccccatgaccgatttatgatccggtgatccactgctatcattactgccctattttgctggctgcaggcttgtgataatggacaaccttgggcatagagaaaatggcaggcaaaggcctgagcaatataaagcgcttcatactcagtggatgatacctcaaaggcagctaaaagaccatcaaagtatgaatctcctggcactgatgaatgagaaggacagtgccatccgagaaagggaccatgctctcgctgagaagaaagcagctatagctgagcgagatatggcattcgcccagcgggatgctgcaatggctgaacggaatgctgcaatagtggagagggacaacgccctagctgcactcgaactcgcccgtacaaatgggtttaatatgaatagtgggaatggatttcaccaaggacctcctctcaatggaacaaagaacatccatcaccatgaccatctgtctcatgtccaaacatccccgctgcagctggccaattctccatatgaccatgtcagggagatgcacatatcagaagcataccctatcgcaacagctcccgcaagtgttgggaaggctaagaagccaaggaagagcaattctcaagcttctccatcgaagaggccatcaggtgtactccgaaaaaccaagaaagcaaccagcgactggaagaatgcggggactactggtggagcaggagattcagcccgcgcttctgtgatgaagaacgagtggaaggaccaggatctcggcctgaaccaggtggtgttcgacgagtcaaccatgcccgcgcctgcctgctcatgcacaggggagctccaccaatgctacaaatggggcagtggtgggtggcagtcgtcttgctgcaccatgaacatgtccatgcacccgctcccggtgatgcccaacaggcgccacgctcgcatggggggaaggaagatgagcgggggcgcgttcgcgaagctgctcagccggctggcagcagaaggtcatgacctctcgactccggtggacctcaaggaccactgggccaagcatggcacgaaccggtacatcaccatccggtagccagccggcggccacgttgaagcctgagcctggaaggggggagagatcacacaaacgtcgccttgccctgcatcccctaaaccctctcttttgctatgctctgtaatgccattggtttgtagtggatggagcacttctgcgttcatgaaaccacagcgttgtaggttctcccctccattgtgctggactagtaaactgtgctcgcgagctggagtgctgaagtccgcgagaatccatgtgtaattgtagctcagaagtattcgtcgcgtgatagctgtacagtttgacatctggattcgagtcgagtggtggtagttgaaggtctactgtatatagttggcttcagtatcatggccgccgttgatctgaagccgacgttccagaaatccagacagatacacaaaaaaggtggtgtctgctgctgaattattc

SEQ ID NO: 82570 - DNA, 1044 bp, Zea Mays
caccgatcactcgtcacagcgagtaccgagtaggagcaaccgcttgcgtcagacgcacactgacggagagtgatcactgatttctggtcatggcaaccgtaactgaggaagttgctccggtcgtcaccgtctccgaggagccggcgccggaagcggcgaaggaggtggtggagaagccggaggaggggaagaagcccgacgaggagggtgacgagaggaagaaggccgaccccgccgccgagaaggagaagaaggccgaccccgccgccgagaaggagaagaaggcgaggaagccgcggagcaggaagcccaagtccgccgggctgcaccacccgccctatttcgagatgatcaaggaggcgatcctgtcgcaggacggcgggaaggtcggggcgagcccgtacgcgatcgccaagcacatgggggagaagcaccgggacgtgctcccgcccaattaccgcaaggtgctggccgtgcagctgcgcgggaagcgagcgaggaaggtggccccggcgcccgcgcagcccaagcccaagccagcccgcgccgccgcttccggtgccggcaagaaggtcaacaaggccagcgcctgattagcggcggccgtcctggtccccccgcgcgcgcctccgtgtattatactagccggtagtagcagtaggagttgcaagtactagcagcgtcgtagtcgtgatgatgttgtggtcgtcgtctccgccggcccgatcgatcgggcgctctgttccgccgtgtggcagagttttgtaaataactagtctggtgtgatgcgctcatggcaataaagcgcgcgcttctagcttccttgatgaaacatccatgatccattatcagtgcagtcttgtggttatcgtgttggttagttcgatcactggaactggctcatcatcttcggcttctgggcgaggatgtggtggaggttgggttctgtagtgagtggagtatgttcacgatttcgtcgttgccaatgaacacccttcacccattgtgactcccggtcttttctacttcagtttcaccgtaatg

SEQ ID NO: 82571 - DNA, 1191 bp, Zea Mays
caccgatcactcgtcacagcgagtaccgagtaggagcaaccgcttgcgtcagacgcacactgacggagagtgatcactgatttctggtcatggcaaccgtaactgaggaagttgctccggtcgtcaccgtctccgaggagccggcgccggaagcggcgaaggaggtggtggagaagccggaggaggggaagaagcccgacgaggagggtgacgagaggaagaaggccgaccccgccgccgagaaggagaagaaggcgaggaagccgcggagcaggaagcccaagtccgccgggctgcaccacccgccctatttcgaggacggcgggaaggtcggggcgagcccgtacgcgatcgccaagcacatgggggagaagcaccgggacgtgctcccgcccaattaccgcaaggtgctggccgtgcagctgcgcggcttcgccgccaagggccgcctcgtcaaggtcaaggcctccttcaagctcgccgccgccgaggagaggaagccctccgcggccgcgaaggcgaagaagaaggcgtcggcgggaatggccaagcgcaagagggccgccgcgccggccaagatgaagccggcggccgctgcctcggcgccgtcgagggaggcacgtaaggtgcgcgcgaagcgagcgaggaaggtggccccggcgcccgcgcagcccaagcccaagccagcccgcgccgccgcttccggtgccggcaagaaggtcaacaaggccagcgcctgattagcggcggccgtcctggtccccccgcgcgcgcctccgtgtattatactagccggtagtagcagtaggagttgcaagtactagcagcgtcgtagtcgtgatgatgttgtggtcgtcgtctccgccggcccgatcgatcgggcgctctgttccgccgtgtggcagagttttgtaaataactagtctggtgtgatgcgctcatggcaataaagcgcgcgcttctagcttccttgatgaaacatccatgatccattatcagtgcagtcttgtggttatcgtgttggttagttcgatcactggaactggctcatcatcttcggcttctgggcgaggatgtggtggaggttgggttctgtagtgagtggagtatgttcacgatttcgtcgttgccaatgaacacccttcacccattgtgactcccggtcttttctacttcagtttcaccgtaatg

SEQ ID NO: 82572 - DNA, 940 bp, Zea Mays
caccgatcactcgtcacagcgagtaccgagtaggagcaaccgcttgcgtcagacgcacactgacggagagtgatcactgatttctggtcatggcaaccgtaactgaggaagttgctccggtcgtcaccgtctccgaggagccggcgccggaagcggcgaaggaggtggtggagaagccggaggaggggaagaagcccgacgaggagggtgacgagaggaagaaggccgaccccgccgccgagaaggagaagaaggccgaccccgccgccgagaaggagaagaaggcgaggaagccgcggagcaggaagcccaagtccgccgggctgcaccacccgccctatttcgagatgatcaaggaggcgatcctgtcgcaggacggcgggaaggtcggggcgagcccgtacgcgatcgccaagcacatgggggagaagcaccgggacgtgctcccgcccaattaccgcaaggtgctggccgtgcagctgcgcggcttcgccgccaagggccgcctcgtcaaggtcaaggcctccgtgtattatactagccggtagtagcagtaggagttgcaagtactagcagcgtcgtagtcgtgatgatgttgtggtcgtcgtctccgccggcccgatcgatcgggcgctctgttccgccgtgtggcagagttttgtaaataactagtctggtgtgatgcgctcatggcaataaagcgcgcgcttctagcttccttgatgaaacatccatgatccattatcagtgcagtcttgtggttatcgtgttggttagttcgatcactggaactggctcatcatcttcggcttctgggcgaggatgtggtggaggttgggttctgtagtgagtggagtatgttcacgatttcgtcgttgccaatgaacacccttcacccattgtgactcccggtcttttctacttcagtttcaccgtaatg

SEQ ID NO: 82573 - DNA, 1650 bp, Zea Mays
atcaacttccatggattccgacgagtattatcttatggtgtggaaatgcatttcttgtgccatcaccttactacccgggttgggatagggacataaaatggcgaactggtgttgagttgatacctgttccttgtcgtagtactgataactttaatgtcagtgtcactgctcttgaaatagcttacaaacaggcaaaaaagcgaggaataagagttcgtggggttctcatatctaacccttccaacccaacaggaggcattgtgccaaaagaaatactgcatgaccttctacagtttgctgcagagaagaacatacacttaatttctgatgaaatatttgctggttcaacatatggaagtgacaagtttgttagcgtggcagatgttgtggatgaactagaggactttgataaaggcagagttcatatcatatatgggctctcaaaagacctatctcttgccgggtttcgagttggagtgatatattcctacaatgaacacattgtatcggctgctgctaagattgctcgattttcatctgtctcaagtccaacacaacgtttgcttgtttccatgctttcagatcaaaagtttatttcagaatacataaaggttaacagagagaggctccggaaaatgtaccttctgttttctgatgctttgaaacaacttgggatagaatgcttcaagagcagcggcgggttctattgctgggcagacatgagcaggtacatccgatcttacagcgagaaaggagagcgcaagctctgggataggctgttggaggaagcaaaggtcaacgttaccccaggttcttcttgccattgcattgagcctggatggttcaggtgttgcttcacaacattgagtgaggaggacattcctgtcttggtggaaagactgaggagggtcacagatagcttcaaatccaaacgttgaaacgctagaatagtttattttttggaacccctgcggtatcgaaataaccatatctcaccaggtgctctatagtggattgcagggggcactcaggaaaaggttggacaatctatttattttagaccatagatattcaggggcttcttgctatacagctgcataacaattgctggaagcccctaggctggtggaaggataagtgggggatttgggggacttgtccatgactccatgctggtcagctgtcttcggtttcttacgagccatgatgccgtagcattctggatgtttatgtcctgttggtctggcgatgaggctgatgtgctgagcattcttttcatccagatccgaccatgttctacttttcctttttactcttccttttttttctttggtcacataagctagtgttcaggttcagggattgtaaagcagtggatcctgcatgtgctgccagggttttggacgctgtccatacgtggagtgaatgaacatgcagtcatcatgttttccatcattttttttctttagtttgtttgcgggtatgacattttgtcaaaatgattttgtgcttagttactgggaagggaataaaagaaaggactttttgaggtaaggtgatgagacaagaacaaaactaaatgaagaataatatcctatgtaaagtgctggattctcataatgtcatcattagcatgtgttttctaaaaca

SEQ ID NO: 82574 - DNA, 1762 bp, Zea Mays
atcaaagtgaagtcagcatctaaacccgaggctcttgctggattcatgcggcagaccatgcatggatcagtatcctttgatccatctcaaatggtgattacatgtggggcaactcctgcaatggaaatactgagtttctgtattgctgatccaggaaatgcatttcttgtgccatcaccttactacccgggttgggatagggacataaaatggcgaactggtgttgagttgatacctgttccttgtcgtagtactgataactttaatgtcagtgtcactgctcttgaaatagcttacaaacaggcaaaaaagcgaggaataagagttcgtggggttctcatatctaacccttccaacccaacaggaggcattgtgccaaaagaaatactgcatgaccttctacagtttgctgcagagaagaacatacacttaatttctgatgaaatatttgctggttcaacatatggaagtgacaagtttgttagcgtggcagatgttgtggatgaactagaggactttgataaaggcagagttcatatcatatatgggctctcaaaagacctatctcttgccgggtttcgagttggagtgatatattcctacaatgaacacattgtatcggctgctgctaagattgctcgattttcatctgtctcaagtccaacacaacgtttgcttgtttccatgctttcagatcaaaagtttatttcagaatacataaaggttaacagagagaggctccggaaaatgtaccttctgttttctgatgctttgaaacaacttgggatagaatgcttcaagagcagcggcgggttctattgctgggcagacatgagcaggtacatccgatcttacagcgagaaaggagagcgcaagctctgggataggctgttggaggaagcaaaggtcaacgttaccccaggttcttcttgccattgcattgagcctggatggttcaggtgttgcttcacaacattgagtgaggaggacattcctgtcttggtggaaagactgaggagggtcacagatagcttcaaatccaaacgttgaaacgctagaatagtttattttttggaacccctgcggtatcgaaataaccatatctcaccaggtgctctatagtggattgcagggggcactcaggaaaaggttggacaatctatttattttagaccatagatattcaggggcttcttgctatacagctgcataacaattgctggaagcccctaggctggtggaaggataagtgggggatttgggggacttgtccatgactccatgctggtcagctgtcttcggtttcttacgagccatgatgccgtagcattctggatgtttatgtcctgttggtctggcgatgaggctgatgtgctgagcattcttttcatccagatccgaccatgttctacttttcctttttactcttccttttttttctttggtcacataagctagtgttcaggttcagggattgtaaagcagtggatcctgcatgtgctgccagggttttggacgctgtccatacgtggagtgaatgaacatgcagtcatcatgttttccatcattttttttctttagtttgtttgcgggtatgacattttgtcaaaatgattttgtgcttagttactgggaagggaataaaagaaaggactttttgaggtaaggtgatgagacaagaacaaaactaaatgaagaataatatcctatgtaaagtgctggattctcataatgtcatcattagcatgtgttttctaaaaca

SEQ ID NO: 82575 - DNA, 1758 bp, Zea Mays
ctcctcttgcgtctcctcttgcggcggctcttgctggattcatgcggcagaccatgcatggatcagtatcctttgatccatctcaaatggtgattacatgtggggcaactcctgcaatggaaatactgagtttctgtattgctgatccaggaaatgcatttcttgtgccatcaccttactacccgggttgggatagggacataaaatggcgaactggtgttgagttgatacctgttccttgtcgtagtactgataactttaatgtcagtgtcactgctcttgaaatagcttacaaacaggcaaaaaagcgaggaataagagttcgtggggttctcatatctaacccttccaacccaacaggaggcattgtgccaaaagaaatactgcatgaccttctacagtttgctgcagagaagaacatacacttaatttctgatgaaatatttgctggttcaacatatggaagtgacaagtttgttagcgtggcagatgttgtggatgaactagaggactttgataaaggcagagttcatatcatatatgggctctcaaaagacctatctcttgccgggtttcgagttggagtgatatattcctacaatgaacacattgtatcggctgctgctaagattgctcgattttcatctgtctcaagtccaacacaacgtttgcttgtttccatgctttcagatcaaaagtttatttcagaatacataaaggttaacagagagaggctccggaaaatgtaccttctgttttctgatgctttgaaacaacttgggatagaatgcttcaagagcagcggcgggttctattgctgggcagacatgagcaggtacatccgatcttacagcgagaaaggagagcgcaagctctgggataggctgttggaggaagcaaaggtcaacgttaccccaggttcttcttgccattgcattgagcctggatggttcaggtgttgcttcacaacattgagtgaggaggacattcctgtcttggtggaaagactgaggagggtcacagatagcttcaaatccaaacgttgaaacgctagaatagtttattttttggaacccctgcggtatcgaaataaccatatctcaccaggtgctctatagtggattgcagggggcactcaggaaaaggttggacaatctatttattttagaccatagatattcaggggcttcttgctatacagctgcataacaattgctggaagcccctaggctggtggaaggataagtgggggatttgggggacttgtccatgactccatgctggtcagctgtcttcggtttcttacgagccatgatgccgtagcattctggatgtttatgtcctgttggtctggcgatgaggctgatgtgctgagcattcttttcatccagatccgaccatgttctacttttcctttttactcttccttttttttctttggtcacataagctagtgttcaggttcagggattgtaaagcagtggatcctgcatgtgctgccagggttttggacgctgtccatacgtggagtgaatgaacatgcagtcatcatgttttccatcattttttttctttagtttgtttgcgggtatgacattttgtcaaaatgattttgtgcttagttactgggaagggaataaaagaaaggactttttgaggtaaggtgatgagacaagaacaaaactaaatgaagaataatatcctatgtaaagtgctggattctcataatgtcatcattagcatgtgttttctaaaaca

SEQ ID NO: 82576 - DNA, 1984 bp, Zea Mays
ccgatcgtgtgacccagattcctcgtggaatcagaatcaacagaaccgggcagagatctgtctcgttctttccatcatttccggtgacccagtgctagagacggccaagcgcccacccagacccaggcgagacaattgccattatggaagagaagatgattcgatgaggcgttgacttctctgttttggagacgcagccgacagacaaactccaaaatgaatacgagacaacacttgaggctgcgcaaacaggctcttgctggattcatgcggcagaccatgcatggatcagtatcctttgatccatctcaaatggtgattacatgtggggcaactcctgcaatggaaatactgagtttctgtattgctgatccaggaaatgcatttcttgtgccatcaccttactacccgggttgggatagggacataaaatggcgaactggtgttgagttgatacctgttccttgtcgtagtactgataactttaatgtcagtgtcactgctcttgaaatagcttacaaacaggcaaaaaagcgaggaataagagttcgtggggttctcatatctaacccttccaacccaacaggaggcattgtgccaaaagaaatactgcatgaccttctacagtttgctgcagagaagaacatacacttaatttctgatgaaatatttgctggttcaacatatggaagtgacaagtttgttagcgtggcagatgttgtggatgaactagaggactttgataaaggcagagttcatatcatatatgggctctcaaaagacctatctcttgccgggtttcgagttggagtgatatattcctacaatgaacacattgtatcggctgctgctaagattgctcgattttcatctgtctcaagtccaacacaacgtttgcttgtttccatgctttcagatcaaaagtttatttcagaatacataaaggttaacagagagaggctccggaaaatgtaccttctgttttctgatgctttgaaacaacttgggatagaatgcttcaagagcagcggcgggttctattgctgggcagacatgagcaggtacatccgatcttacagcgagaaaggagagcgcaagctctgggataggctgttggaggaagcaaaggtcaacgttaccccaggttcttcttgccattgcattgagcctggatggttcaggtgttgcttcacaacattgagtgaggaggacattcctgtcttggtggaaagactgaggagggtcacagatagcttcaaatccaaacgttgaaacgctagaatagtttattttttggaacccctgcggtatcgaaataaccatatctcaccaggtgctctatagtggattgcagggggcactcaggaaaaggttggacaatctatttattttagaccatagatattcaggggcttcttgctatacagctgcataacaattgctggaagcccctaggctggtggaaggataagtgggggatttgggggacttgtccatgactccatgctggtcagctgtcttcggtttcttacgagccatgatgccgtagcattctggatgtttatgtcctgttggtctggcgatgaggctgatgtgctgagcattcttttcatccagatccgaccatgttctacttttcctttttactcttccttttttttctttggtcacataagctagtgttcaggttcagggattgtaaagcagtggatcctgcatgtgctgccagggttttggacgctgtccatacgtggagtgaatgaacatgcagtcatcatgttttccatcattttttttctttagtttgtttgcgggtatgacattttgtcaaaatgattttgtgcttagttactgggaagggaataaaagaaaggactttttgaggtaaggtgatgagacaagaacaaaactaaatgaagaataatatcctatgtaaagtgctggattctcataatgtcatcattagcatgtgttttctaaaaca

SEQ ID NO: 82577 - DNA, 727 bp, Zea Mays
ctcctctcaactcccctgatctacaccctgtgtcatcaccgtttacaaatcttgcttcaccaagttcatctgcgccactagtaccattgggggaaattggtggcagtgaggaagttcagaggattgatgggacaacacaactggactgggattcaattatagtttctgatgtattggatgaagaaggaagagtacaagtaccatacgaaaacgagatatattgtaatcttggactcaataaagaggatgaggctgcgaataatagaatgcgtgatagattttgtagcagtggtacaaattgtcatacgcaagaaagtatagatattgacaacgaagaccaccatgctgatcagccatgtgaagactacattccagatgagaagagggtggtgtacaataggatgaatccttctatgcagccaggttgtttgtttcctaacaagaaagaatttaggattgttatgcgtcagtatgcaataaaacatgagttcgaggttcgaattgatgttacttcgacaaccagatacgttggatattgtaagggtggtgattgcccttggaggatctatgcacgcgaggagaagaaaggattgcctactattgtggtagttgtactagacgatgtgcacacttgcacatcaagtggaaggaggaagactactacgccaactagtggttgggttgcattccacgctagacccttgctcatgaagaaaccacaaatggg

SEQ ID NO: 82578 - DNA, 3595 bp, Zea Mays
caaccacagtcacgtcgctatcgccagcgccaccagaaaaacgcatcccacgcagaacccctcgcactcctactccctctctgcctccctttcctctccttgtgcccgtcgcattgaaatggagcagcagcagcagaagcacttgcgccggtgctagctgcgacgtgagcccgcagcagccactgccaaggacttcctggcccgcccggcttcgctgttgccggaaaggcggtggctttgggggaagcaaaagcaagcgacggttgcggaaggttcttgcggattcgcgcgcgggaggaatggcagcgcggtcgtcggcggcagcggtggcggtgctgcttcttgcggctgcgggggctgcggcggcagcaggaggagcggagggcgatggggacggccaggcgctgatggcggtcaaggcggggttccggaacgcggcaaacgcgctggcggactgggacggcggccgcgaccactgcgcctggcgcggcgtcgcctgcgacgccgcctccttcgccgtcgtcggcctgaacctgtcaaatctaaacctcggaggggagatctcgccggctatagggcagctcaagagcctacagttcgtggatctcaagctgaacaagctcacaggccaaatcccagatgagattggggattgcgtctccttaaaatatttggatttgtcgggcaacttgctgtatggagacatccccttctccatctctaagctcaagcaacttgaggacctgattttgaagaacaaccaactcaccggacccatcccctccacactgtcacagattccaaatctcaagaccttggatctggcgcagaacaaacttaccggcgacatccccaggctcatctactggaatgaagtactacaatacctaggcttgaggggtaactcactgactggaactttgtcacctgacatgtgccaactgactggcctgtggtactttgacataagggggaacaatctcacaggaacaattccagagggcatagggaactgcactagctttgagattctggatatttcatacaaccaaatctctggagaaataccatacaacataggttaccttcaagtagccacactgtcacttcaaggaaatagactgattggcaaaattcctgaagtgattggcctcatgcaggctcttgctgtcctagaccttagtgagaatgaactggtggggcctattcctcctatacttggcaacctgtcctacacaggcaaactctatttacatggcaacaaactcactggacatataccaccagaactggggaacatgagtaaacttagctacctgcagctgaatgacaatgaattagtgggcacaatcccagctgagcttggcaaactcacagagttatttgaattgaatcttgccaacaacaatcttgagggccatatccctgcaaacatcagctcttgcagtgcactgaacaaattcaatgtgtatggcaatagactgaatggctctatccctgctggtttccagaagctggagagtttgacatacctaaacctttcttcaaacagtttcaaaggccagattccctctgagcttggtcacatagtcaacttggacacactgaatttgagtaaaaaccatctcactggatctgtgcctgctgaatttggaaacttgagaagtgtccaagtgattgacatgtccagcaacaacctgtctggctacctccctgaagaacttggacagctgcaaaaccttgatagcctgattcttaacaacaacagtttggctggggagatccctgctcagctggctaactgcttcagtttagtcagcctaaacctgtcatacaacaacttctctgggcacgtcccgtcatcgaaaaacttctcaaagttcccaatggagagcttcatgggtaatctgatgctccatgtgtactgccaagactccagctgtggacattctcatggaaccaaaggcttcgtcatattgctctgcatcgtgctgctggcgatatacaagaccaaccagccacagctacctgagaaagcatccgacaagccagtgcaagggccaccaaagctggtggttcttcagatggacatggccgtgcacacgtacgaggacatcatgaggctgaccgagaacctgagcgagaagtacatcatcggatacggcgcgtcgagcaccgtgtacaggtgtgacctcaagagcggcaaggccatcgccgtcaagcggctctacagccagtacaaccacagcctccgggagttcgagacggagctggagacgatcggcagcatccggcacaggaacctcgtcagcctccacggcttctcgctctcccctcacgggaacctgctgttctacgactacatggagaacggctccctgtgggatcttctccatggcccgtcgaagaaggtgaagctggactgggacacgaggctgaggatcgcagtgggcgccgcgcaggggctggcgtacctccaccacgactgcaacccgcgcatcgtgcaccgggacgtcaagtcctccaacatcctgctggacggcagcttcgaggcgcacctgtccgacttcggcatcgccaagtgcgtgccggccgccaagtcccacgcctccacctacgtgctgggcaccatcgggtacatcgacccggagtacgcccgcacgtccaggctcaacgagaagtccgacgtctacagcttcggcgtcgtcctgctggagctgctcacggggaggaaggccgtggacaacgagtccaacctgcaccagctgatactctcgaaggccgacgacgacacggtgatggaggccgtggacccggaggtgtcggtgacgtgcacggacatgaacctggtgcggaaggccttccagctcgcgctgctgtgcaccaagcgccaccccgcggaccggccgaccatgcacgaggtcgcgagggtgctgctctccctcctgccgcccgccgccaagcctcccgcgtccaaggcggcggcggcttcggcggcggccggcgactacacgcgcttcctcgcgacggcggccgacctgaggcgcggcggcgtggccgacgacgacaccggcgacaacagctcctccgacgagcagtggttcgtgcggttcggcgaggttatatccaagcacacgctgtcatgatcgtccgtccgtccgtctccctaactcccccccagaaagttttctcccaagtagagatcgaagtgaaagcataggagcacagcgcaggaaatagacgtagggttatgttgtgaggtccgccgtagaatggagacgatgtccgttggttcaggagtggtccaaatggaaggagaggcgttggttactctgccgctgctgctgggacgacgcatttgcagtggttggtttggttgtccttgggtgtaatcacacggcggcacgacaggtgccccccccccccccccccgtccccgtgaacggacgtaagttttcttggatcctagcaggaaccgcattgaatcggaccatgcatcctgcctgcattggaccagggtcgttgtaaatgagatgcatcaccgtattattatttttggctgccatttatgagctgcaccgcggcttgctttcgt

SEQ ID NO: 82579 - DNA, 3797 bp, Zea Mays
caaccacagtcacgtcgctatcgccagcgccaccagaaaaacgcatcccacgcagaacccctcgcactcctactccctctctgcctccctttcctctccttgtgcccgtcgcattgaaatggagcagcagcagcagaagcacttgcgccggtgctagctgcgacgtgagcccgcagcagccactgccaaggacttcctggcccgcccggcttcgctgttgccggaaaggcggtggctttgggggaagcaaaagcaagcgacggttgcggaaggttcttgcggattcgcgcgcgggaggaatggcagcgcggtcgtcggcggcagcggtggcggtgctgcttcttgcggctgcgggggctgcggcggcagcaggaggagcggagggcgatggggacggccaggcgctgatggcggtcaaggcggggttccggaacgcggcaaacgcgctggcggactgggacggcggccgcgaccactgcgcctggcgcggcgtcgcctgcgacgccgcctccttcgccgtcgtcggcctgaacctgtcaaatctaaacctcggaggggagatctcgccggctatagggcagctcaagagcctacagttcgtggatctcaagctgaacaagctcacaggccaaatcccagatgagattggggattgcgtctccttaaaatatttggatttgtcgggcaacttgctgtatggagacatccccttctccatctctaagctcaagcaacttgaggacctgattttgaagaacaaccaactcaccggacccatcccctccacactgtcacagattccaaatctcaagaccttggatctggcgcagaacaaacttaccggcgacatccccaggctcatctactggaatgaagtactacaatacctaggcttgaggggtaactcactgactggaactttgtcacctgacatgtgccaactgactggcctgtggtactttgacataagggggaacaatctcacaggaacaattccagagggcatagggaactgcactagctttgagattctggatatttcatacaaccaaatctctggagaaataccatacaacataggttaccttcaagtagccacactgtcacttcaaggaaatagactgattggcaaaattcctgaagtgattggcctcatgcaggctcttgctgtcctagaccttagtgagaatgaactggtggggcctattcctcctatacttggcaacctgtcctacacaggcaaactctatttacatggcaacaaactcactggacatataccaccagaactggggaacatgagtaaacttagctacctgcagctgaatgacaatgaattagtgggcacaatcccagctgagcttggcaaactcacagagttatttgaattgaatcttgccaacaacaatcttgagggccatatccctgcaaacatcagctcttgcagtgcactgaacaaattcaatgtgtatggcaatagactgaatggctctatccctgctggtttccagaagctggagagtttgacatacctaaacctttcttcaaacagtttcaaaggccagattccctctgagcttggtcacatagtcaacttggacacactagatctttcctacaatgaattctccgggccagttcctcctactattggtgatctcgagcatcttcttgaattgaatttgagtaaaaaccatctcactggatctgtgcctgctgaatttggaaacttgagaagtgtccaagtgattgacatgtccagcaacaacctgtctggctacctccctgaagaacttggacagctgcaaaaccttgatagcctgattcttaacaacaacagtttggctggggagatccctgctcagctggctaactgcttcagtttagtcagcctaaacctgtcatacaacaacttctctgggcacgtcccgtcatcgaaaaacttctcaaagttcccaatggagagcttcatgggtaatctgatgctccatgtgtactgccaagactccagctgtggacattctcatggaaccaaaggcttcgtcatattgctctgcatcgtgctgctggcgatatacaagaccaaccagccacagctacctgagaaagcatccgacaagccagtgcaagtgtcccaggaggactcatctatcactttccttgaccacattgcagggccaccaaagctggtggttcttcagatggacatggccgtgcacacgtacgaggacatcatgaggctgaccgagaacctgagcgagaagtacatcatcggatacggcgcgtcgagcaccgtgtacaggtgtgacctcaagagcggcaaggccatcgccgtcaagcggctctacagccagtacaaccacagcctccgggagttcgagacggagctggagacgatcggcagcatccggcacaggaacctcgtcagcctccacggcttctcgctctcccctcacgggaacctgctgttctacgactacatggagaacggctccctgtgggatcttctccatggtgaggccgggttcctgagctctctttcttttttttttcttaattcatgtcgcttcgtccttccgataacccacgggccacggccattcccaggcccgtcgaagaaggtgaagctggactgggacacgaggctgaggatcgcagtgggcgccgcgcaggggctggcgtacctccaccacgactgcaacccgcgcatcgtgcaccgggacgtcaagtcctccaacatcctgctggacggcagcttcgaggcgcacctgtccgacttcggcatcgccaagtgcgtgccggccgccaagtcccacgcctccacctacgtgctgggcaccatcgggtacatcgacccggagtacgcccgcacgtccaggctcaacgagaagtccgacgtctacagcttcggcgtcgtcctgctggagctgctcacggggaggaaggccgtggacaacgagtccaacctgcaccagctggtgagccgacgacgacacggtgatggaggccgtggacccggaggtgtcggtgacgtgcacggacatgaacctggtgcggaaggccttccagctcgcgctgctgtgcaccaagcgccaccccgcggaccggccgaccatgcacgaggtcgcgagggtgctgctctccctcctgccgcccgccgccaagcctcccgcgtccaaggcggcggcggcttcggcggcggccggcgactacacgcgcttcctcgcgacggcggccgacctgaggcgcggcggcgtggccgacgacgacaccggcgacaacagctcctccgacgagcagtggttcgtgcggttcggcgaggttatatccaagcacacgctgtcatgatcgtccgtccgtccgtctccctaactcccccccagaaagttttctcccaagtagagatcgaagtgaaagcataggagcacagcgcaggaaatagacgtagggttatgttgtgaggtccgccgtagaatggagacgatgtccgttggttcaggagtggtccaaatggaaggagaggcgttggttactctgccgctgctgctgggacgacgcatttgcagtggttggtttggttgtccttgggtgtaatcacacggcggcacgacaggtgccccccccccccccccccgtccccgtgaacggacgtaagttttcttggatcctagcaggaaccgcattgaatcggaccatgcatcctgcctgcattggaccagggtcgttgtaaatgagatgcatcaccgtattattatttttggctgccatttatgagctgcaccgcggcttgctttcgt

SEQ ID NO: 82580 - DNA, 3634 bp, Zea Mays
caaccacagtcacgtcgctatcgccagcgccaccagaaaaacgcatcccacgcagaacccctcgcactcctactccctctctgcctccctttcctctccttgtgcccgtcgcattgaaatggagcagcagcagcagaagcacttgcgccggtgctagctgcgacgtgagcccgcagcagccactgccaaggacttcctggcccgcccggcttcgctgttgccggaaaggcggtggctttgggggaagcaaaagcaagcgacggttgcggaaggttcttgcggattcgcgcgcgggaggaatggcagcgcggtcgtcggcggcagcggtggcggtgctgcttcttgcggctgcgggggctgcggcggcagcaggaggagcggagggcgatggggacggccaggcgctgatggcggtcaaggcggggttccggaacgcggcaaacgcgctggcggactgggacggcggccgcgaccactgcgcctggcgcggcgtcgcctgcgacgccgcctccttcgccgtcgtcggcctgaacctgtcaaatctaaacctcggaggggagatctcgccggctatagggcagctcaagagcctacagttcgtggatctcaagctgaacaagctcacaggccaaatcccagatgagattggggattgcgtctccttaaaatatttggatttgtcgggcaacttgctgtatggagacatccccttctccatctctaagctcaagcaacttgaggacctgattttgaagaacaaccaactcaccggacccatcccctccacactgtcacagattccaaatctcaagaccttggatctggcgcagaacaaacttaccggcgacatccccaggctcatctactggaatgaagtactacaatacctaggcttgaggggtaactcactgactggaactttgtcacctgacatgtgccaactgactggcctgtggtactttgacataagggggaacaatctcacaggaacaattccagagggcatagggaactgcactagctttgagattctggatatttcatacaaccaaatctctggagaaataccatacaacataggttaccttcaagtagccacactgtcacttcaaggaaatagactgattggcaaaattcctgaagtgattggcctcatgcaggctcttgctgtcctagaccttagtgagaatgaactggtggggcctattcctcctatacttggcaacctgtcctacacaggcaaactctatttacatggcaacaaactcactggacatataccaccagaactggggaacatgagtaaacttagctacctgcagctgaatgacaatgaattagtgggcacaatcccagctgagcttggcaaactcacagagttatttgaattgaatcttgccaacaacaatcttgagggccatatccctgcaaacatcagctcttgcagtgcactgaacaaattcaatgtgtatggcaatagactgaatggctctatccctgctggtttccagaagctggagagtttgacatacctaaacctttcttcaaacagtttcaaaggccagattccctctgagcttggtcacatagtcaacttggacacactgaatttgagtaaaaaccatctcactggatctgtgcctgctgaatttggaaacttgagaagtgtccaagtgattgacatgtccagcaacaacctgtctggctacctccctgaagaacttggacagctgcaaaaccttgatagcctgattcttaacaacaacagtttggctggggagatccctgctcagctggctaactgcttcagtttagtcagcctaaacctgtcatacaacaacttctctgggcacgtcccgtcatcgaaaaacttctcaaagttcccaatggagagcttcatgggtaatctgatgctccatgtgtactgccaagactccagctgtggacattctcatggaaccaaagttagcatctctcggacggcggttgcctgcatgatcttaggcttcgtcatattgctctgcatcgtgctgctggcgatatacaagaccaaccagccacagctacctgagaaagcatccgacaagccagtgcaagggccaccaaagctggtggttcttcagatggacatggccgtgcacacgtacgaggacatcatgaggctgaccgagaacctgagcgagaagtacatcatcggatacggcgcgtcgagcaccgtgtacaggtgtgacctcaagagcggcaaggccatcgccgtcaagcggctctacagccagtacaaccacagcctccgggagttcgagacggagctggagacgatcggcagcatccggcacaggaacctcgtcagcctccacggcttctcgctctcccctcacgggaacctgctgttctacgactacatggagaacggctccctgtgggatcttctccatggcccgtcgaagaaggtgaagctggactgggacacgaggctgaggatcgcagtgggcgccgcgcaggggctggcgtacctccaccacgactgcaacccgcgcatcgtgcaccgggacgtcaagtcctccaacatcctgctggacggcagcttcgaggcgcacctgtccgacttcggcatcgccaagtgcgtgccggccgccaagtcccacgcctccacctacgtgctgggcaccatcgggtacatcgacccggagtacgcccgcacgtccaggctcaacgagaagtccgacgtctacagcttcggcgtcgtcctgctggagctgctcacggggaggaaggccgtggacaacgagtccaacctgcaccagctgatactctcgaaggccgacgacgacacggtgatggaggccgtggacccggaggtgtcggtgacgtgcacggacatgaacctggtgcggaaggccttccagctcgcgctgctgtgcaccaagcgccaccccgcggaccggccgaccatgcacgaggtcgcgagggtgctgctctccctcctgccgcccgccgccaagcctcccgcgtccaaggcggcggcggcttcggcggcggccggcgactacacgcgcttcctcgcgacggcggccgacctgaggcgcggcggcgtggccgacgacgacaccggcgacaacagctcctccgacgagcagtggttcgtgcggttcggcgaggttatatccaagcacacgctgtcatgatcgtccgtccgtccgtctccctaactcccccccagaaagttttctcccaagtagagatcgaagtgaaagcataggagcacagcgcaggaaatagacgtagggttatgttgtgaggtccgccgtagaatggagacgatgtccgttggttcaggagtggtccaaatggaaggagaggcgttggttactctgccgctgctgctgggacgacgcatttgcagtggttggtttggttgtccttgggtgtaatcacacggcggcacgacaggtgccccccccccccccccccgtccccgtgaacggacgtaagttttcttggatcctagcaggaaccgcattgaatcggaccatgcatcctgcctgcattggaccagggtcgttgtaaatgagatgcatcaccgtattattatttttggctgccatttatgagctgcaccgcggcttgctttcgt

SEQ ID NO: 82581 - DNA, 3556 bp, Zea Mays
caaccacagtcacgtcgctatcgccagcgccaccagaaaaacgcatcccacgcagaacccctcgcactcctactccctctctgcctccctttcctctccttgtgcccgtcgcattgaaatggagcagcagcagcagaagcacttgcgccggtgctagctgcgacgtgagcccgcagcagccactgccaaggacttcctggcccgcccggcttcgctgttgccggaaaggcggtggctttgggggaagcaaaagcaagcgacggttgcggaaggttcttgcggattcgcgcgcgggaggaatggcagcgcggtcgtcggcggcagcggtggcggtgctgcttcttgcggctgcgggggctgcggcggcagcaggaggagcggagggcgatggggacggccaggcgctgatggcggtcaaggcggggttccggaacgcggcaaacgcgctggcggactgggacggcggccgcgaccactgcgcctggcgcggcgtcgcctgcgacgccgcctccttcgccgtcgtcggcctgaacctgtcaaatctaaacctcggaggggagatctcgccggctatagggcagctcaagagcctacagttcgtggatctcaagctgaacaagctcacaggccaaatcccagatgagattggggattgcgtctccttaaaatatttggatttgtcgggcaacttgctgtatggagacatccccttctccatctctaagctcaagcaacttgaggacctgattttgaagaacaaccaactcaccggacccatcccctccacactgtcacagattccaaatctcaagaccttggatctggcgcagaacaaacttaccggcgacatccccaggctcatctactggaatgaagtactacaatacctaggcttgaggggtaactcactgactggaactttgtcacctgacatgtgccaactgactggcctgtggtactttgacataagggggaacaatctcacaggaacaattccagagggcatagggaactgcactagctttgagattctggatatttcatacaaccaaatctctggagaaataccatacaacataggttaccttcaagtagccacactgtcacttcaaggaaatagactgattggcaaaattcctgaagtgattggcctcatgcaggctcttgctgtcctagaccttagtgagaatgaactggtggggcctattcctcctatacttggcaacctgtcctacacaggcaaactctatttacatggcaacaaactcactggacatataccaccagaactggggaacatgagtaaacttagctacctgcagctgaatgacaatgaattagtgggcacaatcccagctgagcttggcaaactcacagagttatttgaattgaatcttgccaacaacaatcttgagggccatatccctgcaaacatcagctcttgcagtgcactgaacaaattcaatgtgtatggcaatagactgaatggctctatccctgctggtttccagaagctggagagtttgacatacctaaacctttcttcaaacagtttcaaaggccagattccctctgagcttggtcacatagtcaacttggacacactagatctttcctacaatgaattctccgggccagttcctcctactattggtgatctcgagcatcttcttgaattgaatttgagtaaaaaccatctcactggatctgtgcctgctgaatttggaaacttgagaagtgtccaagtgattgacatgtccagcaacaacctgtctggctacctccctgaagaacttggacagctgcaaaaccttgatagcctgattcttaacaacaacagtttggctggggagatccctgctcagctggctaactgcttcagtttagtcagcctaaacctgtcatacaacaacttctctgggcacgtcccgtcatcgaaaaacttctcaaagttcccaatggagagcttcatgggtaatctgatgctccatgtgtactgccaagactccagctgtggacattctcatggaaccaaagttagcatctctcggacggcggttgcctgcatgatcttaggcttcgtcatattgctctgcatcgtgctgctggcgatatacaagaccaaccagccacagctacctgagaaagcatccgacaagccagtgcaagggccaccaaagctggtggttcttcagatggacatggccgtgcacacgtacgaggacatcatgaggctgaccgagaacctgagcgagaagtacatcatcggatacggcgcgtcgagcaccgtgtacaggtgtgacctcaagagcggcaaggccatcgccgtcaagcggctctacagccagtacaaccacagcctccgggagttcgagacggagctggagacgatcggcagcatccggcacaggaacctcgtcagcctccacggcttctcgctctcccctcacgggaacctgctgttctacgactacatggagaacggctccctgtgggatcttctccatggcccgtcgaagaaggtgaagctggactgggacacgaggctgaggatcgcagtgggcgccgcgcaggggctggcgtacctccaccacgactgcaacccgcgcatcgtgcaccgggacgtcaagtcctccaacatcctgctggacggcagcttcgaggcgcacctgtccgacttcggcatcgccaagtgcgtgccggccgccaagtcccacgcctccacctacatactctcgaaggccgacgacgacacggtgatggaggccgtggacccggaggtgtcggtgacgtgcacggacatgaacctggtgcggaaggccttccagctcgcgctgctgtgcaccaagcgccaccccgcggaccggccgaccatgcacgaggtcgcgagggtgctgctctccctcctgccgcccgccgccaagcctcccgcgtccaaggcggcggcggcttcggcggcggccggcgactacacgcgcttcctcgcgacggcggccgacctgaggcgcggcggcgtggccgacgacgacaccggcgacaacagctcctccgacgagcagtggttcgtgcggttcggcgaggttatatccaagcacacgctgtcatgatcgtccgtccgtccgtctccctaactcccccccagaaagttttctcccaagtagagatcgaagtgaaagcataggagcacagcgcaggaaatagacgtagggttatgttgtgaggtccgccgtagaatggagacgatgtccgttggttcaggagtggtccaaatggaaggagaggcgttggttactctgccgctgctgctgggacgacgcatttgcagtggttggtttggttgtccttgggtgtaatcacacggcggcacgacaggtgccccccccccccccccccgtccccgtgaacggacgtaagttttcttggatcctagcaggaaccgcattgaatcggaccatgcatcctgcctgcattggaccagggtcgttgtaaatgagatgcatcaccgtattattatttttggctgccatttatgagctgcaccgcggcttgctttcgt

SEQ ID NO: 82582 - DNA, 3667 bp, Zea Mays
caaccacagtcacgtcgctatcgccagcgccaccagaaaaacgcatcccacgcagaacccctcgcactcctactccctctctgcctccctttcctctccttgtgcccgtcgcattgaaatggagcagcagcagcagaagcacttgcgccggtgctagctgcgacgtgagcccgcagcagccactgccaaggacttcctggcccgcccggcttcgctgttgccggaaaggcggtggctttgggggaagcaaaagcaagcgacggttgcggaaggttcttgcggattcgcgcgcgggaggaatggcagcgcggtcgtcggcggcagcggtggcggtgctgcttcttgcggctgcgggggctgcggcggcagcaggaggagcggagggcgatggggacggccaggcgctgatggcggtcaaggcggggttccggaacgcggcaaacgcgctggcggactgggacggcggccgcgaccactgcgcctggcgcggcgtcgcctgcgacgccgcctccttcgccgtcgtcggcctgaacctgtcaaatctaaacctcggaggggagatctcgccggctatagggcagctcaagagcctacagttcgtggatctcaagctgaacaagctcacaggccaaatcccagatgagattggggattgcgtctccttaaaatatttggatttgtcgggcaacttgctgtatggagacatccccttctccatctctaagctcaagcaacttgaggacctgattttgaagaacaaccaactcaccggacccatcccctccacactgtcacagattccaaatctcaagaccttggatctggcgcagaacaaacttaccggcgacatccccaggctcatctactggaatgaagtactacaatacctaggcttgaggggtaactcactgactggaactttgtcacctgacatgtgccaactgactggcctgtggtactttgacataagggggaacaatctcacaggaacaattccagagggcatagggaactgcactagctttgagattctggatatttcatacaaccaaatctctggagaaataccatacaacataggttaccttcaagtagccacactgtcacttcaaggaaatagactgattggcaaaattcctgaagtgattggcctcatgcaggctcttgctgtcctagaccttagtgagaatgaactggtggggcctattcctcctatacttggcaacctgtcctacacaggcaaactctatttacatggcaacaaactcactggacatataccaccagaactggggaacatgagtaaacttagctacctgcagctgaatgacaatgaattagtgggcacaatcccagctgagcttggcaaactcacagagttatttgaattgaatcttgccaacaacaatcttgagggccatatccctgcaaacatcagctcttgcagtgcactgaacaaattcaatgtgtatggcaatagactgaatggctctatccctgctggtttccagaagctggagagtttgacatacctaaacctttcttcaaacagtttcaaaggccagattccctctgagcttggtcacatagtcaacttggacacactagatctttcctacaatgaattctccgggccagttcctcctactattggtgatctcgagcatcttcttgaattgaatttgagtaaaaaccatctcactggatctgtgcctgctgaatttggaaacttgagaagtgtccaagtgattgacatgtccagcaacaacctgtctggctacctccctgaagaacttggacagctgcaaaaccttgatagcctgattcttaacaacaacagtttggctggggagatccctgctcagctggctaactgcttcagtttagtcagcctaaacctgtcatacaacaacttctctgggcacgtcccgtcatcgaaaaacttctcaaagttcccaatggagagcttcatgggtaatctgatgctccatgtgtactgccaagactccagctgtggacattctcatggaaccaaaggcttcgtcatattgctctgcatcgtgctgctggcgatatacaagaccaaccagccacagctacctgagaaagcatccgacaagccagtgcaagggccaccaaagctggtggttcttcagatggacatggccgtgcacacgtacgaggacatcatgaggctgaccgagaacctgagcgagaagtacatcatcggatacggcgcgtcgagcaccgtgtacaggtgtgacctcaagagcggcaaggccatcgccgtcaagcggctctacagccagtacaaccacagcctccgggagttcgagacggagctggagacgatcggcagcatccggcacaggaacctcgtcagcctccacggcttctcgctctcccctcacgggaacctgctgttctacgactacatggagaacggctccctgtgggatcttctccatggcccgtcgaagaaggtgaagctggactgggacacgaggctgaggatcgcagtgggcgccgcgcaggggctggcgtacctccaccacgactgcaacccgcgcatcgtgcaccgggacgtcaagtcctccaacatcctgctggacggcagcttcgaggcgcacctgtccgacttcggcatcgccaagtgcgtgccggccgccaagtcccacgcctccacctacgtgctgggcaccatcgggtacatcgacccggagtacgcccgcacgtccaggctcaacgagaagtccgacgtctacagcttcggcgtcgtcctgctggagctgctcacggggaggaaggccgtggacaacgagtccaacctgcaccagctgatactctcgaaggccgacgacgacacggtgatggaggccgtggacccggaggtgtcggtgacgtgcacggacatgaacctggtgcggaaggccttccagctcgcgctgctgtgcaccaagcgccaccccgcggaccggccgaccatgcacgaggtcgcgagggtgctgctctccctcctgccgcccgccgccaagcctcccgcgtccaaggcggcggcggcttcggcggcggccggcgactacacgcgcttcctcgcgacggcggccgacctgaggcgcggcggcgtggccgacgacgacaccggcgacaacagctcctccgacgagcagtggttcgtgcggttcggcgaggttatatccaagcacacgctgtcatgatcgtccgtccgtccgtctccctaactcccccccagaaagttttctcccaagtagagatcgaagtgaaagcataggagcacagcgcaggaaatagacgtagggttatgttgtgaggtccgccgtagaatggagacgatgtccgttggttcaggagtggtccaaatggaaggagaggcgttggttactctgccgctgctgctgggacgacgcatttgcagtggttggtttggttgtccttgggtgtaatcacacggcggcacgacaggtgccccccccccccccccccgtccccgtgaacggacgtaagttttcttggatcctagcaggaaccgcattgaatcggaccatgcatcctgcctgcattggaccagggtcgttgtaaatgagatgcatcaccgtattattatttttggctgccatttatgagctgcaccgcggcttgctttcgt

SEQ ID NO: 82583 - DNA, 3585 bp, Zea Mays
aacagctaacgctatgctctgatcttcccctatctctcctcgctgcgcacagagcagcggctgccccccgaaagcaaccacagtcacgtcgctatcgccagcgccaccagaaaaacgcatcccacgcagaacccctcgcactcctactccctctctgcctccctttcctctccttgtgcccgtcgcattgaaatggagcagcagcagcagaagcacttgcgccggtgctagctgcgacgtgagcccgcagcagccactgccaaggacttcctggcccgcccggcttcgctgttgccggaaaggcggtggctttgggggaagcaaaagcaagcgacggttgcggaaggttcttgcggattcgcgcgcgggaggaatggcagcgcggtcgtcggcggcagcggtggcggtgctgcttcttgcggctgcgggggctgcggcggcagcaggaggagcggagggcgatggggacggccaggcgctgatggcggtcaaggcggggttccggaacgcggcaaacgcgctggcggactgggacggcggccgcgaccactgcgcctggcgcggcgtcgcctgcgacgccgcctccttcgccgtcgtcggcctgaacctgtcaaatctaaacctcggaggggagatctcgccggctatagggcagctcaagagcctacagttcgtggatctcaagctgaacaagctcacaggccaaatcccagatgagattggggattgcgtctccttaaaatatttggatttgtcgggcaacttgctgtatggagacatccccttctccatctctaagctcaagcaacttgaggacctgattttgaagaacaaccaactcaccggacccatcccctccacactgtcacagattccaaatctcaagaccttggatctggcgcagaacaaacttaccggcgacatccccaggctcatctactggaatgaagtactacaatacctaggcttgaggggtaactcactgactggaactttgtcacctgacatgtgccaactgactggcctgtggtactttgacataagggggaacaatctcacaggaacaattccagagggcatagggaactgcactagctttgagattctggatatttcatacaaccaaatctctggagaaataccatacaacataggttaccttcaagtagccacactgtcacttcaaggaaatagactgattggcaaaattcctgaagtgattggcctcatgcaggctcttgctgtcctagaccttagtgagaatgaactggtggggcctattcctcctatacttggcaacctgtcctacacaggcaaactctatttacatggcaacaaactcactggacatataccaccagaactggggaacatgagtaaacttagctacctgcagctgaatgacaatgaattagtgggcacaatcccagctgagcttggcaaactcacagagttatttgaattgaatcttgccaacaacaatcttgagggccatatccctgcaaacatcagctcttgcagtgcactgaacaaattcaatgtgtatggcaatagactgaatggctctatccctgctggtttccagaagctggagagtttgacatacctaaacctttcttcaaacagtttcaaaggccagattccctctgagcttggtcacatagtcaacttggacacactgaatttgagtaaaaaccatctcactggatctgtgcctgctgaatttggaaacttgagaagtgtccaagtgattgacatgtccagcaacaacctgtctggctacctccctgaagaacttggacagctgcaaaaccttgatagcctgattcttaacaacaacagtttggctggggagatccctgctcagctggctaactgcttcagtttagtcagcctaaacctgtcatacaacaacttctctgggcacgtcccgtcatcgaaaaacttctcaaagttcccaatggagagcttcatgggtaatctgatgctccatgtgtactgccaagactccagctgtggacattctcatggaaccaaagttagcatctctcggacggcggttgcctgcatgatcttaggcttcgtcatattgctctgcatcgtgctgctggcgatatacaagaccaaccagccacagctacctgagaaagcatccgacaagccagtgcaagggccaccaaagctggtggttcttcagatggacatggccgtgcacacgtacgaggacatcatgaggctgaccgagaacctgagcgagaagtacatcatcggatacggcgcgtcgagcaccgtgtacaggtgtgacctcaagagcggcaaggccatcgccgtcaagcggctctacagccagtacaaccacagcctccgggagttcgagacggagctggagacgatcggcagcatccggcacaggaacctcgtcagcctccacggcttctcgctctcccctcacgggaacctgctgttctacgactacatggagaacggctccctgtgggatcttctccatggcccgtcgaagaaggtgaagctggactgggacacgaggctgaggatcgcagtgggcgccgcgcaggggctggcgtacctccaccacgactgcaacccgcgcatcgtgcaccgggacgtcaagtcctccaacatcctgctggacggcagcttcgaggcgcacctgtccgacttcggcatcgccaagtgcgtgccggccgccaagtcccacgcctccacctacgtgctgggcaccatcgggtacatcgacccggagtacgcccgcacgtccaggctcaacgagaagtccgacgtctacagcttcggcgtcgtcctgctggagctgctcacggggaggaaggccttccagctcgcgctgctgtgcaccaagcgccaccccgcggaccggccgaccatgcacgaggtcgcgagggtgctgctctccctcctgccgcccgccgccaagcctcccgcgtccaaggcggcggcggcttcggcggcggccggcgactacacgcgcttcctcgcgacggcggccgacctgaggcgcggcggcgtggccgacgacgacaccggcgacaacagctcctccgacgagcagtggttcgtgcggttcggcgaggttatatccaagcacacgctgtcatgatcgtccgtccgtccgtctccctaactcccccccagaaagttttctcccaagtagagatcgaagtgaaagcataggagcacagcgcaggaaatagacgtagggttatgttgtgaggtccgccgtagaatggagacgatgtccgttggttcaggagtggtccaaatggaaggagaggcgttggttactctgccgctgctgctgggacgacgcatttgcagtggttggtttggttgtccttgggtgtaatcacacggcggcacgacaggtgccccccccccccccccccgtccccgtgaacggacgtaagttttcttggatcctagcaggaaccgcattgaatcggaccatgcatcctgcctgcattggaccagggtcgttgtaaatgagatgcatcaccgtattattatttttggctgccatttatgagctgcaccgcggcttgctttcgt

SEQ ID NO: 82584 - DNA, 357 bp, Zea Mays
caccacggtacggcgctgctcgcaactcacgaactgcacctctgcatttcgtatccactcactgtacgccggctgcctgccggctgccgtcccggccatttgtgctcggtttcatctgcacgccacagccgcaggcaggacggcagcattctttccttggttgtgcgcactgtacttgttgctgctggtgctgttgttggcttgttgggctttcagtctctgcacgctgcttacaacaaaacaagagcctgaacctgttgttgcagcggaacgaacgaaaccttgagaacttccagagacttggcatgtgatgagacccggagaaaggaaggtgaggtgggaacagctcctgctcct

SEQ ID NO: 82585 - DNA, 1567 bp, Zea Mays
gcttgcgcagttgcgcctgcctcgggcactcgccgtctcttgccgcgggcgcacgactttttccccaacaaccgatcgcccacgcaaacctctcctcaactcgatcaaaccggggacggaaaaggcccaccaaaatcccccaaaatttcgtacctcctcagccccagcaatctcgaatcccgatgctcacagcctccaccgaatccctggcggtcgtcatcagcgcatgagctttcttcgctcgctagcggactccttctcatcgctgctcttctcgtcgggaggcggggcggtgtccatggacgcggcgggggcggccccgtcgccggcggcggtggtgggggagcgcgtggcggtgaagctcagggggtacttcgacctcgccaaagaggagatcgacaaggccgtgcgcgctgaggagtgggggctccccgacgaggccaccgcgcactaccgcaacgcgatgcgggtcatgctcgaggccaaggccgcgcgcgtccccgatgccgtctcctccagcgagagggggcaggtcagggtgtaccaggagaagatcgccaagtggcaggcccaggtcgaggagcggctcagagtgcttggtcagagaagcggtgaaggggccactgctgcagaagtgcccaagaaggttgctgcaaacaatcctatcattaggactgcaaaaacagcgtcaaatagcatccaaagatctcccttgcaaaatagccctaccttcaacaggggtggccaagcatctacacatcagaagatagggagcggagcttccagaccagttcagaaggctggtggaaactatgatgacaagcttgttgaaatgattaatacaacaattgtggacagaagcccttctgttaaatgggatgacgttgctggtcttgacaaagcaaagcaagcactcatggaaatggttattttgccttctaaacgaagggatttgttcaccggacttcggagacctgctaggggtttgcttctctttggcccacctgggaatggaaaaacaatgcttgccaaagctgttgcatcagaatctgaagcaacattttttaatgtttcggcttcttcattgacatcaaagtgggtaggagaagctgaaaaacttgtcaggacacttttcatggttgcaattgatagacaaccatctgttatttttatggacgagattgatagtgtcatgtctacaaggttagctaatgagaatgactctagcaggcgtctgaaatctgaatttcttatccagtttgatggggtgtcctcaaacccagatgatctagtaattgttataggggctactaataaacctcaagaattggatgatgctgttcttcgaaggctggtaaaaagaatatatgtgccactacctgatccaaatgtacgaaggttacttctgaaaaatcagctcaaaggacaatcattcaaactgtcgaaccatgattttgaaagacttgctgtggagaccgaagggtattctggaagtgacctgagagccttgtgtgaagaagctgcaatgatgccaataagagagctcgtcgagccgagtcgagccagc

SEQ ID NO: 82586 - DNA, 2087 bp, Zea Mays
cggaggctgtgtggcgttggttgctagcaatccttgatatacctgatggctatgattgatgagcctctgtacccaattgctgtactgattgatgagcttaagaatgaggacatccagttgcgtctaaactccattagaagactttcgacaattgcacgggctcttggagaagaaagaaccaggaaggagctgattccctttcttagtgaaaacaatgacgatgaagatgaggtgcttcttgcaatggctgaggaattgggtgtgttcattccttatgttgggggtgtagaacatgctcatgttttgcttccccctttggaaacattgtgtacagtagaagaaacttgtgtccgtgataaggcagttgaatctctgtgccgtattggtgcacaaatgaaggaaactgacatagtcgactggttcattccagtagtaaagaggctagcagctggtgagtggtttacagctcgtgtatcatcctgtggtcttttccacatagcctatccaagtgcattggaccaattgaaaacagaattaaggactatctatggtcagttatgtcaggatgacatgcctatggtcagaagagctgctgcatcaaatcttggaaagtttgcagccacagttgaacagaatcatttgaagacagaaataatgtcaatatttgatgacttaacccaagatgatcaagattcagtgcgtttgttggctgttgaaggttgtgctgctcttggtaaattgttggagccacaagattgtgtagctcacattcttccagtcattgtcaatttctcccaggataaatcatggcgtgttcgttatatggtcgccaatcagttatatgagctctgtgaggctgttggccctgagcccacaagagctgatttggtgcctgcatatgttcgtctccttcgcgataatgaggctgaagtgcgaatagcggctgctggaaaagtaactaagttctgccgcatattaaatccacagctttcaatccaacatattcttccgtgcgttaaggaattgtcatcagattcatcccagcatgttcgttcagctttagcctcagtcattatgggaatggctcctgtactgggaaaggatgctaccatggaacagcttcttccaatttttctctctttgctgaaggatgaatttccagatgttcggcttaacataatcagcaagcttgatcaggttaatcaggttattggcattgactttttatcccaaacactgctaccagccattgtagaacttgcagaggataggcactggagagtccggcttgcaataattgagtacatcccattgctggcgagtcagttaggtgttgggttttttgatgacaagctgggggcactctgcatgcaatggttggaagataaggtcttctcaatcagagatgctgccgccaacaacttgaagcgccttgcggaagagttcggtccagagtgggcaatgcagcatataattcctcaggtgctggagaagatcaacaatccgcactatttgtaccgcatgacgattctgcaggctatctccttgctagctcccgtcatgggtgcagagatcacttgtcaaaagctgcttccagtcgtcattaattcttcaaaggacagggttcctaacatcaagttcaacgttgcaaaagtactaaagtcacttgtaccgatcctcgatcaatctaccgtgaaaccatgccttgttgagctcagcgaggaccctgacgtcgatgtgaggtactacgcgaaccaggcgctgcaggcgtgcgatcaaatgatggtgtcgagctaactagccgtgtgcccgagtacttagagttcgatgcctcatagtccaattttggattacctgtaatttgttgggccttttagattgaagagttttccgtctagcctcggtggacagatcgacgctgcccatgctgataaatggacggtcctgatccattgttcgttgtgttattaatgttgtataattgagcaggacacaacacgtacgttactctctgtgtctgtgtgtgtttgcatggcattgtctcgcaggtagttgagcaaccacgtaataattctttccagcgcatg

SEQ ID NO: 82587 - DNA, 2166 bp, Zea Mays
cccgtcgcattctgcagcgccagctcgctcctcgccccgcccccttctctcagcggcgacgcctcgggcgttcctaccctgccccctctccggacccccacgccgtcggcgaagcagccgggcaagagcccgatccagaccccgcgagcaatccttgatatacctgatggctatgattgatgagcctctgtacccaattgctgtactgattgatgagcttaagaatgaggacatccagttgcgtctaaactccattagaagactttcgacaattgcacgggctcttggagaagaaagaaccaggaaggagctgattccctttcttagtgaaaacaatgacgatgaagatgaggtgcttcttgcaatggctgaggaattgggtgtgttcattccttatgttgggggtgtagaacatgctcatgttttgcttccccctttggaaacattgtgtacagtagaagaaacttgtgtccgtgataaggcagttgaatctctgtgccgtattggtgcacaaatgaaggaaactgacatagtcgactggttcattccagtagtaaaggctagcagctggtgagtggtttacagctcgtgtatcatcctgtggtcttttccacatagcctatccaagtgcattggaccaattgaaaacagaattaaggactatctatggtcagttatgtcaggatgacatgcctatggtcagaagagctgctgcatcaaatcttggaaagtttgcagccacagttgaacagaatcatttgaagacagaaataatgtcaatatttgatgacttaacccaagatgatcaagattcagtgcgtttgttggctgttgaaggttgtgctgctcttggtaaattgttggagccacaagattgtgtagctcacattcttccagtcattgtcaatttctcccaggataaatcatggcgtgttcgttatatggtcgccaatcagttatatgagctctgtgaggctgttggccctgagcccacaagagctgatttggtgcctgcatatgttcgtctccttcgcgataatgaggctgaagtgcgaatagcggctgctggaaaagtaactaagttctgccgcatattaaatccacagctttcaatccaacatattcttccgtgcgttaaggaattgtcatcagattcatcccagcatgttcgttcagctttagcctcagtcattatgggaatggctcctgtactgggaaaggatgctaccatggaacagcttcttccaatttttctctctttgctgaaggatgaatttccagatgttcggcttaacataatcagcaagcttgatcaggttaatcagccattgtagaacttgcagaggataggcactggagagtccggcttgcaataattgagtacatcccattgctggcgagtcagttaggtgttgggttttttgatgacaagctgggggcactctgcatgcaatggttggaagataaggtcttctcaatcagagatgctgccgccaacaacttgaagcgccttgcggaagagttcggtccagagtgggcaatgcagcatataattcctcaggtgctggagaagatcaacaatccgcactatttgtaccgcatgacgattctgcaggctatctccttgctagctcccgtcatgggtgcagagatcacttgtcaaaagctgcttccagtcgtcattaattcttcaaaggacagggttcctaacatcaagttcaacgttgcaaaagtactaaagtcacttgtaccgatcctcgatcaatctaccgtgaaaccatgccttgttgagctcagcgaggaccctgacgtcgatgtgaggtactacgcgaaccaggcgctgcaggcgtgcgatcaaatgatggtgtcgagctaactagccgtgtgcccgagtacttagagttcgatgcctcatagtccaattttggattacctgtaatttgttgggccttttagattgaagagttttccgtctagcctcggtggacagatcgacgctgcccatgctgataaatggacggtcctgatccattgttcgttgtgttattaatgttgtataattgagcaggacacaacacgtacgttactctctgtgtctgtgtgtgtttgcatggcattgtctcgcaggtagttgagcaaccacgtaataattctttccagcgcatg

SEQ ID NO: 82588 - DNA, 2073 bp, Zea Mays
cccgtcgcattctgcagcgccagctcgctcctcgccccgcccccttctctcagcggcgacgcctcgggcgttcctaccctgccccctctccggacccccacgccgtcggcgaagcagccgggcaagagcccgatccagaccccgcgagcaatccttgatatacctgatggctatgattgatgagcctctgtacccaattgctgtactgattgatgagcttaagaatgaggacatccagttgcgtctaaactccattagaagactttcgacaattgcacgggctcttggagaagaaagaaccaggaaggagctgattccctttcttagtgaaaacaatgacgatgaagatgaggtgcttcttgcaatggctgaggaattgggtgtgttcattccttatgttgggggtgtagaacatgctcatgttttgcttccccctttggaaacattgtgtacagtagaagaaacttgtgtccgtgataaggcagttgaatctctgtgccgtattggtgcacaaatgaaggaaactgacatagtcgactggttcattccagtagtaaagatcaagattcagtgcgtttgttggctgttgaaggttgtgctgctcttggtaaattgttggagccacaagattgtgtagctcacattcttccagtcattgtcaatttctcccaggataaatcatggcgtgttcgttatatggtcgccaatcagttatatgagctctgtgaggctgttggccctgagcccacaagagctgatttggtgcctgcatatgttcgtctccttcgcgataatgaggctgaagtgcgaatagcggctgctggaaaagtaactaagttctgccgcatattaaatccacagctttcaatccaacatattcttccgtgcgttaaggaattgtcatcagattcatcccagcatgttcgttcagctttagcctcagtcattatgggaatggctcctgtactgggaaaggatgctaccatggaacagcttcttccaatttttctctctttgctgaaggatgaatttccagatgttcggcttaacataatcagcaagcttgatcaggttaatcaggttattggcattgactttttatcccaaacactgctaccagccattgtagaacttgcagaggataggcactggagagtccggcttgcaataattgagtacatcccattgctggcgagtcagttaggtgttgggttttttgatgacaagctgggggcactctgcatgcaatggttggaagataaggtcttctcaatcagagatgctgccgccaacaacttgaagcgccttgcggaagagttcggtccagagtgggcaatgcagcatataattcctcaggtgctggagaagatcaacaatccgcactatttgtaccgcatgacgattctgcaggctatctccttgctagctcccgtcatgggtgcagagatcacttgtcaaaagctgcttccagtcgtcattaattcttcaaaggacagggttcctaacatcaagttcaacgttgcaaaagtactaaagtcacttgtaccgatcctcgatcaatctgtgagttcatccggttattttgcaagttgttaccgttttgaaaagcgctgcgtttgtatttccgcgttattggggaatatcgtgaatgcttacttcgcaggtcgtggagaagaccgtgaaaccatgccttgttgagctcagcgaggaccctgacgtcgatgtgaggtactacgcgaaccaggcgctgcaggcgtgcgatcaaatgatggtgtcgagctaactagccgtgtgcccgagtacttagagttcgatgcctcatagtccaattttggattacctgtaatttgttgggccttttagattgaagagttttccgtctagcctcggtggacagatcgacgctgcccatgctgataaatggacggtcctgatccattgttcgttgtgttattaatgttgtataattgagcaggacacaacacgtacgttactctctgtgtctgtgtgtgtttgcatggcattgtctcgcaggtagttgagcaaccacgtaataattctttccagcgcatg

SEQ ID NO: 82589 - DNA, 2206 bp, Zea Mays
cccgtcgcattctgcagcgccagctcgctcctcgccccgcccccttctctcagcggcgacgcctcgggcgttcctaccctgccccctctccggacccccacgccgtcggcgaagcagccgggcaagagcccgatccagaccccgcgagcaatccttgatatacctgatggctatgattgatgagcctctgtacccaattgctgtactgattgatgagcttaagaatgaggacatccagttgcgtctaaactccattagaagactttcgacaattgcacgggctcttggagaagaaagaaccaggaaggagctgattccctttcttagtgaaaacaatgacgatgaagatgaggtgcttcttgcaatggctgaggaattgggtgtgttcattccttatgttgggggtgtagaacatgctcatgttttgcttccccctttggaaacattgtgtacagtagaagaaacttgtgtccgtgataaggcagttgaatctctgtgccgtattggtgcacaaatgaaggaaactgacatagtcgactggttcattccagtagtaaaggctagcagctggtgagtggtttacagctcgtgtatcatcctgtggtcttttccacatagcctatccaagtgcattggaccaattgaaaacagaattaaggactatctatggtcagttatgtcaggatgacatgcctatggtcagaagagctgctgcatcaaatcttggaaagtttgcagccacagttgaacagaatcatttgaagacagaaataatgtcaatatttgatgacttaacccaagatgatcaagattcagtgcgtttgttggctgttgaaggttgtgctgctcttggtaaattgttggagccacaagattgtgtagctcacattcttccagtcattgtcaatttctcccaggataaatcatggcgtgttcgttatatggtcgccaatcagttatatgagctctgtgaggctgttggccctgagcccacaagagctgatttggtgcctgcatatgttcgtctccttcgcgataatgaggctgaagtgcgaatagcggctgctggaaaagtaactaagttctgccgcatattaaatccacagctttcaatccaacatattcttccgtgcgttaaggaattgtcatcagattcatcccagcatgttcgttcagctttagcctcagtcattatgggaatggctcctgtactgggaaaggatgctaccatggaacagcttcttccaatttttctctctttgctgaaggatgaatttccagatgttcggcttaacataatcagcaagcttgatcaggttaatcaggttattggcattgactttttatcccaaacactgctaccagccattgtagaacttgcagaggataggcactggagagtccggcttgcaataattgagtacatcccattgctggcgagtcagttaggtgttgggttttttgatgacaagctgggggcactctgcatgcaatggttggaagataaggtcttctcaatcagagatgctgccgccaacaacttgaagcgccttgcggaagagttcggtccagagtgggcaatgcagcatataattcctcaggtgctggagaagatcaacaatccgcactatttgtaccgcatgacgattctgcaggctatctccttgctagctcccgtcatgggtgcagagatcacttgtcaaaagctgcttccagtcgtcattaattcttcaaaggacagggttcctaacatcaagttcaacgttgcaaaagtactaaagtcacttgtaccgatcctcgatcaatctaccgtgaaaccatgccttgttgagctcagcgaggaccctgacgtcgatgtgaggtactacgcgaaccaggcgctgcaggcgtgcgatcaaatgatggtgtcgagctaactagccgtgtgcccgagtacttagagttcgatgcctcatagtccaattttggattacctgtaatttgttgggccttttagattgaagagttttccgtctagcctcggtggacagatcgacgctgcccatgctgataaatggacggtcctgatccattgttcgttgtgttattaatgttgtataattgagcaggacacaacacgtacgttactctctgtgtctgtgtgtgtttgcatggcattgtctcgcaggtagttgagcaaccacgtaataattctttccagcgcatg

SEQ ID NO: 82590 - DNA, 533 bp, Zea Mays
ttttttttaaaaaaaaacatcacttgtcaaaagctgcttccagtcgtcattaattcttcaaaggacagggttcctaacatcaagttcaacgttgcaaaagtactaaagtcacttgtaccgatcctcgatcaatctaccgtgaaaccatgccttgttgagctcagcgaggaccctgacgtcgatgtgaggtactacgcgaaccaggcgctgcaggcgtgcgatcaaatgatggtgtcgagctaactagccgtgtgcccgagtacttagagttcgatgcctcatagtccaattttggattacctgtaatttgttgggccttttagattgaagagttttccgtctagcctcggtggacagatcgacgctgcccatgctgataaatggacggtcctgatccattgttcgttgtgttattaatgttgtataattgagcaggacacaacacgtacgttactctctgtgtctgtgtgtgtttgcatggcattgtctcgcaggtagttgagcaaccacgtaataattctttccagcgcatg

SEQ ID NO: 82591 - DNA, 2806 bp, Zea Mays
ctatttgatacacaaattgttttttgtgtgattttgcaaataaatctttctgatagtagaagttctgattgatagtgtcatgtctacaaggttagctaatgagaatgactctagcaggcgtctgaaatctgaatttcttatccagtttgatggggtgtcctcaaacccagatgatctagtaattgttataggggctactaataaacctcaagaattggatgatgctgttcttcgaaggctggtaaaaagaatatatgtgccactacctgatccaaatgtacgaaggttacttctgaaaaatcagctcaaaggacaatcattcaaactgtcgaaccatgattttgaaagacttgctgtggagaccgaagggtattctggaagtgacctgagagccttgtgtgaagaagctgcaatgatgccaataagagagctcggtccacaaaatattcttactatcaaagcaaatcagctgcgacctttgaggtacgaggacttcaagaacgcgatgacggtgatcaggccaagcttgcagaagagcaaatgggacgagctggagaactggaacgaggaattcggttcgagctgacggagacgcgcgctgcctgatgatgatgatcaagcggccctatttccagatgtacatgatttatgtctcacacacacatggtggcttacacacacacacgcgcccatcggccatcgatgcgtcctcagtctggacagcgcgtcttcaacagaagcagaagcaatccttgatatacctgatggctatgattgatgagcctctgtacccaattgctgtactgattgatgagcttaagaatgaggacatccagttgcgtctaaactccattagaagactttcgacaattgcacgggctcttggagaagaaagaaccaggaaggagctgattccctttcttagtgaaaacaatgacgatgaagatgaggtgcttcttgcaatggctgaggaattgggtgtgttcattccttatgttgggggtgtagaacatgctcatgttttgcttccccctttggaaacattgtgtacagtagaagaaacttgtgtccgtgataaggcagttgaatctctgtgccgtattggtgcacaaatgaaggaaactgacatagtcgactggttcattccagtagtaaagaggctagcagctggtgagtggtttacagctcgtgtatcatcctgtggtcttttccacatagcctatccaagtgcattggaccaattgaaaacagaattaaggactatctatggtcagttatgtcaggatgacatgcctatggtcagaagagctgctgcatcaaatcttggaaagtttgcagccacagttgaacagaatcatttgaagacagaaataatgtcaatatttgatgacttaacccaagatgatcaagattcagtgcgtttgttggctgttgaaggttgtgctgctcttggtaaattgttggagccacaagattgtgtagctcacattcttccagtcattgtcaatttctcccaggataaatcatggcgtgttcgttatatggtcgccaatcagttatatgagctctgtgaggctgttggccctgagcccacaagagctgatttggtgcctgcatatgttcgtctccttcgcgataatgaggctgaagtgcgaatagcggctgctggaaaagtaactaagttctgccgcatattaaatccacagctttcaatccaacatattcttccgtgcgttaaggaattgtcatcagattcatcccagcatgttcgttcagctttagcctcagtcattatgggaatggctcctgtactgggaaaggatgctaccatggaacagcttcttccaatttttctctctttgctgaaggatgaatttccagatgttcggcttaacataatcagcaagcttgatcaggttaatcaggttattggcattgactttttatcccaaacactgctaccagccattgtagaacttgcagaggataggcactggagagtccggcttgcaataattgagtacatcccattgctggcgagtcagttaggtgttgggttttttgatgacaagctgggggcactctgcatgcaatggttggaagataaggtcttctcaatcagagatgctgccgccaacaacttgaagcgccttgcggaagagttcggtccagagtgggcaatgcagcatataattcctcaggtgctggagaagatcaacaatccgcactatttgtaccgcatgacgattctgcaggctatctccttgctagctcccgtcatgggtgcagagatcacttgtcaaaagctgcttccagtcgtcattaattcttcaaaggacagggttcctaacatcaagttcaacgttgcaaaagtactaaagtcacttgtaccgatcctcgatcaatctaccgtgaaaccatgccttgttgagctcagcgaggaccctgacgtcgatgtgaggtactacgcgaaccaggcgctgcaggcgtgcgatcaaatgatggtgtcgagctaactagccgtgtgcccgagtacttagagttcgatgcctcatagtccaattttggattacctgtaatttgttgggccttttagattgaagagttttccgtctagcctcggtggacagatcgacgctgcccatgctgataaatggacggtcctgatccattgttcgttgtgttattaatgttgtataattgagcaggacacaacacgtacgttactctctgtgtctgtgtgtgtttgcatggcattgtctcgcaggtagttgagcaaccacgtaataattctttccagcgcatg

SEQ ID NO: 82592 - DNA, 3931 bp, Zea Mays
gcttgcgcagttgcgcctgcctcgggcactcgccgtctcttgccgcgggcgcacgactttttccccaacaaccgatcgcccacgcaaacctctcctcaactcgatcaaaccggggacggaaaaggcccaccaaaatcccccaaaatttcgtacctcctcagccccagcaatctcgaatcccgatgctcacagcctccaccgaatccctggcggtcgtcatcagcgcatgagctttcttcgctcgctagcggactccttctcatcgctgctcttctcgtcgggaggcggggcggtgtccatggacgcggcgggggcggccccgtcgccggcggcggtggtgggggagcgcgtggcggtgaagctcagggggtacttcgacctcgccaaagaggagatcgacaaggccgtgcgcgctgaggagtgggggctccccgacgaggccaccgcgcactaccgcaacgcgatgcgggtcatgctcgaggccaaggccgcgcgcgtccccgatgccgtctcctccagcgagagggggcaggtcagggtgtaccaggagaagatcgccaagtggcaggcccaggtcgaggagcggctcagagtgcttggtcagagaagcggtgaaggggccactgctgcagaagtgcccaagaaggttgctgcaaacaatcctatcattaggactgcaaaaacagcgtcaaatagcatccaaagatctcccttgcaaaatagccctaccttcaacaggggtggccaagcatctacacatcagaagatagggagcggagcttccagaccagttcagaaggctggtggaaactatgatgacaagcttgttgaaatgattaatacaacaattgtggacagaagcccttctgttaaatgggatgacgttgctggtcttgacaaagcaaagcaagcactcatggaaatggttattttgccttctaaacgaagggatttgttcaccggacttcggagacctgctaggggtttgcttctctttggcccacctgggaatggaaaaacaatgcttgccaaagctgttgcatcagaatctgaagcaacattttttaatgtttcggcttcttcattgacatcaaagtgggtaggagaagctgaaaaacttgtcaggacacttttcatggttgcaattgatagacaaccatctgttatttttatggacgagattgatagtgtcatgtctacaaggttagctaatgagaatgactctagcaggcgtctgaaatctgaatttcttatccagtttgatggggtgtcctcaaacccagatgatctagtaattgttataggggctactaataaacctcaagaattggatgatgctgttcttcgaaggctggtaaaaagaatatatgtgccactacctgatccaaatgtacgaaggttacttctgaaaaatcagctcaaaggacaatcattcaaactgtcgaaccatgattttgaaagacttgctgtggagaccgaagggtattctggaagtgacctgagagccttgtgtgaagaagctgcaatgatgccaataagagagctcggtccacaaaatattcttactatcaaagcaaatcagctgcgacctttgaggtacgaggacttcaagaacgcgatgacggtgatcaggccaagcttgcagaagagcaaatgggacgagctggagaactggaacgaggaattcggttcgagctgacggagacgcgcgctgcctgatgatgatgatcaagcggccctatttccagatgtacatgatttatgtctcacacacacatggtggcttacacacacacacgcgcccatcggccatcgatgcgtcctcagtctggacagcgcgtcttcaacagaagcagaagcaatccttgatatacctgatggctatgattgatgagcctctgtacccaattgctgtactgattgatgagcttaagaatgaggacatccagttgcgtctaaactccattagaagactttcgacaattgcacgggctcttggagaagaaagaaccaggaaggagctgattccctttcttagtgaaaacaatgacgatgaagatgaggtgcttcttgcaatggctgaggaattgggtgtgttcattccttatgttgggggtgtagaacatgctcatgttttgcttccccctttggaaacattgtgtacagtagaagaaacttgtgtccgtgataaggcagttgaatctctgtgccgtattggtgcacaaatgaaggaaactgacatagtcgactggttcattccagtagtaaagaggctagcagctggtgagtggtttacagctcgtgtatcatcctgtggtcttttccacatagcctatccaagtgcattggaccaattgaaaacagaattaaggactatctatggtcagttatgtcaggatgacatgcctatggtcagaagagctgctgcatcaaatcttggaaagtttgcagccacagttgaacagaatcatttgaagacagaaataatgtcaatatttgatgacttaacccaagatgatcaagattcagtgcgtttgttggctgttgaaggttgtgctgctcttggtaaattgttggagccacaagattgtgtagctcacattcttccagtcattgtcaatttctcccaggataaatcatggcgtgttcgttatatggtcgccaatcagttatatgagctctgtgaggctgttggccctgagcccacaagagctgatttggtgcctgcatatgttcgtctccttcgcgataatgaggctgaagtgcgaatagcggctgctggaaaagtaactaagttctgccgcatattaaatccacagctttcaatccaacatattcttccgtgcgttaaggaattgtcatcagattcatcccagcatgttcgttcagctttagcctcagtcattatgggaatggctcctgtactgggaaaggatgctaccatggaacagcttcttccaatttttctctctttgctgaaggatgaatttccagatgttcggcttaacataatcagcaagcttgatcaggttaatcaggttattggcattgactttttatcccaaacactgctaccagccattgtagaacttgcagaggataggcactggagagtccggcttgcaataattgagtacatcccattgctggcgagtcagttaggtgttgggttttttgatgacaagctgggggcactctgcatgcaatggttggaagataaggtcttctcaatcagagatgctgccgccaacaacttgaagcgccttgcggaagagttcggtccagagtgggcaatgcagcatataattcctcaggtgctggagaagatcaacaatccgcactatttgtaccgcatgacgattctgcaggctatctccttgctagctcccgtcatgggtgcagagatcacttgtcaaaagctgcttccagtcgtcattaattcttcaaaggacagggttcctaacatcaagttcaacgttgcaaaagtactaaagtcacttgtaccgatcctcgatcaatctgtcgtggagaagaccgtgaaaccatgccttgttgagctcagcgaggaccctgacgtcgatgtgaggtactacgcgaaccaggcgctgcaggcgtgcgatcaaatgatggtgtcgagctaactagccgtgtgcccgagtacttagagttcgatgcctcatagtccaattttggattacctgtaatttgttgggccttttagattgaagagttttccgtctagcctcggtggacagatcgacgctgcccatgctgataaatggacggtcctgatccattgttcgttgtgttattaatgttgtataattgagcaggacacaacacgtacgttactctctgtgtctgtgtgtgtttgcatggcattgtctcgcaggtagttgagcaaccacgtaataattctttccagcgcatg

SEQ ID NO: 82593 - DNA, 1302 bp, Zea Mays
attttctattagttcagttgccatgtgatattcttactgtattgatctgcatttacttagattgatagtgtcatgtctacaaggttagctaatgagaatgactctagcaggcgtctgaaatctgaatttcttatccagtttgatggggtgtcctcaaacccagatgatctagtaattgttataggggctactaataaacctcaagaattggatgatgctgttcttcgaaggctggtaaaaagaatatatgtgccactacctgatccaaatgtacgaaggttacttctgaaaaatcagctcaaaggacaatcattcaaactgtcgaaccatgattttgaaagacttgctgtggagaccgaagggtattctggaagtgacctgagagccttgtgtgaagaagctgcaatgatgccaataagagagctcggtccacaaaatattcttactatcaaagcaaatcagctgcgacctttgaggtacgaggacttcaagaacgcgatgacggtgatcaggccaagcttgcagaagagcaaatgggacgagctggagaactggaacgaggaattcggttcgagctgacggagacgcgcgctgcctgatgatgatgatcaagcggccctatttccagatgtacatgatttatgtctcacacacacatggtggcttacacacacacacgcgcccatcggccatcgatgcgtcctcagtctggacagcgcgtcttcaacagaagcagaaggtacaatataatgctgggaacagccctatatgtatacccattgaaatgccgctgcccaagttatttaaaaaaacaaacctctagtgtgtgttattattagcctatagctgctctgggccgccgagggcgaaatcgaagtatcgtcgggcgtgttcggcaggctgcaagccgacactgttgcagctgtttggactgctgcagctgcaatccatagagagaaaaatactgtagaagccgcagccgcagccggattgcagccgcagcaagccgcagcgaacaagccggtcgttgtgtaaaaagaaacacaaaacctacatgcttaatgactcgtatatgtgttattattagcccatagctgctctgggccgccgagggcgaaatcgaagtatcgtcgttgtgtaaaaagaaacacaaaacctacatgcttaatgactcgtatatgtgttattattagcccatagctgctctgggccgccgagggcgaaatcgaagtatcgtcgttgtgtaaaaagacaaacacaaaacctacatgcttaatgactcgtatatattttaacaaacag

SEQ ID NO: 82594 - DNA, 1251 bp, Zea Mays
caaaaggatattgatagtgtcatgtctacaaggttagctaatgagaatgactctagcaggcgtctgaaatctgaatttcttatccagtttgatggggtgtcctcaaacccagatgatctagtaattgttataggggctactaataaacctcaagaattggatgatgctgttcttcgaaggctggtaaaaagaatatatgtgccactacctgatccaaatgtacgaaggttacttctgaaaaatcagctcaaaggacaatcattcaaactgtcgaaccatgattttgaaagacttgctgtggagaccgaagggtattctggaagtgacctgagagccttgtgtgaagaagctgcaatgatgccaataagagagctcggtccacaaaatattcttactatcaaagcaaatcagctgcgacctttgaggtacgaggacttcaagaacgcgatgacggtgatcaggccaagcttgcagaagagcaaatgggacgagctggagaactggaacgaggaattcggttcgagctgacggagacgcgcgctgcctgatgatgatgatcaagcggccctatttccagatgtacatgatttatgtctcacacacacatggtggcttacacacacacacgcgcccatcggccatcgatgcgtcctcagtctggacagcgcgtcttcaacagaagcagaaggtacaatataatgctgggaacagccctatatgtatacccattgaaatgccgctgcccaagttatttaaaaaaacaaacctctagtgtgtgttattattagcctatagctgctctgggccgccgagggcgaaatcgaagtatcgtcgggcgtgttcggcaggctgcaagccgacactgttgcagctgtttggactgctgcagctgcaatccatagagagaaaaatactgtagaagccgcagccgcagccggattgcagccgcagcaagccgcagcgaacaagccggtcgttgtgtaaaaagaaacacaaaacctacatgcttaatgactcgtatatgtgttattattagcccatagctgctctgggccgccgagggcgaaatcgaagtatcgtcgttgtgtaaaaagaaacacaaaacctacatgcttaatgactcgtatatgtgttattattagcccatagctgctctgggccgccgagggcgaaatcgaagtatcgtcgttgtgtaaaaagacaaacacaaaacctacatgcttaatgactcgtatatattttaacaaacag

SEQ ID NO: 82595 - DNA, 2418 bp, Zea Mays
gcttgcgcagttgcgcctgcctcgggcactcgccgtctcttgccgcgggcgcacgactttttccccaacaaccgatcgcccacgcaaacctctcctcaactcgatcaaaccggggacggaaaaggcccaccaaaatcccccaaaatttcgtacctcctcagccccagcaatctcgaatcccgatgctcacagcctccaccgaatccctggcggtcgtcatcagcgcatgagctttcttcgctcgctagcggactccttctcatcgctgctcttctcgtcgggaggcggggcggtgtccatggacgcggcgggggcggccccgtcgccggcggcggtggtgggggagcgcgtggcggtgaagctcagggggtacttcgacctcgccaaagaggagatcgacaaggccgtgcgcgctgaggagtgggggctccccgacgaggccaccgcgcactaccgcaacgcgatgcgggtcatgctcgaggccaaggccgcgcgcgtccccgatgccgtctcctccagcgagagggggcaggtcagggtgtaccaggagaagatcgccaagtggcaggcccaggtcgaggagcggctcagagtgcttggtcagagaagcggtgaaggggccactgctgcagaagtgcccaagaaggttgctgcaaacaatcctatcattaggactgcaaaaacagcgtcaaatagcatccaaagatctcccttgcaaaatagccctaccttcaacaggggtggccaagcatctacacatcagaagatagggagcggagcttccagaccagttcagaaggctggtggaaactatgatgacaagcttgttgaaatgattaatacaacaattgtggacagaagcccttctgttaaatgggatgacgttgctggtcttgacaaagcaaagcaagcactcatggaaatggttattttgccttctaaacgaagggatttgttcaccggacttcggagacctgctaggggtttgcttctctttggcccacctgggaatggaaaaacaatgcttgccaaagctgttgcatcagaatctgaagcaacattttttaatgtttcggcttcttcattgacatcaaagtaggagaagctgaaaaacttgtcaggacacttttcatggttgcaattgatagacaaccatctgttatttttatggacgagattgatagtgtcatgtctacaaggttagctaatgagaatgactctagcaggcgtctgaaatctgaatttcttatccagtttgatggggtgtcctcaaacccagatgatctagtaattgttataggggctactaataaacctcaagaattggatgatgctgttcttcgaaggctggtaaaaagaatatatgtgccactacctgatccaaatgtacgaaggttacttctgaaaaatcagctcaaaggacaatcattcaaactgtcgaaccatgattttgaaagacttgctgtggagaccgaagggtattctggaagtgacctgagagccttgtgtgaagaagctgcaatgatgccaataagagagctcggtccacaaaatattcttactatcaaagcaaatcagctgcgacctttgaggtacgaggacttcaagaacgcgatgacggtgatcaggccaagcttgcagaagagcaaatgggacgagctggagaactggaacgaggaattcggttcgagctgacggagacgcgcgctgcctgatgatgatgatcaagcggccctatttccagatgtacatgatttatgtctcacacacacatggtggcttacacacacacacgcgcccatcggccatcgatgcgtcctcagtctggacagcgcgtcttcaacagaagcagaaggtacaatataatgctgggaacagccctatatgtatacccattgaaatgccgctgcccaagttatttaaaaaaacaaacctctagtgtgtgttattattagcctatagctgctctgggccgccgagggcgaaatcgaagtatcgtcgggcgtgttcggcaggctgcaagccgacactgttgcagctgtttggactgctgcagctgcaatccatagagagaaaaatactgtagaagccgcagccgcagccggattgcagccgcagcaagccgcagcgaacaagccggtcgttgtgtaaaaagaaacacaaaacctacatgcttaatgactcgtatatgtgttattattagcccatagctgctctgggccgccgagggcgaaatcgaagtatcgtcgttgtgtaaaaagaaacacaaaacctacatgcttaatgactcgtatatgtgttattattagcccatagctgctctgggccgccgagggcgaaatcgaagtatcgtcgttgtgtaaaaagacaaacacaaaacctacatgcttaatgactcgtatatattttaacaaacag

SEQ ID NO: 82596 - DNA, 1544 bp, Zea Mays
gtgctggctaagctagctagatccatcgtccatggaactgagagcagcagctacctatatatctagctggttttctaacgacgatgacgacgaccgcgggactagcatgatgcagctagctgaagacagttgtaggcagctctcctctggcaggcaggcgcgcggtcatcgtcgccatcgacgacggttgcttggctctgctatgctgtgttcgttcgtccatggtgtgctagctagccgtgcatgcattgcagtgtaacatgcgtgcatgcacgcgcgtacgtcctgccaaaggagagttgccctgcgactgtcttcagctcgaacaagatcgaccggcccggacaggaatgttgggcgtacgttgtcatcaggtgagagtattacgtacaacacgtacaagtaccttcagtttttgcaaagtgcacgtccgctactggaacttgtagccttttgttgagggcagccaatgcaagtagtgtgataatcctccgtgtcattgctaacaatctgcaatgacgcagctattattattctattaatacctagctatatataaatgtagtcgtcaacccccgcaccttctttctccacgagctcatcctatcattttgacagggtttaagctccacgattccaaatattcaccacttctgggaggagttttgaagctgctcgaaagcatattgtgaaacaaacgggacctgagtgtaaatcggcggggaatcatatgttcatgttctcactgcaagaataagcttgtcaaagagggtggtgaagtaaaatctcacctgatcaggtgaggtttcaccgatgaatacacggttaggaggtttcacagtgaagaggatgtgagtctgattgttcccttcaatggtgatagcggcacaggtgctcctagcgacgggtgtaagtcatggaggacaagcaacaggaagtccactgccaagtgcttccatcgtcgtcaaatcacaggtcaggggttaattatatggggaagaggccattatcatcagtagagaaggatgtgccaaaagaagaggaagagaacaccatcaatatgaatggtgaattattcgtaagcttatcttccactaatggtgctggaagccagaaggagaaagaggaggatggagatcatgtgtcaaggctcaggagataaatcgaggaagaaaaagatcgaagggtggtgtttagttgtatccttccaagttccaagttcacggtaaagagaggaaagtgtgctagtaagtattcaaaaaatacttgtgtcagtaccttgaaacaaaggtacccgttactacagtatgaaagtgtgatgtccatacggctgtccttagtcgcatggcgaacagtacctgaccccaccacgtggacggctctagggcccccacatggccaagaaagacaatatactccatggtgtcaacagtgtgtccggacccccacggaaaagtgtcggacccctggatacacaacccgaacctccgggcagggtccaggacctccgcgaagtacagaccggacccccgagacgggtcccg

SEQ ID NO: 82597 - DNA, 1225 bp, Zea Mays
ctggctaagctagctagatccatcgtccatggaactgagagcagcagctacctatatatctagctggttttctaacgacgatgacgacgaccgcgggactagcatgatgcagctagctgaagacagttgtaggcagctctcctctggcaggcaggcgcgcggtcatcgtcgccatcgacgacggttgcttggctctgctatgctgtgttcgttcgtccatggtgtgctagctagccgtgcatgcattgcagtgtaacatgcgtgcatgcacgcgcgtacgtcctgccaaaggagagttgccctgcgactgtcttcagctcgaacaagatcgaccggcccggacaggaatgttgggcgtacgttgtcatcaggtgagagtattacgtacaacacgtacaagtaccttcagtttttgcaaagtgcacgtccgctactggaacttgtagccttttgttgagggcagccaatgcaagtagtgtgataatcctccgtgtcattgctaacaatctgcaatgacgcagctattattattctattaatacctagctatatataaatgtagtcgtcaacccccgcaccttctttctccacgagctcatcctatcattttgacagggtttaagctccacgattccaaatattcaccacttctgggaggagttttgaagctgctcgaaagcatattgtgtcaggccccgtttgtttcgttggaattgaattccattttgataattataatttagacaaaactaattaagtttatatatttatatatgtaatatatttgtatattatcctaaattatatgagagagatagttatatactacatttgtgttatagcgaagcaagtagatgagtgtgctataagttgtacatcaaaaaaaatagtatgtaaatctataaaatcaatttccatctctcaccccatgaatttgagataggcttatatgataactttggaaagtggtggaatgtcacattctaaaaaaaatagcttattctattagtaagattccaattctttgaaatgaaaggaaacaaacgggacctgagtgtaaatcggcggggaatcatatgttcatgttctcactgcaagaataagcttgtcaaagagggtggtgaagtaaaatctcacctgatcaggtgaggtttcaccgatgaatacacggttaggaggtttcacagtgaagaggatgtgagtctgattgttcccttcaatggtg

SEQ ID NO: 82598 - DNA, 2433 bp, Zea Mays
gaggagtcgctaggggcttcaacttcatcgctgcccagaagtcgcacgcagcacggcctccgatcgatttcctcttgtccgcgtgtcccagcgaatcgccgtcatgccgcgcccgatggcctcctcctccgccaggggccgggcgaaggattccgacccctcatcatcctcggcagcggcggattcctccatggcatccctaatcgagcgcgccacctccaccacggcgcacgccgtcgacccggtgctcctccgcgccatcaaatcttcggcccgtgcctccgatgccgccatccgggacgcgttccgcctcatcctctccctcatgtccaagccccactcccacgtgcgtaagcctcttcccctgctccaatcccccaatttcatcgaaccctaacgctctgatcccctcccttctcgctgcaggtgcggctcctcgccttcagcatcgccgacgagctcttcatgcgctccaagctcttccgctccctccttgctgactcgctcgacggcttcctcccgctcgccgtcgggttccgccgagcaaaccccctcccgccgccgaccacgtccgctgccttactccggaaggccgccgtccaggcgctcgagcgctggcaccatctctttggtgcgcactaccgccagctccgcctggccgtcgagtacctcaaggagtccgcgcgcgtccagttctctggtctgcgggccaccgttgatgctcgtgcagctcgtgaggctcgcatgcaggagatctatgctggcaaggttgagcagttgcgtgaaaaccttgcgtcaatcaaggcggagattcggtccacgattgatgagattcgcaatggattggagatcatccgtgctgaacataagaaatttgagggttattatgtggatgacgaggaggagattgcatccttgtcaatgcggagcattagaacagcatcattgatggctggggagtgggtgcctgagactcaggagaatgaggcagtttttgatgcactgagggaagcacaccggttgcttgtgtcaaagcatttggtcacagtacaggagtggataactgtgcttgtgagggtcaaccttccagacaaccgtttccgagattctgcattgaaggatttcattgatgttaagaatgagataagggctgtgagagatcattgcagtgagcttggtcttgaccttgataattttcataggcggaagggtgaccaggaggaagaggacaatgagttctgggtggagggaaacatagaggcaccaaatcgtgccagagtccagagcagtttagatgttgcgagcactagcaaggacactgagaagggaaagtgggtggttggtggagtgtgtcacattggcaaggcaccagttgcagctaatggaacgagaaatcttgatccagaaaaatcaaaactcctcgctgaagcccctgtgctgccatggagctctgtcttggatcgctggggctcaagtggggatgtacacgtaaaccagaggggacttgaggtcgagagtcattggggaagagtggataatgatgccactatacctgcagcaaagattgcagagttgaatgttcattgctcaatttatagagaagccccagttgagatcctaccatgccacgcccctctaaaaaaaggaggactttgccagagaagggatcttagggtatgtcctttccatggaccgattgtcccacgtgatgcagaaggaaatccaattgagcagaacagtggtagttctgatgcagaagtaaatcctgttgagcacttagacattggaggacattcaaatgagcttaatggaatcagtgatgatgattatatggagggaacctcttcaagaatgacaggtgtcaataatgattatggtgacatagctggaacttgtgatctaggtaagattactgcagagcagttagcaagacaatcagttaaaaatgtccggaaaagagaaatggatcgcaaggcacaggaaagggcccaacgtgcaagaatccgtcagcacaatgaagatgtcctgcgaaatgcggctcttgcttcaacttcctattctgcagcagcctatgagcagcctacagaagcacatggtcggcgaggacgccgaggtaaggcaaaggcaccaacgctggcatcgatgctgaaaaagaaagttaccaccaaagacagaattgcagagaggcttctgaacactcgagccacagatgccacagtaagggatgtttctcataatgaagatatgagctacagggaagcatttccaaatcagtggtagcagaagcagttgagttgttcttgtgtaggctggataaacacgttaggaatggaatcgatgttgtttattggttcatactgtcagctaaataatacatattctgttgctatctaaatcagcacagaactaccctgatggagtgcaagagagccc

SEQ ID NO: 82599 - DNA, 2484 bp, Zea Mays
ctgcttatactttacagtgaaccaatctatattactataaaatattatatcaattacaagttgatgaagaagaaagttaaacagtatggccagcagctccagcagggggaaaaagatcgtcgtcgggttctgaaggatttctcgaagatgcttgatgatcagatagagaagatcgtcctgtttctgttggaacaacaaggactattggcaagcaggattgagaagttaggaaagcaaagggcaatactacaagagcagccagatatatctggcattgctgagttacgagaagcttatagggaagttggtatcaatctcatcaaacttctcaagttcgttgaccttaatgcaactggcattcggaaaatcttgaagaagtttgataagcgttttggctatagatttactgattactatgtgacaagtagatcgaatcacccttactctcagctgcaacaggtctttaagcatgtgggtgtaggagctgttgtaggagctttgtcacgtaaccttgctgaactccaagaacgtcaaggaagctacttatctatttatgatcagccatcttctgctcttaagctgaccgtttttggttttgatcccctgcaggaccccatcattgatatgataaattcttcagttgataagttgacaaggtcaactaattttcttcgctttttggggcaacatgccatgattgtggatgaggagtctcctagcactgcaggagaggaagaaatagaagatcagaaataccatttcatgtcccttatgctgaacctggtgaacacattcctttacatggtcaacacgtacatcattgtgccaactgcagatgactattcagtgagccttggggcagcttctactgtttgtggtgtggtcattggttcaatggctgttgcgcaaatattttcctctatttacttcagtgcatggtccaacaagtcatatttcaaaccgcttgttttcagtagcattgttttgttcttggggaatatatgctatgctatggcatatgatatgaagtctctaacggtccttattatcggccgtttactctgtgggatgggttctgcaagagctgtcaatcgccgatatattagtgattgtgtccctgcaaggatacgcatgcaagcttcggctggatttgttagcgcaagtgcacttggcatggcctgtgggccagcgctagctggtttacttcagtggaaattcaaggtctacatggttacattcaatcaatcgactctaccgggttgggtgatggcagttgcatggctattgtatttgatttggctatggttctcattcaaagaaccgaaccgtgctaccgaggtgaatgaagccccacaaaatcctgcttctggacaaactgttgatattggacgactagagaatggaattgcacagcctctgctcaaggattccgtggataaacaaaatgaagatgaagacgaagttgatgatattgaagaaactgcagatgattctcgcaaacctgcaacatcaattggctcagcataccgattgcttaccccgtcagtgaaggtccagttgttgatatacttcatgctcaaatacgcaatggagattttgctttcggagtcgagtgttatcaccaatcactatttcagttggaatacaagcgcagtggcaatatttctagcaatcctagggttgacagtccttcctgtaaacgctgttgttggaacatacatcagcaatatgtttgaggacaggcaactcctcatggtgtctcaaattacgttgctagtaggcattatcttcagcttcaaagtcacgagcacatactatgtcgtccagtatgttgtctcagcactggtcacatttgtttctgccgaagttcttgaaggcgtcaacctttccctcctatcgagcgtgatgtcgtcccgcctctcccgtggcacgtacaacggtggtctcctctcgacggaggctgggaccctggccagggtggtcgccgactgcaccatcaccgcggcggggtacctgggcgtggggaagctcctcaacgtcaccctgctaccgtcgctggtgatatgtgttgcgtccatcgcctgcaccttcctgacgtacaactcgcttttctgatggagcttcgcgacgtatttgtgtcgtcatgattcgttccaaatcaaggcagctgggagaccgccgttgccattgcccgaaggggctgttgtgttattatattatatatgtgcgtcgatttgattgctgtaaattgacaaaatgatggcagccactggccttgccctgcaaaattttgatcgcttatgtccgtgacgttgtcaatgctatgttgtgttgacgtgttggtccaaactgtaattatgctactctcgactgatctgatctccgctgcgatgcggttttgagagtggagtcgtacgagagtggatcggcgtttttgtccattgggcttgattggatttatgagataaatagtttgtcggctaa

SEQ ID NO: 82600 - DNA, 2314 bp, Zea Mays
atggggggtctgtgcgattatgtgggagctgtagcttggacccaatttagatctgtcctcaacttcaacttcaaccctcaagatcagtatttaaaaatcaagatggttaacttcgggaagaaattgatggcagatcaaattccagaatggaaaggatattatatcaattacaagttgatgaagaagaaagttaaacagtatggccagcagctccagcagggggaaaaagatcgtcgtcgggttctgaaggatttctcgaagatgcttgatgatcagatagagaagatcgtcctgtttctgttggaacaacaaggactattggcaagcaggattgagaagttaggaaagcaaagggcaatactacaagagcagccagatatatctggcattgctgagttacgagaagcttatagggaagttggtatcaatctcatcaaacttctcaagttcgttgaccttaatgcaactggcattcggaaaatcttgaagaagtttgataagcgttttggctatagatttactgattactatgtgacaagtagatcgaatcacccttactctcagctgcaacaggtctttaagcatgtgggtgtaggagctgttgtaggagctttgtcacgtaaccttgctgaactccaagaacgtcaaggaagctacttatctatttatgatcagccatcttctgctcttaagctgaccgtttttggttttgatcccctgcaggaccccatcattgatatgataaattcttcagttgataagttgacaaggtcaactaattttcttcgctttttggggcaacatgccatgattgtggatgaggagtctcctagcactgcaggagaggaagaaatagaagatcagaaataccatttcatgtcccttatgctgaacctggatgggttctgcaagagctgtcaatcgccgatatattagtgattgtgtccctgcaaggatacgcatgcaagcttcggctggatttgttagcgcaagtgcacttggcatggcctgtgggccagcgctagctggtttacttcagtggaaattcaaggtctacatggttacattcaatcaatcgactctaccgggttgggtgatggcagttgcatggctattgtatttgatttggctatggttctcattcaaagaaccgaaccgtgctaccgaggtgaatgaagccccacaaaatcctgcttctggacaaactgttgatattggacgactagagaatggaattgcacagcctctgctcaaggattccgtggataaacaaaatgaagatgaagacgaagttgatgatattgaagaaactgcagatgattctcgcaaacctgcaacatcaattggctcagcataccgattgcttaccccgtcagtgaaggtccagttgttgatatacttcatgctcaaatacgcaatggagattttgctttcggagtcgagtgttatcaccaatcactatttcagttggaatacaagcgcagtggcaatatttctagcaatcctagggttgacagtccttcctgtaaacgctgttgttggaacatacatcagcaatatgtttgaggacaggcaactcctcatggtgtctcaaattacgttgctagtaggcattatcttcagcttcaaagtcacgagcacatactatgtcgtccagtatgttgtctcagcactggtcacatttgtttctgccgaagttcttgaaggcgtcaacctttccctcctatcgagcgtgatgtcgtcccgcctctcccgtggcacgtacaacggtggtctcctctcgacggaggctgggaccctggccagggtggtcgccgactgcaccatcaccgcggcggggtacctgggcgtggggaagctcctcaacgtcaccctgctaccgtcgctggtgatatgtgttgcgtccatcgcctgcaccttcctgacgtacaactcgcttttctgatggagcttcgcgacgtatttgtgtcgtcatgattcgttccaaatcaaggcagctgggagaccgccgttgccattgcccgaaggggctgttgtgttattatattatatatgtgcgtcgatttgattgctgtaaattgacaaaatgatggcagccactggccttgccctgcaaaattttgatcgcttatgtccgtgacgttgtcaatgctatgttgtgttgacgtgttggtccaaactgtaattatgctactctcgactgatctgatctccgctgcgatgcggttttgagagtggagtcgtacgagagtggatcggcgtttttgtccattgggcttgattggatttatgagataaatagtttgtcggctaa

SEQ ID NO: 82601 - DNA, 2669 bp, Zea Mays
ttagggcctaggtttgtttgttttggtaggatgttgtttactgttacgagaggtccccgactgtcgctccggttttccattgaattttaaggtagggcatgtctcaggatggggggtctgtgcgattatgtgggagctgtagcttggacccaatttagatctgtcctcaacttcaacttcaaccctcaagatcagtatttaaaaatcaagatggttaacttcgggaagaaattgatggcagatcaaattccagaatggaaaggatattatatcaattacaagttgatgaagaagaaagttaaacagtatggccagcagctccagcagggggaaaaagatcgtcgtcgggttctgaaggatttctcgaagatgcttgatgatcagatagagaagatcgtcctgtttctgttggaacaacaaggactattggcaagcaggattgagaagttaggaaagcaaagggcaatactacaagagcagccagatatatctggcattgctgagttacgagaagcttatagggaagttggtatcaatctcatcaaacttctcaagttcgttgaccttaatgcaactggcattcggaaaatcttgaagaagtttgataagcgttttggctatagatttactgattactatgtgacaagtagatcgaatcacccttactctcagctgcaacaggtctttaagcatgtggagctgttgtaggagctttgtcacgtaaccttgctgaactccaagaacgtcaaggaagctacttatctatttatgatcagccatcttctgctcttaaggaccccatcattgatatgataaattcttcagttgataagttgacaaggtcaactaattttcttcgctttttggggcaacatgccatgattgtggatgaggagtctcctagcactgcaggagaggaagaaatagaagatcagaaataccatttcatgtcccttatgctgaacctggtgaacacattcctttacatggtcaacacgtacatcattgtgccaactgcagatgactattcagtgagccttggggcagcttctactgtttgtggtgtggtcattggttcaatggctgttgcgcaaatattttcctctatttacttcagtgcatggtccaacaagtcatatttcaaaccgcttgttttcagtagcattgttttgttcttggggaatatatgctatgctatggcatatgatatgaagtctctaacggtccttattatcggccgtttactctgtgggatgggttctgcaagagctgtcaatcgccgatatattagtgattgtgtccctgcaaggatacgcatgcaagcttcggctggatttgttagcgcaagtgcacttggcatggcctgtgggccagcgctagctggtttacttcagtggaaattcaaggtctacatggttacattcaatcaatcgactctaccgggttgggtgatggcagttgcatggctattgtatttgatttggctatggttctcattcaaagaaccgaaccgtgctaccgaggtgaatgaagccccacaaaatcctgcttctggacaaactgttgatattggacgactagagaatggaattgcacagcctctgctcaaggattccgtggataaacaaaatgaagatgaagacgaagttgatgatattgaagaaactgcagatgattctcgcaaacctgcaacatcaattggctcagcataccgattgcttaccccgtcagtgaaggtccagttgttgatatacttcatgctcaaatacgcaatggagattttgctttcggagtcgagtgttatcaccaatcactatttcagttggaatacaagcgcagtggcaatatttctagcaatcctagggttgacagtccttcctgtaaacgctgttgttggaacatacatcagcaatatgtttgaggacaggcaactcctcatggtgtctcaaattacgttgctagtaggcattatcttcagcttcaaagtcacgagcacatactatgtcgtccagtatgttgtctcagcactggtcacatttgtttctgccgaagttcttgaaggcgtcaacctttccctcctatcgagcgtgatgtcgtcccgcctctcccgtggcacgtacaacggtggtctcctctcgacggaggctgggaccctggccagggtggtcgccgactgcaccatcaccgcggcggggtacctgggcgtggggaagctcctcaacgtcaccctgctaccgtcgctggtgatatgtgttgcgtccatcgcctgcaccttcctgacgtacaactcgcttttctgatggagcttcgcgacgtatttgtgtcgtcatgattcgttccaaatcaaggcagctgggagaccgccgttgccattgcccgaaggggctgttgtgttattatattatatatgtgcgtcgatttgattgctgtaaattgacaaaatgatggcagccactggccttgccctgcaaaattttgatcgcttatgtccgtgacgttgtcaatgctatgttgtgttgacgtgttggtccaaactgtaattatgctactctcgactgatctgatctccgctgcgatgcggttttgagagtggagtcgtacgagagtggatcggcgtttttgtccattgggcttgattggatttatgagataaatagtttgtcggctaa

SEQ ID NO: 82602 - DNA, 2570 bp, Zea Mays
ccagaatccagtccttcagtctgagcgagatccagacctgatgaaacccgctgtatcagtatttaaaaatcaagatggttaacttcgggaagaaattgatggcagatcaaattccagaatggaaaggatattatatcaattacaagttgatgaagaagaaagttaaacagtatggccagcagctccagcagggggaaaaagatcgtcgtcgggttctgaaggatttctcgaagatgcttgatgatcagatagagaagatcgtcctgtttctgttggaacaacaaggactattggcaagcaggattgagaagttaggaaagcaaagggcaatactacaagagcagccagatatatctggcattgctgagttacgagaagcttatagggaagttggtatcaatctcatcaaacttctcaagttcgttgaccttaatgcaactggcattcggaaaatcttgaagaagtttgataagcgttttggctatagatttactgattactatgtgacaagtagatcgaatcacccttactctcagctgcaacaggtctttaagcatgtgggtgtaggagctgttgtaggagctttgtcacgtaaccttgctgaactccaagaacgtcaaggaagctacttatctatttatgatcagccatcttctgctcttaagctgaccgtttttggttttgatcccctgcaggaccccatcattgatatgataaattcttcagttgataagttgacaaggtcaactaattttcttcgctttttggggcaacatgccatgattgtggatgaggagtctcctagcactgcaggagaggaagaaatagaagatcagaaataccatttcatgtcccttatgctgaacctggtgaacacattcctttacatggtcaacacgtacatcattgtgccaactgcagatgactattcagtgagccttggggcagcttctactgtttgtggtgtggtcattggttcaatggctgttgcgcaaatattttcctctatttacttcagtgcatggtccaacaagtcatatttcaaaccgcttgttttcagtagcattgttttgttcttggggaatatatgctatgctatggcatatgatatgaagtctctaacggtccttattatcggccgtttactctgtgggatgggttctgcaagagctgtcaatcgccgatatattagtgattgtgtccctgcaaggatacgcatgcaagcttcggctggatttgttagcgcaagtgcacttggcatggcctgtgggccagcgctagctggtttacttcagtggaaattcaaggtctacatggttacattcaatcaatcgactctaccgggttgggtgatggcagttgcatggctattgtatttgatttggctatggttctcattcaaagaaccgaaccgtgctaccgaggtgaatgaagccccacaaaatcctgcttctggacaaactgttgatattggacgactagagaatggaattgcacagcctctgctcaaggattccgtggataaacaaaatgaagatgaagacgaagttgatgatattgaagaaactgcagatgattctcgcaaacctgcaacatcaattggctcagcataccgattgcttaccccgtcagtgaaggtccagttgttgatatacttcatgctcaaatacgcaatggagattttgctttcggagtcgagtgttatcaccaatcactatttcagttggaatacaagcgcagtggcaatatttctagcaatcctagggttgacagtccttcctgtaaacgctgttgttggaacatacatcagcaatatgtttgaggacaggcaactcctcatggtgtctcaaattacgttgctagtaggcattatcttcagcttcaaagtcacgagcacatactatgtcgtccagtatgttgtctcagcactggtcacatttgtttctgccgaagttcttgaaggcgtcaacctttccctcctatcgagcgtgatgtcgtcccgcctctcccgtggcacgtacaacggtggtctcctctcgacggaggctgggaccctggccagggtggtcgccgactgcaccatcaccgcggcggggtacctgggcgtggggaagctcctcaacgtcaccctgctaccgtcgctggtgatatgtgttgcgtccatcgcctgcaccttcctgacgtacaactcgcttttctgatggagcttcgcgacgtatttgtgtcgtcatgattcgttccaaatcaaggcagctgggagaccgccgttgccattgcccgaaggggctgttgtgttattatattatatatgtgcgtcgatttgattgctgtaaattgacaaaatgatggcagccactggccttgccctgcaaaattttgatcgcttatgtccgtgacgttgtcaatgctatgttgtgttgacgtgttggtccaaactgtaattatgctactctcgactgatctgatctccgctgcgatgcggttttgagagtggagtcgtacgagagtggatcggcgtttttgtccattgggcttgattggatttatgagataaatagtttgtcggctaa

SEQ ID NO: 82603 - DNA, 2660 bp, Zea Mays
ccttcccctgccactctccgcctctggcctagcgcccccgcccgctcgatccgcctagtaggtaacggcgaggctcaccgcgtccgcactcgcccgtgaatccgtgatttctcccaccttcctttcagcgccgctctcccaccttcctttcagcgccgcccgccgtccttttcgatcagtatttaaaaatcaagatggttaacttcgggaagaaattgatggcagatcaaattccagaatggaaaggatattatatcaattacaagttgatgaagaagaaagttaaacagtatggccagcagctccagcagggggaaaaagatcgtcgtcgggttctgaaggatttctcgaagatgcttgatgatcagatagagaagatcgtcctgtttctgttggaacaacaaggactattggcaagcaggattgagaagttaggaaagcaaagggcaatactacaagagcagccagatatatctggcattgctgagttacgagaagcttatagggaagttggtatcaatctcatcaaacttctcaagttcgttgaccttaatgcaactggcattcggaaaatcttgaagaagtttgataagcgttttggctatagatttactgattactatgtgacaagtagatcgaatcacccttactctcagctgcaacaggtctttaagcatgtgggtgtaggagctgttgtaggagctttgtcacgtaaccttgctgaactccaagaacgtcaaggaagctacttatctatttatgatcagccatcttctgctcttaaggaccccatcattgatatgataaattcttcagttgataagttgacaaggtcaactaattttcttcgctttttggggcaacatgccatgattgtggatgaggagtctcctagcactgcaggagaggaagaaatagaagatcagaaataccatttcatgtcccttatgctgaacctggtgaacacattcctttacatggtcaacacgtacatcattgtgccaactgcagatgactattcagtgagccttggggcagcttctactgtttgtggtgtggtcattggttcaatggctgttgcgcaaatattttcctctatttacttcagtgcatggtccaacaagtcatatttcaaaccgcttgttttcagtagcattgttttgttcttggggaatatatgctatgctatggcatatgatatgaagtctctaacggtccttattatcggccgtttactctgtgggatgggttctgcaagagctgtcaatcgccgatatattagtgattgtgtccctgcaaggatacgcatgcaagcttcggctggatttgttagcgcaagtgcacttggcatggcctgtgggccagcgctagctggtttacttcagtggaaattcaaggtctacatggttacattcaatcaatcgactctaccgggttgggtgatggcagttgcatggctattgtatttgatttggctatggttctcattcaaagaaccgaaccgtgctaccgaggtgaatgaagccccacaaaatcctgcttctggacaaactgttgatattggacgactagagaatggaattgcacagcctctgctcaaggattccgtggataaacaaaatgaagatgaagacgaagttgatgatattgaagaaactgcagatgattctcgcaaacctgcaacatcaattggctcagcataccgattgcttaccccgtcagtgaaggtccagttgttgatatacttcatgctcaaatacgcaatggagattttgctttcggagtcgagtgttatcaccaatcactatttcagttggaatacaagcgcagtggcaatatttctagcaatcctagggttgacagtccttcctgtaaacgctgttgttggaacatacatcagcaatatgtttgaggacaggcaactcctcatggtgtctcaaattacgttgctagtaggcattatcttcagcttcaaagtcacgagcacatactatgtcgtccagtatgttgtctcagcactggtcacatttgtttctgccgaagttcttgaaggcgtcaacctttccctcctatcgagcgtgatgtcgtcccgcctctcccgtggcacgtacaacggtggtctcctctcgacggaggctgggaccctggccagggtggtcgccgactgcaccatcaccgcggcggggtacctgggcgtggggaagctcctcaacgtcaccctgctaccgtcgctggtgatatgtgttgcgtccatcgcctgcaccttcctgacgtacaactcgcttttctgatggagcttcgcgacgtatttgtgtcgtcatgattcgttccaaatcaaggcagctgggagaccgccgttgccattgcccgaaggggctgttgtgttattatattatatatgtgcgtcgatttgattgctgtaaattgacaaaatgatggcagccactggccttgccctgcaaaattttgatcgcttatgtccgtgacgttgtcaatgctatgttgtgttgacgtgttggtccaaactgtaattatgctactctcgactgatctgatctccgctgcgatgcggttttgagagtggagtcgtacgagagtggatcggcgtttttgtccattgggcttgattggatttatgagataaatagtttgtcggctaa

SEQ ID NO: 82604 - DNA, 2655 bp, Zea Mays
ccttcccctgccactctccgcctctggcctagcgcccccgcccgctcgatccgcctagtaggtaacggcgaggctcaccgcgtccgcactcgcccgtgaatccgtgatttctcccaccttcctttcagcgccgctctcccaccttcctttcagcgccgcccgccgtccttttcgtatttaaaaatcaagatggttaacttcgggaagaaattgatggcagatcaaattccagaatggaaaggatattatatcaattacaagttgatgaagaagaaagttaaacagtatggccagcagctccagcagggggaaaaagatcgtcgtcgggttctgaaggatttctcgaagatgcttgatgatcagatagagaagatcgtcctgtttctgttggaacaacaaggactattggcaagcaggattgagaagttaggaaagcaaagggcaatactacaagagcagccagatatatctggcattgctgagttacgagaagcttatagggaagttggtatcaatctcatcaaacttctcaagttcgttgaccttaatgcaactggcattcggaaaatcttgaagaagtttgataagcgttttggctatagatttactgattactatgtgacaagtagatcgaatcacccttactctcagctgcaacaggtctttaagcatgtgggtgtaggagctgttgtaggagctttgtcacgtaaccttgctgaactccaagaacgtcaaggaagctacttatctatttatgatcagccatcttctgctcttaaggaccccatcattgatatgataaattcttcagttgataagttgacaaggtcaactaattttcttcgctttttggggcaacatgccatgattgtggatgaggagtctcctagcactgcaggagaggaagaaatagaagatcagaaataccatttcatgtcccttatgctgaacctggtgaacacattcctttacatggtcaacacgtacatcattgtgccaactgcagatgactattcagtgagccttggggcagcttctactgtttgtggtgtggtcattggttcaatggctgttgcgcaaatattttcctctatttacttcagtgcatggtccaacaagtcatatttcaaaccgcttgttttcagtagcattgttttgttcttggggaatatatgctatgctatggcatatgatatgaagtctctaacggtccttattatcggccgtttactctgtgggatgggttctgcaagagctgtcaatcgccgatatattagtgattgtgtccctgcaaggatacgcatgcaagcttcggctggatttgttagcgcaagtgcacttggcatggcctgtgggccagcgctagctggtttacttcagtggaaattcaaggtctacatggttacattcaatcaatcgactctaccgggttgggtgatggcagttgcatggctattgtatttgatttggctatggttctcattcaaagaaccgaaccgtgctaccgaggtgaatgaagccccacaaaatcctgcttctggacaaactgttgatattggacgactagagaatggaattgcacagcctctgctcaaggattccgtggataaacaaaatgaagatgaagacgaagttgatgatattgaagaaactgcagatgattctcgcaaacctgcaacatcaattggctcagcataccgattgcttaccccgtcagtgaaggtccagttgttgatatacttcatgctcaaatacgcaatggagattttgctttcggagtcgagtgttatcaccaatcactatttcagttggaatacaagcgcagtggcaatatttctagcaatcctagggttgacagtccttcctgtaaacgctgttgttggaacatacatcagcaatatgtttgaggacaggcaactcctcatggtgtctcaaattacgttgctagtaggcattatcttcagcttcaaagtcacgagcacatactatgtcgtccagtatgttgtctcagcactggtcacatttgtttctgccgaagttcttgaaggcgtcaacctttccctcctatcgagcgtgatgtcgtcccgcctctcccgtggcacgtacaacggtggtctcctctcgacggaggctgggaccctggccagggtggtcgccgactgcaccatcaccgcggcggggtacctgggcgtggggaagctcctcaacgtcaccctgctaccgtcgctggtgatatgtgttgcgtccatcgcctgcaccttcctgacgtacaactcgcttttctgatggagcttcgcgacgtatttgtgtcgtcatgattcgttccaaatcaaggcagctgggagaccgccgttgccattgcccgaaggggctgttgtgttattatattatatatgtgcgtcgatttgattgctgtaaattgacaaaatgatggcagccactggccttgccctgcaaaattttgatcgcttatgtccgtgacgttgtcaatgctatgttgtgttgacgtgttggtccaaactgtaattatgctactctcgactgatctgatctccgctgcgatgcggttttgagagtggagtcgtacgagagtggatcggcgtttttgtccattgggcttgattggatttatgagataaatagtttgtcggctaa

SEQ ID NO: 82605 - DNA, 2692 bp, Zea Mays
ccccttcccctgccactctccgcctctggcctagcgcccccgcccgctcgatccgcctagtaggtaacggcgaggctcaccgcgtccgcactcgcccgtgaatccgtgatttctcccaccttcctttcagcgccgctctcccaccttcctttcagcgccgcccgccgtccttttcgatcagtatttaaaaatcaagatggttaacttcgggaagaaattgatggcagatcaaattccagaatggaaaggatattatatcaattacaagttgatgaagaagaaagttaaacagtatggccagcagctccagcagggggaaaaagatcgtcgtcgggttctgaaggatttctcgaagatgcttgatgatcagatagagaagatcgtcctgtttctgttggaacaacaaggactattggcaagcaggattgagaagttaggaaagcaaagggcaatactacaagagcagccagatatatctggcattgctgagttacgagaagcttatagggaagttggtatcaatctcatcaaacttctcaagttcgttgaccttaatgcaactggcattcggaaaatcttgaagaagtttgataagcgttttggctatagatttactgattactatgtgacaagtagatcgaatcacccttactctcagctgcaacaggtctttaagcatgtgggtgtaggagctgttgtaggagctttgtcacgtaaccttgctgaactccaagaacgtcaaggaagctacttatctatttatgatcagccatcttctgctcttaagctgaccgtttttggttttgatcccctgcaggaccccatcattgatatgataaattcttcagttgataagttgacaaggtcaactaattttcttcgctttttggggcaacatgccatgattgtggatgaggagtctcctagcactgcaggagaggaagaaatagaagatcagaaataccatttcatgtcccttatgctgaacctggtgaacacattcctttacatggtcaacacgtacatcattgtgccaactgcagatgactattcagtgagccttggggcagcttctactgtttgtggtgtggtcattggttcaatggctgttgcgcaaatattttcctctatttacttcagtgcatggtccaacaagtcatatttcaaaccgcttgttttcagtagcattgttttgttcttggggaatatatgctatgctatggcatatgatatgaagtctctaacggtccttattatcggccgtttactctgtgggatgggttctgcaagagctgtcaatcgccgatatattagtgattgtgtccctgcaaggatacgcatgcaagcttcggctggatttgttagcgcaagtgcacttggcatggcctgtgggccagcgctagctggtttacttcagtggaaattcaaggtctacatggttacattcaatcaatcgactctaccgggttgggtgatggcagttgcatggctattgtatttgatttggctatggttctcattcaaagaaccgaaccgtgctaccgaggtgaatgaagccccacaaaatcctgcttctggacaaactgttgatattggacgactagagaatggaattgcacagcctctgctcaaggattccgtggataaacaaaatgaagatgaagacgaagttgatgatattgaagaaactgcagatgattctcgcaaacctgcaacatcaattggctcagcataccgattgcttaccccgtcagtgaaggtccagttgttgatatacttcatgctcaaatacgcaatggagattttgctttcggagtcgagtgttatcaccaatcactatttcagttggaatacaagcgcagtggcaatatttctagcaatcctagggttgacagtccttcctgtaaacgctgttgttggaacatacatcagcaatatgtttgaggacaggcaactcctcatggtgtctcaaattacgttgctagtaggcattatcttcagcttcaaagtcacgagcacatactatgtcgtccagtatgttgtctcagcactggtcacatttgtttctgccgaagttcttgaaggcgtcaacctttccctcctatcgagcgtgatgtcgtcccgcctctcccgtggcacgtacaacggtggtctcctctcgacggaggctgggaccctggccagggtggtcgccgactgcaccatcaccgcggcggggtacctgggcgtggggaagctcctcaacgtcaccctgctaccgtcgctggtgatatgtgttgcgtccatcgcctgcaccttcctgacgtacaactcgcttttctgatggagcttcgcgacgtatttgtgtcgtcatgattcgttccaaatcaaggcagctgggagaccgccgttgccattgcccgaaggggctgttgtgttattatattatatatgtgcgtcgatttgattgctgtaaattgacaaaatgatggcagccactggccttgccctgcaaaattttgatcgcttatgtccgtgacgttgtcaatgctatgttgtgttgacgtgttggtccaaactgtaattatgctactctcgactgatctgatctccgctgcgatgcggttttgagagtggagtcgtacgagagtggatcggcgtttttgtccattgggcttgattggatttatgagataaatagtttgtcggctaa

SEQ ID NO: 82606 - DNA, 2681 bp, Zea Mays
cctccccttcccctgccactctccgcctctggcctagcgcccccgcccgctcgatccgcctagtagatcagtatttaaaaatcaagatggttaacttcgggaagaaattgatggcagatcaaattccagaatggaaaggatattatatcaattacaagttgatgaagaagaaagttaaacagtatggccagcagctccagcagggggaaaaagatcgtcgtcgggttctgaaggatttctcgaagatgcttgatgatcagatagagaagatcgtcctgtttctgttggaacaacaaggactattggcaagcaggattgagaagttaggaaagcaaagggcaatactacaagagcagccagatatatctggcattgctgagttacgagaagcttatagggaagttggtatcaatctcatcaaacttctcaagttcgttgaccttaatgcaactggcattcggaaaatcttgaagaagtttgataagcgttttggctatagatttactgattactatgtgacaagtagatcgaatcacccttactctcagctgcaacaggtctttaagcatgtgggtgtaggagctgttgtaggagctttgtcacgtaaccttgctgaactccaagaacgtcaaggaagctacttatctatttatgatcagccatcttctgctcttaaggtttatttgccttgtaaactactgatgtgatatcattttaagaatattttcctgctcattcaatagtctgtgcctcggtggtatacttgaaacttgcagctgaccgtttttggttttgatcccctgcaggaccccatcattgatatgataaattcttcagttgataagttgacaaggtcaactaattttcttcgctttttggggcaacatgccatgattgtggatgaggagtctcctagcactgcaggagaggaagaaatagaagatcagaaataccatttcatgtcccttatgctgaacctggtgaacacattcctttacatggtcaacacgtacatcattgtgccaactgcagatgactattcagtgagccttggggcagcttctactgtttgtggtgtggtcattggttcaatggctgttgcgcaaatattttcctctatttacttcagtgcatggtccaacaagtcatatttcaaaccgcttgttttcagtagcattgttttgttcttggggaatatatgctatgctatggcatatgatatgaagtctctaacggtccttattatcggccgtttactctgtgggatgggttctgcaagagctgtcaatcgccgatatattagtgattgtgtccctgcaaggatacgcatgcaagcttcggctggatttgttagcgcaagtgcacttggcatggcctgtgggccagcgctagctggtttacttcagtggaaattcaaggtctacatggttacattcaatcaatcgactctaccgggttgggtgatggcagttgcatggctattgtatttgatttggctatggttctcattcaaagaaccgaaccgtgctaccgaggtgaatgaagccccacaaaatcctgcttctggacaaactgttgatattggacgactagagaatggaattgcacagcctctgctcaaggattccgtggataaacaaaatgaagatgaagacgaagttgatgatattgaagaaactgcagatgattctcgcaaacctgcaacatcaattggctcagcataccgattgcttaccccgtcagtgaaggtccagttgttgatatacttcatgctcaaatacgcaatggagattttgctttcggagtcgagtgttatcaccaatcactatttcagttggaatacaagcgcagtggcaatatttctagcaatcctagggttgacagtccttcctgtaaacgctgttgttggaacatacatcagcaatatgtttgaggacaggcaactcctcatggtgtctcaaattacgttgctagtaggcattatcttcagcttcaaagtcacgagcacatactatgtcgtccagtatgttgtctcagcactggtcacatttgtttctgccgaagttcttgaaggcgtcaacctttccctcctatcgagcgtgatgtcgtcccgcctctcccgtggcacgtacaacggtggtctcctctcgacggaggctgggaccctggccagggtggtcgccgactgcaccatcaccgcggcggggtacctgggcgtggggaagctcctcaacgtcaccctgctaccgtcgctggtgatatgtgttgcgtccatcgcctgcaccttcctgacgtacaactcgcttttctgatggagcttcgcgacgtatttgtgtcgtcatgattcgttccaaatcaaggcagctgggagaccgccgttgccattgcccgaaggggctgttgtgttattatattatatatgtgcgtcgatttgattgctgtaaattgacaaaatgatggcagccactggccttgccctgcaaaattttgatcgcttatgtccgtgacgttgtcaatgctatgttgtgttgacgtgttggtccaaactgtaattatgctactctcgactgatctgatctccgctgcgatgcggttttgagagtggagtcgtacgagagtggatcggcgtttttgtccattgggcttgattggatttatgagataaatagtttgtcggctaa

SEQ ID NO: 82607 - DNA, 1993 bp, Zea Mays
gtaaattattgtatgtggctgcaattacaaaatcattgatggtgtgttcacaatgtgaagtaactctggatatataagggggcacatcggcagtatgtcatttgttccagcgatatatatagttatttgcagtgcaccacatacatgctgctagaatagctttctgaagttatggcgagaagaggcatgaatcctactgttagtgatcaagcaatccgcctggatctcattgccaaatcgagaggcatcgctgctgccgagaagtactttttggacctcccagaaacatccaagactcatcttacatatggcgctcttctcaattcttactgcaaagagttgatgactgagaaggccgagtcccttatggagaaaatgaaggagctcaactttgctttcactgccatgtccttcaacagcttaatgacgatgtacaccaaagtcaaccaagctgagaaggtccccagtatcattcaggacatgaaggcagatgacgtattgccagatgtctttacttataatgtttggatgagggcgcttgcagctctcaaggacataccaggggttgagagggtgattgaagagatgaaacgggatggccgtgttgctcctgattggacaacatacagcaacctggcttccatatatgttgaggctggaatgtttgagaaggcagaggctgctcttaaggagcttgagaagcggaacaccagcaatgacatcgaagcctaccagttccttattacattgtatgggcgtacacagaacttagtggaagttcaccgtgtctggcgatcgctgaagcgggataaccctagaatggcaaacatgagctaccttaacatgattcaggttttggccaacttgaaggacctgtctgctgccgaagcctgttttaaggagtgggaagcccgacacatccatccacccaagaccaacacaaagggctcgggggcagataatacacctggtgcagatccaaaatctccaagtaacccgcctaataatcagtctggcaccaaggaaaccggggacgagacagcagaggacctccagccgaagcatccaaaatatgacatccgggtagcaaacgctatgatcaaggcgtacattaccgagggcatgcttgacaaagctgtcgccatgaagaagcgtgccaagatgcgcggcggaaggctgaacgccaagacatgggagatcttcatggagcattacctcaagacgggggatctcaagatggcccattggtgcgcggaccgcgcgatgaagaaggggcacagcagcggcaggatttgggtgccgccgcccgccgtgacggagaccctgatgagctacttcgaggagaacaaggacgtcgatggggccgagcggtacgtgggggctctgaagaaggtgcagaaggatctgggcgcaccggtgttcgagccgctggtgcggacgtacgctgccgccgggaagaagttccccgggatgcggcagcggctgaagatcgagaacgtggaggtcggggaggggacggcccagctgcttgactctatctgcgccgatcaatagcccaagcacgtcctagaggcggtggcagcgttggtggcggctgctatgcgatgggggcaccacctccgttgatgtattgtctggtgcgggactgcgagtgacctctgaggcgggggcggagaataactggatctacctaacgtcggaatggagacctgcaggtccatttgaaattaaacagaaggttggtaagagtgtgatggtgctcattttgcgttttagaggatccatacttgcatgtagccaaagaaactattttagtaccttttttccttgtactttttttttgtcttattgctttgcctggagctacttgaaatgctccacagttatgtcctctttttaactgagatgtcgttggcctgaacaaaggatgcttgacgcttcgaagtcacacgcaatgataaattcagtttgcagcatcgcgatgcatttggac

SEQ ID NO: 82608 - DNA, 1900 bp, Zea Mays
gtcttgcatgagctcaaccagacgctgctcatcctggctcagctcggataggcaaccaatcagacgctttctgaagttatggcgagaagaggcatgaatcctactgttagtgatcaagcaatccgcctggatctcattgccaaatcgagaggcatcgctgctgccgagaagtactttttggacctcccagaaacatccaagactcatcttacatatggcgctcttctcaattcttactgcaaagagttgatgactgagaaggccgagtcccttatggagaaaatgaaggagctcaactttgctttcactgccatgtccttcaacagcttaatgacgatgtacaccaaagtcaaccaagctgagaaggtccccagtatcattcaggacatgaaggcagatgacgtattgccagatgtctttacttataatgtttggatgagggcgcttgcagctctcaaggacataccaggggttgagagggtgattgaagagatgaaacgggatggccgtgttgctcctgattggacaacatacagcaacctggcttccatatatgttgaggctggaatgtttgagaaggcagaggctgctcttaaggagcttgagaagcggaacaccagcaatgacatcgaagcctaccagttccttattacattgtatgggcgtacacagaacttagtggaagttcaccgtgtctggcgatcgctgaagcgggataaccctagaatggcaaacatgagctaccttaacatgattcaggttttggccaacttgaaggacctgtctgctgccgaagcctgttttaaggagtgggaagcccgacacatccatccacccaagaccaacacaaagggctcgggggcagataatacacctggtgcagatccaaaatctccaagtaacccgcctaataatcagtctggcaccaaggaaaccggggacgagacagcagaggacctccagccgaagcatccaaaatatgacatccgggtagcaaacgctatgatcaaggcgtacattaccgagggcatgcttgacaaagctgtcgccatgaagaagcgtgccaagatgcgcggcggaaggctgaacgccaagacatgggagatcttcatggagcattacctcaagacgggggatctcaagatggcccattggtgcgcggaccgcgcgatgaagaaggggcacagcagcggcaggatttgggtgccgccgcccgccgtgacggagaccctgatgagctacttcgaggagaacaaggacgtcgatggggccgagcggtacgtgggggctctgaagaaggtgcagaaggatctgggcgcaccggtgttcgagccgctggtgcggacgtacgctgccgccgggaagaagttccccgggatgcggcagcggctgaagatcgagaacgtggaggtcggggaggggacggcccagctgcttgactctatctgcgccgatcaatagcccaagcacgtcctagaggcggtggcagcgttggtggcggctgctatgcgatgggggcaccacctccgttgatgtattgtctggtgcgggactgcgagtgacctctgaggcgggggcggagaataactggatctacctaacgtcggaatggagacctgcaggtccatttgaaattaaacagaaggttggtaagagtgtgatggtgctcattttgcgttttagaggatccatacttgcatgtagccaaagaaactattttagtaccttttttccttgtactttttttttgtcttattgctttgcctggagctacttgaaatgctccacagttatgtcctctttttaactgagatgtcgttggcctgaacaaaggatgcttgacgcttcgaagtcacacgcaatgataaattcagtttgcagcatcgcgatgcatttggac

SEQ ID NO: 82609 - DNA, 3636 bp, Zea Mays
gtttgtttatgttatattccgtccgtacttacttagaaggcgccactacctttgatacagagaccaagaaatggtttaattcctgttatttttcaatgacctgacgtttcctgataaagaacaagtatgagttggcgtactaatactggtgaggggaaaaaagtaaacatgcatgcatgtgaatccaaccgataaagagctgagaagcccgcaagtgcagtaaatgccacattgttacatgtcatcaaaataagagccgagagaggtgcactttgtactctagaacatctgcaaaatacagttacaccttttatattatgacacaggaagtaatactaacacacagatacagttaccaggtttgttcttctcttgagagcattataatgggacagggcaaatgcagtcgttattgcattgacaaccatgaaatgcaattcaggaagtctggaaggataaacagctaactagttatttttttaaaacaaagtagcaagagtgctgcctatatttatattaaggaaaaggagtaaaagcacacgagagagcgacaaatggaaagaattaaaaaggctaacaatgtatcttcctagactagacctctaagctaccagcatgagctacatagtaaatatggattccgctcttgtgatttgaaggggcataatatagatatcaaaaggctgtttgggggcatctattacctaatgcagaatcttgggctctaactaatgagcctgagagtgcttcattgatttaatcgccactacttatgttaggatctagcaagtgcagcagcgctgctcctaacttactgcctttaacaagctggcactacatatagtgccgatttcattgagtagataacgttaaagtctttagtatgtattcaagaattattcatcagatttcaaacagccattgaccattgcataagggattggtttcacctaatgacaataccattgcgtagccacaaccaaagatccttcgcatcagatcaccgaaatggtcgaagaaatgataccttggagatcggggatggattgggagtggcggaaaaggagcagcagcgcgtcgtcggccgcggaggcggtggagcgaaggaatccgagcaggctgcggagcccacgcgcgcggaggaaggagaagtccgccttggcgtcgcgcaaccctgagtgcagcgccagcgtcacctcccggtacaaacgtcgccgcgccagcgcatctgccagctcccggccactgccacttcctcctcccccatcagtggcagacgaagaagacccatcctgtcctgccggctccgcctccttccgactcatccccgtcgcctccgaccgccggcgacgtcgcccccctcccctcctcttcgttctccgtctttcccgttttacccctggctaatggggagaaaccgacggcttgtaatttcagagcccacggcccatcaaggcccagaaaagcccaacgcgatcacacgagtgggactggggagtagtgaggcgagagcttctccccgcgccgccgccaaaaccctcaaaacccgagacgccggcggtgaagaggagagggcggaggcggagatggcgacgcggatgaaggacgtggcgcggaggtcgaccaagaagtacgtggaggaggcgctgtaccggcgtctgttccggaaggggtcgacgccgcaggcggttcgagaggaggtggatggcttcctcgacagccggaagcgggcgttcaagtgggaggtgggcgtttgcgtccgccggatgcggcggaacgcgctctaccgcccgtcgctcaagctttctgaagttatggcgagaagaggcatgaatcctactgttagtgatcaagcaatccgcctggatctcattgccaaatcgagaggcatcgctgctgccgagaagtactttttggacctcccagaaacatccaagactcatcttacatatggcgctcttctcaattcttactgcaaagagttgatgactgagaaggccgagtcccttatggagaaaatgaaggagctcaactttgctttcactgccatgtccttcaacagcttaatgacgatgtacaccaaagtcaaccaagctgagaaggtccccagtatcattcaggacatgaaggcagatgacgtattgccagatgtctttacttataatgtttggatgagggcgcttgcagctctcaaggacataccaggggttgagagggtgattgaagagatgaaacgggatggccgtgttgctcctgattggacaacatacagcaacctggcttccatatatgttgaggctggaatgtttgagaaggcagaggctgctcttaaggagcttgagaagcggaacaccagcaatgacatcgaagcctaccagttccttattacattgtatgggcgtacacagaacttagtggaagttcaccgtgtctggcgatcgctgaagcgggataaccctagaatggcaaacatgagctaccttaacatgattcaggttttggccaacttgaaggacctgtctgctgccgaagcctgttttaaggagtgggaagcccgacacatccatccacccaagaccaacacaaagggctcgggggcagataatacacctggtgcagatccaaaatctccaagtaacccgcctaataatcagtctggcaccaaggaaaccggggacgagacagcagaggacctccagccgaagcatccaaaatatgacatccgggtagcaaacgctatgatcaaggcgtacattaccgagggcatgcttgacaaagctgtcgccatgaagaagcgtgccaagatgcgcggcggaaggctgaacgccaagacatgggagatcttcatggagcattacctcaagacgggggatctcaagatggcccattggtgcgcggaccgcgcgatgaagaaggggcacagcagcggcaggatttgggtgccgccgcccgccgtgacggagaccctgatgagctacttcgaggagaacaaggacgtcgatggggccgagcggtacgtgggggctctgaagaaggtgcagaaggatctgggcgcaccggtgttcgagccgctggtgcggacgtacgctgccgccgggaagaagttccccgggatgcggcagcggctgaagatcgagaacgtggaggtcggggaggggacggcccagctgcttgactctatctgcgccgatcaatagcccaagcacgtcctagaggcggtggcagcgttggtggcggctgctatgcgatgggggcaccacctccgttgatgtattgtctggtgcgggactgcgagtgacctctgaggcgggggcggagaataactggatctacctaacgtcggaatggagacctgcaggtccatttgaaattaaacagaaggttggtaagagtgtgatggtgctcattttgcgttttagaggatccatacttgcatgtagccaaagaaactattttagtaccttttttccttgtactttttttttgtcttattgctttgcctggagctacttgaaatgctccacagttatgtcctctttttaactgagatgtcgttggcctgaacaaaggatgcttgacgcttcgaagtcacacgcaatgataaattcagtttgcagcatcgcgatgcatttggac

SEQ ID NO: 82610 - DNA, 2072 bp, Zea Mays
ctccccagcaccccatccttactcgctgcgccacgtccccggtaggatccgcaatcctatcaacccaccagatcctgatccccaacaacagctgcacccgtggtgatttaaagcacacattgtttggtttccatctgtccgcgtacagcctgagcagatgcagaacacgacccccagccaggcccgtgggagatgcctcggccgcgcgtatgcgctcgtgcaggactgcaggctggtcctttctgaagttatggcgagaagaggcatgaatcctactgttagtgatcaagcaatccgcctggatctcattgccaaatcgagaggcatcgctgctgccgagaagtactttttggacctcccagaaacatccaagactcatcttacatatggcgctcttctcaattcttactgcaaagagttgatgactgagaaggccgagtcccttatggagaaaatgaaggagctcaactttgctttcactgccatgtccttcaacagcttaatgacgatgtacaccaaagtcaaccaagctgagaaggtccccagtatcattcaggacatgaaggcagatgacgtattgccagatgtctttacttataatgtttggatgagggcgcttgcagctctcaaggacataccaggggttgagagggtgattgaagagatgaaacgggatggccgtgttgctcctgattggacaacatacagcaacctggcttccatatatgttgaggctggaatgtttgagaaggcagaggctgctcttaaggagcttgagaagcggaacaccagcaatgacatcgaagcctaccagttccttattacattgtatgggcgtacacagaacttagtggaagttcaccgtgtctggcgatcgctgaagcgggataaccctagaatggcaaacatgagctaccttaacatgattcaggttttggccaacttgaaggacctgtctgctgccgaagcctgttttaaggagtgggaagcccgacacatccatccacccaagaccaacacaaagggctcgggggcagataatacacctggtgcagatccaaaatctccaagtaacccgcctaataatcagtctggcaccaaggaaaccggggacgagacagcagaggacctccagccgaagcatccaaaatatgacatccgggtagcaaacgctatgatcaaggcgtacattaccgagggcatgcttgacaaagctgtcgccatgaagaagcgtgccaagatgcgcggcggaaggctgaacgccaagacatgggagatcttcatggagcattacctcaagacgggggatctcaagatggcccattggtgcgcggaccgcgcgatgaagaaggggcacagcagcggcaggatttgggtgccgccgcccgccgtgacggagaccctgatgagctacttcgaggagaacaaggacgtcgatggggccgagcggtacgtgggggctctgaagaaggtgcagaaggatctgggcgcaccggtgttcgagccgctggtgcggacgtacgctgccgccgggaagaagttccccgggatgcggcagcggctgaagatcgagaacgtggaggtcggggaggggacggcccagctgcttgactctatctgcgccgatcaatagcccaagcacgtcctagaggcggtggcagcgttggtggcggctgctatgcgatgggggcaccacctccgttgatgtattgtctggtgcgggactgcgagtgacctctgaggcgggggcggagaataactggatctacctaacgtcggaatggagacctgcaggtccatttgaaattaaacagaaggttggtaagagtgtgatggtgctcattttgcgttttagaggatccatacttgcatgtagccaaagaaactattttagtaccttttttccttgtactttttttttgtcttattgctttgcctggagctacttgaaatgctccacagttatgtcctctttttaactgagatgtcgttggcctgaacaaaggatgcttgacgcttcgaagtcacacgcaatgataaattcagtttgcagcatcgcgatgcatttggac

SEQ ID NO: 82611 - DNA, 2413 bp, Zea Mays
cacaagttcatcagtaactgctgcattctcgggtataagcataagaattatatccaaccaaatgcccaggcatattaatgtcttttgagatttaaaattgcaaacttgatatgctcattacaacaagaataactactccactgaccactgtaacaacccactcctgaaatatacacaaagaaagttacgctagatcactatttgcgagaatgatcatataactccaaaactgatgaatgcaggtgtcagggcccaagagggtccaccacagtgacgccggtactgtagcagcatgcccctcagtaggttagataaagataaggctagtttgtgataagattagaattagagataagattagatctagtgcttaaaggtcaagtaaccctctctatataaggagaaggactgtatcaattgaaggtaagcaagaattagaaggaaatccctcctctcttgccggccgtgggcagaggcccccggccggcctccccagcaccccatccttactcgctgcgccacgtccccggtaggatccgcaatcctatcaacccaccagatcctgatccccaacaacagctttctgaagttatggcgagaagaggcatgaatcctactgttagtgatcaagcaatccgcctggatctcattgccaaatcgagaggcatcgctgctgccgagaagtactttttggacctcccagaaacatccaagactcatcttacatatggcgctcttctcaattcttactgcaaagagttgatgactgagaaggccgagtcccttatggagaaaatgaaggagctcaactttgctttcactgccatgtccttcaacagcttaatgacgatgtacaccaaagtcaaccaagctgagaaggtccccagtatcattcaggacatgaaggcagatgacgtattgccagatgtctttacttataatgtttggatgagggcgcttgcagctctcaaggacataccaggggttgagagggtgattgaagagatgaaacgggatggccgtgttgctcctgattggacaacatacagcaacctggcttccatatatgttgaggctggaatgtttgagaaggcagaggctgctcttaaggagcttgagaagcggaacaccagcaatgacatcgaagcctaccagttccttattacattgtatgggcgtacacagaacttagtggaagttcaccgtgtctggcgatcgctgaagcgggataaccctagaatggcaaacatgagctaccttaacatgattcaggttttggccaacttgaaggacctgtctgctgccgaagcctgttttaaggagtgggaagcccgacacatccatccacccaagaccaacacaaagggctcgggggcagataatacacctggtgcagatccaaaatctccaagtaacccgcctaataatcagtctggcaccaaggaaaccggggacgagacagcagaggacctccagccgaagcatccaaaatatgacatccgggtagcaaacgctatgatcaaggcgtacattaccgagggcatgcttgacaaagctgtcgccatgaagaagcgtgccaagatgcgcggcggaaggctgaacgccaagacatgggagatcttcatggagcattacctcaagacgggggatctcaagatggcccattggtgcgcggaccgcgcgatgaagaaggggcacagcagcggcaggatttgggtgccgccgcccgccgtgacggagaccctgatgagctacttcgaggagaacaaggacgtcgatggggccgagcggtacgtgggggctctgaagaaggtgcagaaggatctgggcgcaccggtgttcgagccgctggtgcggacgtacgctgccgccgggaagaagttccccgggatgcggcagcggctgaagatcgagaacgtggaggtcggggaggggacggcccagctgcttgactctatctgcgccgatcaatagcccaagcacgtcctagaggcggtggcagcgttggtggcggctgctatgcgatgggggcaccacctccgttgatgtattgtctggtgcgggactgcgagtgacctctgaggcgggggcggagaataactggatctacctaacgtcggaatggagacctgcaggtccatttgaaattaaacagaaggttggtaagagtgtgatggtgctcattttgcgttttagaggatccatacttgcatgtagccaaagaaactattttagtaccttttttccttgtactttttttttgtcttattgctttgcctggagctacttgaaatgctccacagttatgtcctctttttaactgagatgtcgttggcctgaacaaaggatgcttgacgcttcgaagtcacacgcaatgataaattcagtttgcagcatcgcgatgcatttggac

SEQ ID NO: 82612 - DNA, 1945 bp, Zea Mays
cgacgattgacgaggcagccataggtgttgttgttgtcccggcggcgcctgcagtgccgtattcgtataagagaagagacccccaccggctgctccacccaacgtaacagagaatcgccgcccgccaggccaggcgatagctagcgcgcggcggccatcgccaacgcccggcccggccccgggcagctcggctcctcacgcgcgcgtttgcagcgtgatcgtcgagcgccgccacgtacatacacgcgcctcctcctccccgcctccaggctggttggctagctgcaaccactcgcgagctagagctagctaactggccagcagctccaggtcgaacgaagcttagctagctagctcaccggcaggagcggagctacccctcgagtactcgcgcgcgcatgggaaacgccctcgggtgcgcggggctcggcgagcggctggcggccggcgccagggacggcgacgcggcggaggtgcggcggctgctggacgccaacccggggctcgcccgctgcgccgccttcggcagcctcagctcgccgctccacctcgccgccgccaaaggccaccacgagatcgctgcgttgctgctggagaacggagcggacgtgaacggcaggaacatctacggccagacggcgctgatgcaggcgtgccggttcggccactgggaggtggttcagacgctgctgctgttcagatgcaacgtgtccaaggcggacagcctgagcggcaggacggcgctgcacgtggcggcggcgggcggccacgtcaggtgcgcgcgcctgctgctcgcgggcgccggcagcggcaggagcaagctcgtgaaccgggcggccagcggcggcggcggcggcgtgacggcgctgcacctggcggcgctgcacgggcacgccgactgcgtgcacctgctggtggacgagcgcgccgacgtcgccgcgcgcacgctgccctgcgccgcgccgcccatggcgtccgtcggcgccgggagcgcgccgctgcactacgcggccgccggcggcgaggtcaagtgctgccagatcctcgtgtcgcgcggggcggacagggccgccgtcaactgcaacggtcaggtggctcccggtggacgtggccaggacgtgggggtgccactggctggagcacgtcctgtcgcccaagtctctgctgcccatccccaggttcccgccctccgcatacctctcgtcgccgctcgccagcgtcatcaccctcgcgagggattgcggcctggctctgaacatgtcgtcgctgccaatggacaccatggacggcggcgccgacgacggcgacgcatgcgcagtctgcctcgaaagaccctgcaacgtcgctgccgaagtgtgcgggcacgagctgtgcgtcaagtgcgcgctggacctgtgctcggtgatcaggtcctacgacgcgccggggatcgccggcaccatcccgtgcccgctctgccggagcggcatcgcctcgttcaggagacgggccgcggcggccgaggccgagcctggcgccaatgccggcgaccggcaggcgtcgtccagcccacacaagaagcggagcacggagtccgaccaggacggcctccccctcgtctgcgctcctcccgccgtcatgtcgtcctgatcagcgctgcagacatagaaatagaagctgctgtgctgcatcgtctcttcgtcggtagaaatctgcagggtacagcagcagcatgggtggatcacaggatgcatagaagctagacagacagattgtttggttctgtttgctgatgctcgccttcggcatcggtggattttattttattttcattttattttttatggtgattcacatggcattagctagtctgctagtgtaacacgttgatttgctgtagaaaaagatggaacattcttttgctgtaaaaaaaatggggttggttggtttcgggcgttttgactca

SEQ ID NO: 82613 - DNA, 604 bp, Zea Mays
gcgaaaacccctctcgtatgtcgcatcgcgtctaaacccttgtctccttcttatccccacctccctcgcggatcactcgccgccgccgccggccgcagccatcgccgtgatgctgtccctgtcgagggcgatcgggaggcggctcttctcgtccgccgaggccgcgtcgacggctgcggtgaggacggcgcagaacccgctcgaggagttcttcgaggtcgagcggagcaccgaggagggcaagcctcctccccactacggtcgcagctggaaggcttctgaactgcgactaaaatcttgggatgaccttcagaaattgtggtatgttcttctaaaggaaaagaacatgctaatgacacagcgtcaaatgctgcattcagagagcatgaggttcccaaatccagaacgaatttccaaggtaaagaaatcaatgtgccggataaagcatgtcttgactgagagggctatagcggagcccgatccaaggagatcttcggaaatgaagcggatgataaatgccctgtgattcactcacaggcattctcccttgggacttttgatggttactaagttggcacttgcaagtgccctgcatgaagaggag

SEQ ID NO: 82614 - DNA, 890 bp, Zea Mays
ggattttgaaattgatgaagaatcaaaagaatacctcgcacttcatcctcaggcagccacaaaggagcctcgcctgattgaagaacattttgatagtgttagcgaggacgatcaacaatctgatggtaacatatctgacactctagcggaatctgacagtgatgatgtcatgcataattcaaagcgtataaggttatacgaggtcaaggatgaacaccatgcggaagcatttttgaacagcgtctctttatcaaacgaggatgctgttccccttgaggataggatagctgccctggaaaggaaacagaactccaaagcacttgatgcggtcaagtacgggcctggtggctcacgagagatttcgtttttctctaaaagccgtagaaggcacaaggaagagtcgtctagcgacgatgaacccaagggtgtcaaaaagagagctgtgcagccgctgggcttgaagcagggaaaagccgagttctatatgtttggcggaaatcgtggcagaggatgaatggggcccgtcacattgaccccgttcctgcctttgcaggggttttggtaagcttgaaatggattgatcctgcacatgcagtgggtagaaagtgtgttccttcacaacataggcaagagctagagtaactgaggattgctgcttcagaatttttgggaagagaactttgttagaagacaatattacatatcttatggtctaccttgtaacggatcgttgcattctggtgggtgtctatgggtacggtatagcattttttttgtaataggcaacataactgctggcattttcatttttgagtactgaaggctctccaaatccatgattagtagacatgcgttcatagaaacagaaccaatattaatatctaaaaata

SEQ ID NO: 82615 - DNA, 2354 bp, Zea Mays
agtgcctgatttagtagagcgcactagcgaaaacccctctcgtatgtcgcatcgcgtctaaacccttctctccttcagtccttctcatccccacctccctcgcggatcactcgccgcctccgccgccgccgccggtatctcatacgcccccctcctcccttcctcgagtgagactcttcccgtgcccggaatccttacccgatccgtcgttctgcaggccgcagccgccgccgtgattctgtccctccaacttccttaaatcctagagccagcagcaggcaaccagcgccgacgaggaggaggagcgcggagtagaggggctccggcgaccgcgtcggagatggcggcaagccacggcgcggggacgctcaagtccacctccatcaacggggtcaagctctactcgctcaacggcggccgctatgtcgccccctgggtcgtcgcgaagaagaagcgcgccctccgcaaggacaaagagtatcagcggaggctggatttgatccacgacctgaggttcgagaccgccaccaccaagatcaagctgacgcccgatgaccagtacctgatcgcctcaggtatttaccccccgcaagttaaagtctacgagttgaaggaattgtcgatgaagttcgagcggcacatgatctcagaaattgtagatttccagatccttggtgatgactattccaaactcgcgtttttgtgtgctgatcgttctgtaaatttgcacgctaagtatggaagccattatagcttgagaattccaagagtgggaagggacatggcctacgattgctggtcctgcgacttgctatgtgctgcttcatcaccagatctgtacaggataaacctagagcagggacgattccttgcttctctttcctccgaatcaccagcaataaatgcggttacacgaagtaagatccatgggcttgttgcttgcggtggtgaggatggtgcggttgagtgttttgatatgaggaaaaaaacttctgttggcagaattaatattccagctgttagttctgaagattattctcaggaggtcacgtctttgcaatttgatgaagatcaaggatactttatggcagtggggaccagtacaggaaaggctattgcatgtttgacctttatgttctttctaaagtgtgctaattgatgttggaacctacaaagttggacaatacaacttcatgtgttgtatttataaaactcgaccggtttgggaaagaccgccccgcggtattatatcaagaagaagctcaatcggagccccgactgagaaaggtcatgaaagttggccccttgtgcatcatgatggcccgcctcctatagatatcaatatatgatttacgcatgtcttctcctctgagagttaaggatcacatgtatggtagcccaatattaaatatcaaatggcaccagacacttaattgtactgaacctaaactgatcactgctgataagcacatagtgagaatctgggatcctaatacagtgagtttcttcctttccattttgttcaaatgttttcttcattagtattcatggtgtaattttacatatatattgggtttgatgtggatttaaagcaaactcttaatttaagacattaccaatattttatgatccattgggtgttggtttgctcgccttcttgaagtaaaacatggccgtggttataccttaaaaggctttaagctagtttctattatggtgcaatctgaaattctgaacgtatcttgaactcttcctgtaaggctgtaacatttgaatccgtactggtaatgcatgccatagcctctatctgaagcaaattagggaagttactacttactagaatagaacccaaattttgtatattaggttgtgctgacagctttattccttatttacccttgtttgactttgggtttatttgggaagcatgtatttgcatagcacttgaaacccagctaccttccaacatatctgcaaattcttagggaatatgtgagttatcagttttaccaaattatctgtggttccaggctacatttatgtctatgaggattatgtttctcacggcactaaactttattccattttttataacactaaatttgatagtctggattctggaatatttattttacacatgaactacatgaccttttttacaacacagcgataggaaaactgaaatgacacttttatgtcttcatacatgtttgactcttgctctgaacccagttcaaggacatgggagctcttatgcatttacagtgcgtttggtttgtggaatcaccccatgcttcctgaggtggtgcatcatgatttcattacattagtatggtggaatgagcactcattcc

SEQ ID NO: 82616 - DNA, 5683 bp, Zea Mays
atcttgcccccgggaggggtgagatcctagggttgtcttgggatcggcaggccacccaagacggatctagacgacgtagagtcgaatagggatggaggtggatatgtggaagactacaactagaactatgctacatctactcctagggcaggaaaagtaaataaggtaattggttcgattggaatgtgttcgggggttctcaatcggccgtacctgtgacggaacctcccaagtaattaggcccacctacagttgtccttgtccaacagacatcagacaaccctgtagatgttcctgaatcactcgacaagttcggtatcttctttcttaccttaccaggaacgtttcacccgtcttgcagacattacagaacatcggagataaagaaatgcggaagctattacataaacttacatttatttagaaagtaagatcaagttacttattacagaccagagctataaacgagtgctgagtagtacacatatcaagggaggcaaaaactcctcccgatagctttaaacaaaaagtcctatatggaggaccacgtcctcccgcatcttcactcttgcttttcttcatttgataccaccttggagcaaaagcaacaaaaatttgtcgcttcctcacctaaaaacaacaaagggataaaccctgagtatggaattactcagcaagtcttacccgactaaagaaaagactctcaagggtatgctggataaataggaatcaaggagaggctttagcaagaatcaacttagatacttttgcagaaatagcttactaaagtgagtccttactttcaatattttaacgccagattaaatattaatagactctgtttgcctctagtctaatttcatcatctcatcaatacaacatcatttttatttacgaagttcacatcctgacttaggttgtagggcagtgatcaagtctccactctccggggatataacggcgatccgaatcgatttactcagctgaggatctctaaccacacgacatatgtagcacttaatccttgcatatgtcaactcgaccccagggttcttaagaccagatcaggttcacgcaaaccgagagcacagatacaccaccgtccagcctcttgccacggagggtacacgctactcccgccaccgctccacgctcatttcgtgttatcttattctggccttagtctgcccgaggcaaagcttaccctgtcccatttccagggtatgcggctagctaagatagtccttactctatcaagcctacatacgcattcaatccttaatcaacctgggtagaacatcacctgttcctagcccaagtctcgatttaagtatttccatccttaggattgtttctgttccttaggatgaaaagagcatcacagggaactttgcagtaagatcccaccatgctcccaatgaaaatatattcttgcaggtagaagtcatctttcctcaggataacccctgagcaaggccttaacgcaaaagacaacttccatccacaagatctaagcagggctaagcatttttgtaaatcaaattttgatacttccaaagaagtatctataacgggtatggatatcaaggaaggtaatgcatcaaagggtttcaagcaactcctataaacttaatgcacatttcactagacttaaagtgtgcgaaaagtatttaaaaacacaaggaaggggttgcatgcaccggggcttgcctttgtttatagacgagtcaggctcggactcgcagatgtcgaagtagagccaagtccctgcctgagatttcaaaggtggtgatgtcttctcttgagtcacttcgatctcttcttcgttttctaaacataaccatatataggtgtatataagaatgaatgccatgtaatgcaaactctcacaaggagaggtggagaacagaaacactacaactaaagcacatgacaagaatacacttatttcttatcgctcgattaaagtgaccaatttgaaatcacttaggtaaaccagggaattaatccacttatatctcatccaaaagcttaaaacttcttaagcaacttcatctcttccctagataaacttatctcctttccaaagcattaacccacacttgattaaggattaaccactctattttggggcttacaaagttctcatagcaaatggactccaaatagcctcaaacctttatcacaccctccaaagaccaaagcaaggttactcaaaattttccacaatttttgccattgtacttttatttctaaaatccaaacagtcctttcaaaagcacctttaattcacttaatactttctaattgctctaaaaatcctaaaaccaactttaccagagagctcttgattttagacatccaacaaaatttgtcccatgatttttggaattttcaactatttttagcgctattcacaagttctctagaaaaggaaaaggccaaacttacttaatggaactttttcaccaccatatggtcttcacttcctctaccaaaaccataatccaaagcttcatgaattggccacaaacaaggtccaaaaacagccatcaacactgaatttatctaaaactccagaaatctaccagctccactttagctcactttttctcctagttccaaatagcttctagggtatagccttcaaccaaacctggtcttctactatagctctattgctttgctataagagacataatttaattccctacaggttagccactacaaaggtccaaacatggctaaagtttactaaaattcagacatagccaattagctgtctgaaacccagaagttgatagcccacttttaagcaagctttacacttagttctatatagtttttggatcagatcgcttaatcaaacttgtactccaataacagatctacaactttgttatagtggccataagctataactctatggatagagcaacaaagagctccaaagctgcaccaaaacatacaaattcagactcagaattttcactaagtctgaaatctgatagccctattgtagaccacttttactccaattttcatataacatccaacaaaactgtcttaaggagatttgttcaccatcacatgagcttctctatcttatgtagagcacaaaacatgtatagcttggctaaggaaaccttgaaattacctagccacggtgagaagagcactcgggttgcatggtcaccatggtcacatgatgcactggctgaagcaaactaggtcgctgtggggaaggttaacaccagcaaaacaccaggatccccacgcccccatagtggactatggctggagcttaaggcagggagggaaatctgtccaaaaccaagccctataaatagctgaatatggggcaaggtgtccctacacatgttcaacatgcagggaagggtgtttccttgagtgccaccaacatatgagcccaatgatgtggctcccatgcaccagcacagcacaggatcataggggcagctgggacactgaatctggtcagccttaatagccaaaatatcctatgacatactacagaaatattagatgagaactccacctgttacaggcagcaatgggtccaaaattgatatttttctgcaggggtgaggctactagatcttttgttgactagaccaaccacatctcaattcgagcacactagagaaaccagcagggataaaaagatctccttcagatattcttggagtacactgagttgctgctgtttgactgagttcacaacttcaccccttcatctctcccagttcctagcaacaacaggagaaccaaccttaatgaactttgttcaccaactaaccctctaacaatttgccattgggaccttagtcttatacccctcggatcagacacaaaacagctccaaaatcccaagaaaaacaataaaccaacccaacaatggactgaactagcacaccactgatcccatgcagttgcaggcctctctgttgaagccctattttctcacaatttttatatagcaacagaccaatccttcataaccaaacttgttcattaactaaggctcttgaagtttgttacaagaatctgggacccaatctgcatgtatcacaagttatagtgtccaagaatcagccacaattcactgaacctggtttcagtcctccgaatttagttcagagttcacatagtgccatttcttggggcatttactccaaattttgtgtagcaccagaccaacatcacttaagagaatttgttctcctatatatggcctttcagtttgttacagaattcctaactcaaatctcttttgatttattaccacaagaccccaaagttgggtaaaaacacacatattcagacttaaatattattctaagtctgaatcccaacacctgacagtccacctttttggctacttttactcccaaatctatgtggaaccaggttcgtctcactttagcaaacttgttcagtatactctggtattcaactttgctatatagttatttgttcaaaacctcatgaactgatcacaaaagagctccaaactcagcaactttcactgaaattcagttttcaaaaactgaatataattcagtttcagccacaacacagtcccactttaagcagtggttattccaattcttgtatgggatcatgtccatcaccctttaaggaagttgttcaccaatatatggtctttaattcctctataagcaccatagtataaaaccttatagaacagccacaaacaagctccaaaactgctatcaaaacactgaattcagttcagttgactgttcaccatctgaaaattcagaaatacagcagcaccacttggaaccattctttttcctgggttccaaatgtttataggggcaagttgcttaataaagtttatactcctatagttcctctacaagtttgatgtagtgaccattaaccaaaacctcttggattacaaactacaatagcccaaagtttgctccaattgctgaaattcagaatctgaatttcactaagtctgaaacctacaatttctgacagctttactttggaccaggttttctctaagttccaaacagttttagggctaggtgacttaaccaaacttatactcctcatgtagctctataacttggttataattatcatcttcaaaatgcttataaatcaaaagttacaatggtccaaagttggctagttgatattattttcagaaattccaatctaaactcaaaactgaatttttatacttagctctaaattcttccacacaacttgggaatctccaaataagaaagttattcacttttccaagccctacacctttggtactttaatttttgcccaattctctctagattttgaattcctcgtttggggcaaatttagggtttcaattgtggttccttctcatctagtgatttaccaactcaatctatcctcctaaaagccaagtgactccttagtctcaaatccaactttagtacatgaaactcatgtccaaagtgtccttggtttaggagttgctttgtttatccataattctaagcaagtttttcaacctaagtcctatactcgacacacaacatcacacttttgaatcgaaaattttaacctagtaaatgcattctaggtgtaacaagcaagttaatgcaaatgcttatgatgacatgtcagagttttagttcac

SEQ ID NO: 82617 - DNA, 1263 bp, Zea Mays
cgcactttgagaagagaggatgaagacgtttgacatcaccggcccttcatcacggagttcgccatcaccggcttcatcatcaccaagatgatgaccaacttcaccgaggaggacctcaagaactcaaccagtcactagatctgcatttatgaactcagcagtaaattcatctatccatgttttgaattaattttactgattcatattttgggggccatatcatagtgtgcatgcaagattgcaatatcatgcatgactatataagaggaaaggaggctttctacagcatgggttgagttttttcttctgtgaagatcacgtttttcttgatccttggttagaagggggtagcatagtttatacttagatgcaacttactatagttatcccccacatattgtttgcagactcttccgtgtgattcaagctcctttgtttctttaatcatttgcctcagacagaagccatgtaaaggatcctgaggggaattggattcagttacctacaaaatatgaaccaattgtaggcagaaggtagtgaactatatgtcatagtcatcttttttgttccaaatttgtagcactctctttttttccttatttttaaaatgaacttgcactgtcttagcccactggttacctgaacttataatagctaagctaaaactatgcagagttccatccaattcgatactaacatgatggatttatactgaaccattcaaattgaaagttttttgcttgtttattcaataaatggtttactgagattttagttgcttatgtgttttgatcacttttgatcattcgttccttgtaattctattataccttctctgtaacaaagtgccaatggatgtgttgaaagtcatgttattgacaataatatggtgcataccatctcaataggtttatatgttcacttctgtttgttgactcagtgctacatcagatgctgcactaaatcacatatgtactcgtggatttgctattagctggaaaggagacttttcattttccccacttagaatgatgtttgggtcattcgtcatcctttactcatctgatgattgtgcagctaaatagcttatatttgaagaagggctagattgaagtactactaaaattttcaatcacgattatgtattatgtgcaagatcatataagttcaatatatgaatttcctttgcatatgtaattggttttgaccaaattatcaactagatggctctatatgaaatggcacacggctgtgagcctgtct

SEQ ID NO: 82618 - DNA, 285 bp, Zea Mays
ccacgtctcctggacgagctgaccagcacatcgttggaccaccatccttgcgctacgcactttgagaagagaggatgaagacgtttgacatcaccggcccttcatcacggagttcgccatcaccggcttcatcatcaccaagatgatgaccaacttcaccgaggaggacctcaagaactcaaccagtcactagatctgcatttatgaactcagcagtaattggttttgaccaaattatcaactagatggctctatatgaaatggcacacggctgtgagcctgtct

SEQ ID NO: 82619 - DNA, 686 bp, Zea Mays
ccgcccccgccgtagccgcaactgccgcccacgtctcctggacgagctgaccagcacatcgttggaccaccatccttgcgctacgcactttgagaagagaggatgaagacgtttgacatcaccggcccttcatcacggagttcgccatcaccggcttcatcatcaccaagatgatgaccaacttcaccgaggaggacctcaagaactcaaccagtcactagatctgcatttatgaactcagcagtaaattcatctatccatgttttgaattaattttactgattcatattttgggggccatatcatagtgtgcatgcaagattgcaatatcatgcatgactatataagaggaaaggaggctttctacagcatgggttgagttttttcttctgtgaagatcacgtttttcttgatccttggttagaagggggtagcatagtttatacttagatgcaacttactatagttatcccccacatattgtttgcagactcttccgtgtgattcaagctcctttgtttctttaatcatttgcctcagacagaagccatgtaaaggatcctgaggggaattggattcagttacctacaaaatatgaaccaattgtaggcagaaggtaattggttttgaccaaattatcaactagatggctctatatgaaatggcacacggctgtgagcctgtct

SEQ ID NO: 82620 - DNA, 1660 bp, Zea Mays
cacatctccgtctcccgtcgacgccgcccccgccgtagccgcaactgccgcccacgtctcctggacgagctgaccagcacatcgttggaccaccatccttgcgctacgcactttgagaagagaggatgaagacgtttgacatcaccggcccttcatcacggagttcgccatcaccggcttcatcatcaccaagatgatgaccaacttcaccgaggaggacctcaagaactcaaccagtcactagatctgcatttatgaactcagcagtaaattcatctatccatgttttgaattaattttactgattcatattttgggggccatatcatagtgtgcatgcaagattgcaatatcatgcatgactatataagaggaaaggaggctttctacagcatgggttgagttttttcttctgtgaagatcacgtttttcttgatccttggttagaagggggtagcatagtttatacttagatgcaacttactatagttatcccccacatattgtttgcagactcttccgtgtgattcaagctcctttgtttctttaatcatttgcctcagacagaagccatgtaaaggatcctgaggggaattggattcagttacctacaaaatatgaaccaattgtaggcagaaggtagtgaactatatgtcatagtcatcttttttgttccaaatttgtagcactctctttttttccttatttttaaaatgaacttgcactgtcttagcccactggttacctgaacttataatagctaagctaaaactatgcagagttccatccaattcgatactaacatgatggatttatactgaaccattcaaattgaaagttttttgcttgtttattcaataaatggtttactgagattttagttgcttatgtgttttgatcacttttgatcattcgttccttgtaattctattataccttctctgtaacaaagtgccaatggatgtgttgaaagtcatgttattgacaataatatggtgcataccatctcaataggtttatatgttcacttctgtttgttgactcagtgctacatcagatgctgcactaaatcacatatgtactcgtggatttgctattagctggaaaggagacttttcattttccccacttagaatgatgtttgggtcattcgtcatcctttactcatctgatgattgtgcagctaaatagcttatatttgaagaagggctagattgaagtactactaaaattttcaatcacgattatgtattatgtgcaagatcatataagttcaatatatgaatttcctttgcatatgtaagaaaaacattgtttgaatcatgctgcactatagatagaatcactgagtattgtactattttttcacggttgatttcattttactttcattcctttccaattcaactattaacataacagaaataacaattcagtggaatgaattatgctggaaagaagagggccttttttcatgtcttttgaagtagtttatcactattctgttattagtttcacactggtatttttcatggtctaattcactaacggttttggcataatattgataaagaaagcgatttgatacaggtaattggttttgaccaaattatcaactagatggctctatatgaaatggcacacggctgtgagcctgtct

SEQ ID NO: 82621 - DNA, 1122 bp, Zea Mays
cacatctccgtctcccgtcgacgccgcccccgccgtagccgcaactgccgcccacgtctcctggacgagctgaccagcacatcgttggaccaccatccttgcgctacgcactttgagaagagaggatgaagacgtttgacatcaccggcccttcatcacggagttcgccatcaccggcttcatcatcaccaagatgatgaccaacttcaccgaggaggacctcaagaactcaaccagtcactagatctgcatttatgaactcagcaactcttccgtgtgattcaagctcctttgtttctttaatcatttgcctcagacagaagccatgtaaaggatcctgaggggaattggattcagttacctacaaaatatgaaccaattgtaggcagaaggtagtgaactatatgtcatagtcatcttttttgttccaaatttgtagcactctctttttttccttatttttaaaatgaacttgcactgtcttagcccactggttacctgaacttataatagctaagctaaaactatgcagagttccatccaattcgatactaacatgatggatttatactgaaccattcaaattgaaagttttttgcttgtttattcaataaatggtttactgagattttagttgcttatgtgttttgatcacttttgatcattcgttccttgtaattctattataccttctctgtaacaaagtgccaatggatgtgttgaaagtcatgttattgacaataatatggtgcataccatctcaataggtttatatgttcacttctgtttgttgactcagtgctacatcagatgctgcactaaatcacatatgtactcgtggatttgctattagctggaaaggagacttttcattttccccacttagaatgatgtttgggtcattcgtcatcctttactcatctgatgattgtgcagctaaatagcttatatttgaagaagggctagattgaagtactactaaaattttcaatcacgattatgtattatgtgcaagatcatataagttcaatatatgaatttcctttgcatatgtaattggttttgaccaaattatcaactagatggctctatatgaaatggcacacggctgtgagcctgtct

SEQ ID NO: 82622 - DNA, 1072 bp, Zea Mays
cacatctccgtctcccgtcgacgccgcccccgccgtagccgcaactgccgcccacgtctcctggacgagctgaccagcacatcgttggaccaccatccttgcgctacgcactttgagaagagaggatgaagacgtttgacatcaccggcccttcatcacggagttcgccatcaccggcttcatcatcaccaagatgatgaccaacttcaccgaggaggacctcaagaactcaaccagtcactagatctgcatttatgaactcagcaacagaagccatgtaaaggatcctgaggggaattggattcagttacctacaaaatatgaaccaattgtaggcagaaggtagtgaactatatgtcatagtcatcttttttgttccaaatttgtagcactctctttttttccttatttttaaaatgaacttgcactgtcttagcccactggttacctgaacttataatagctaagctaaaactatgcagagttccatccaattcgatactaacatgatggatttatactgaaccattcaaattgaaagttttttgcttgtttattcaataaatggtttactgagattttagttgcttatgtgttttgatcacttttgatcattcgttccttgtaattctattataccttctctgtaacaaagtgccaatggatgtgttgaaagtcatgttattgacaataatatggtgcataccatctcaataggtttatatgttcacttctgtttgttgactcagtgctacatcagatgctgcactaaatcacatatgtactcgtggatttgctattagctggaaaggagacttttcattttccccacttagaatgatgtttgggtcattcgtcatcctttactcatctgatgattgtgcagctaaatagcttatatttgaagaagggctagattgaagtactactaaaattttcaatcacgattatgtattatgtgcaagatcatataagttcaatatatgaatttcctttgcatatgtaattggttttgaccaaattatcaactagatggctctatatgaaatggcacacggctgtgagcctgtct

SEQ ID NO: 82623 - DNA, 1194 bp, Zea Mays
gcgacgcgcggcgcggcgccggagccatcgccgcggttgctcgcccgcttggagaagccgtaggggaggatgtcgaatcgctgcgcggtgctcatctgatgcctcgacgacgagaaggagcaaccagccaacatcccggagacgcggccggaagcggtgtggcaagaagagacctactctcctctgctctgccctcctgacctcctctgtggcttcgtcttcgtcgtcttgttcgtcttcctcctctctgccgattcactcctcactcccacttcccctctcctcactgcctctctccgtgctatctggatacggccagaggatctttctttccctgtatcgtgtgaggtgagctgctgctgtgtacgaatgaacgaacgaacggatcgatgtacaaaagaaagattagagcccgttcgaaaaccagatgatcttgtttcccggatgaaagaatttggtcagttactttctttgtgtataaaaagaaagaagaacaaatcaatgtctatgactaccagagatgggtatgtgtatgttatgctgtatatgcaggaaacaatggggatcagtagtacaaaagaatcaaagaatgtagtataggaagaaggagaagctgcctaaaacatctagaaaaaccgggcggcgatgccggggcggctcaccctctgcagcagagcccgcgcggcggcgacggcagtggaagccaggcagcggcgagcggcggaacccagcaccacctccattgcccaaacgacgaaaagaagtgaggaagaagaagaaaaaacctttccaagaaaccaggaatcaggggatgacgaagacgatctaactaacaagttaacaatgcaatgcaatgcaatgcaatgcaatgcaacgtgtggtgttcctagttcctaatgctactgatcctcttgccgcaccatgaatgagcactctatctctctcactcactattctgtggctggctctcttcctctcccactcactgctctcggacctctctctctggtggaagcggggagggtgggaagggagaagaaagcccgcccccgggggccagtgggagtgaaacggccgttctggcaggctcgaatcccgaggcggcgcgcgcgccgtcggatcaggaccggacggctggcgagtgcgtgcggggggtggtcctccaggatgtgaccgttagggggggaaggtgcc

SEQ ID NO: 82624 - DNA, 1154 bp, Zea Mays
aaaaatcctttgctttcactattacagcaagatcactaatagagagggcatagccgatttcccacctgacaaaatgttcagatgaatgaaaaccatacttgtttattccatttccttctaactcggaacagagattacaagctaaacagacatggtgaaagaatgacaagtgtacataaagaataaagaattacaactactaacaattgaatcttttatcctatcacctataaaaacaaagctacaaacaaatctttcttactcctttgcttctttttttttgttcttctgattgtataaaagaattgtcagactgtataatgaactaagttttcagtaacagcaaaagaaccactgaaaaaccatgttcttttcttcttcacttcaccttgtgtcttccccccattcagctatgctgagaatgggatgctgtggtggagacagacgcagacaccgtgctgcccccgtcgctgaccggcgtccacgcggacacggtgtacatggcctggtccatccaccggagcgtgagcccctcgccgtcgccctgcacctgcacgctgtagttgcccggcgcgaacatcctcgcgatcatgcgcccctgcaacgcctcccggtcgccgatgccggcgttctggaacccgccttcctgcatgcgctgccgccacccggtgaaggtctcgtgccgctcgaagcggtccgcggcctcgaacgccaccgcgttgcggatctcccgcgcgaacatctcctccgccttggccctcgcggggctggcgtccgccagcccagccgcctccacggcgtcgaacgccgcggcgtagtaccgcagcgcgcgcgcgaaccgcgcctcccaccgcccggagttgagggcgtcctcgtgctcgcccaggaggaggatggcggcgcccgtgctgcgcgtgagcccgaggaagtcggccaccgcggcgccggtctcgtcgcggagcaggcggtgcgccgcgaggacgcagttcacggcgacgcactcgccgcgcttcacgtggagcatccacaggcggacgtcctcgaggcggtccaccacggcgtggaactcgaacgcgagcccgagcgcggcggccacgcgccccagccgcgcgccggtctcctgcagctcctgtcttgactcgccgacgccggtg

SEQ ID NO: 82625 - DNA, 1146 bp, Zea Mays
cacggagccgcgggaccggatccgaaaatggttatttgcagttttgcacgatgtatcacgatcgcttcagtaccactgatgtgtcacctcgggttttgtcagatttagggctggtttgggaactccatttttctaaattatttctatttttcccaagtgttgattggaaaaatagggtttctaaactagcccttaggatgcgcttaaaacccactcgtagatctaggatgcccctaaaacccactcgtagatctaggatgctcctaaaacccagtcgtagattcacacatgcagtcttggtgttaaatgatttagggtgcagtgtgcagatcagcagatgttcaatccacttgtctactgcaagttgcgtgagcaagctgtggtcgctcacagcgtgtttggtttgcatcacaaaaccattccatggcgtgtggtgccgtttggtttaagctgcggaatcaatcagtctatcatggagttgttctgtgtagaccccccccttcaccgatgtacccggtgcacctgacacggctggctattatccacgcgatgaagaaagggcagggtatcgtgctgctagagataccgagtctcttaacgcttcctacgaacgttttctacgtactgggcaaattcaatcctttggtggtggacatgctggagaacctattaggcctgctgtgggtggcaatgctgcctacccagttgatgatcgttcaatgatggctgctaggggtatggatagcagaaatattggtttcgttggtggaatgccagagccaccccttccacctgatgcctcaaacaccttatatatagaaggcgttccatctgactgtacacgtcgagaagtttcacacatcttccgaccatttgttggctttcgtgaggttagacttgtaaacaaagaaccgaaacatcctggtggtgaccctattgtcctttgttttgttgattttgcggaacctacacaatctgctattgcattggatgctttgcaaggctataagtttgacgagcatgatcgcaattcacccaatctgcggctgcagtttgctcgtttcgcaggtccaaaggggaattcaggacctggtggtcgtggtaggcgataagttattggcgttcctttttgccaggtgattcacg

SEQ ID NO: 82626 - DNA, 720 bp, Zea Mays
cactccgaagcgctcgtcgcaaaagctgtggcactgccgcactggcacagtggcacgcgattcctttccttccgcgtccgcgtccttctcggctgtctgtgcagttgtgctcgcttgctccccacgcccacgtcattccccgtccgctgcggctcacctccagcctcacggtcccgcgaccgctatggccgacgcgtactggagatgtacccggtgcacctgacacggctggctattatccacgcgatgaagaaagggcagggtatcgtgctgctagagataccgagtctcttaacgcttcctacgaacgttttctacgtactgggcaaattcaatcctttggtggtggacatgctggagaacctattaggcctgctgtgggtggcaatgctgcctacccagttgatgatcgttcaatgatggctgctagggacatcttccgaccatttgttggctttcgtgaggttagacttgtaaacaaagaaccgaaacatcctggtggtgaccctattgtcctttgttttgttgattttgcggaacctacacaatctgctattgcattggatgctttgcaaggctataagtttgacgagcatgatcgcaattcacccaatctgcggctgcagtttgctcgtttcgcaggtccaaaggggaattcaggacctggtggtcgtggtaggcgataagttattggcgttcctttttgccaggtgattcacg

SEQ ID NO: 82627 - DNA, 656 bp, Zea Mays
cactccgaagcgctcgtcgcaaaagctgtggcactgccgcactggcacagtggcacgcgattcctttccttccgcgtccgcgtccttctcggctgtctgtgcagttgtgctcgcttgctccccacgcccacgtcattccccgtccgctgcggctcacctccagcctcacggtcccgcgaccgctatggccgacgcgtactggaggtacgcggccgctgccccgcgccagcagcagcagcagcagcagccgccgccctccgccggcgggggcgtcgcgcaccccggcatgggcggcggcgcaccgcagatggcccccgccggggggcagcagcagcccatgaagcggccccgccccaccgaattctcagacatcttccgaccatttgttggctttcgtgaggttagacttgtaaacaaagaaccgaaacatcctggtggtgaccctattgtcctttgttttgttgattttgcggaacctacacaatctgctattgcattggatgctttgcaaggctataagtttgacgagcatgatcgcaattcacccaatctgcggctgcagtttgctcgtttcgcaggtccaaaggggaattcaggacctggtggtcgtggtaggcgataagttattggcgttcctttttgccaggtgattcacg

SEQ ID NO: 82628 - DNA, 544 bp, Zea Mays
atgtcgagcggtaagaagatgtcagtggtcgtcatcatgttcatggccgcgctgctgctgctgctgctggcaactgtggagtcgtcgtcgtcgtacgcggccgctgccccgcgccagcagcagcagcagcagcagccgccgccctccgccggcgggggcgtcgcgcaccccggcatgggcggcggcgcaccgcagatggcccccgccggggggcagcagcagcccatgaagcggccccgccccaccgaattctcagacatcttccgaccatttgttggctttcgtgaggttagacttgtaaacaaagaaccgaaacatcctggtggtgaccctattgtcctttgttttgttgattttgcggaacctacacaatctgctattgcattggatgctttgcaaggctataagtttgacgagcatgatcgcaattcacccaatctgcggctgcagtttgctcgtttcgcaggtccaaaggggaattcaggacctggtggtcgtggtaggcgataagttattggcgttcctttttgccaggtgattcacg

SEQ ID NO: 82629 - DNA, 4767 bp, Zea Mays
ggagcacttgtgaagttggtattctgtgtgtgtggtgcagaagctcagagaaacaaggttagtgtttccctcaaggtcttctttcagaagtttttcaattatgatgttgcctatcacaggttagacagagaaactaaaatcaattaagaacctaaacagctcattttgtttgtccttcggaacaatgggcttatttagaatcatgtggacattaccttccagattatcggcggtgtgcatatatagcaagggagatggcccaacaggcagtttttgcggtgctggagcggggtggtagcattgcagttgatgaggccgtatacttgttgggcgtctctgaaaagctggaatcagccaagaagcaactcctactcatgcaagcctttctcatggacctggatgaaaagatgctgaagggtaacttcatggctaggcatctagcttccgaggttcgggagatcgcatatgaggtggaggacatcattgacaccgccaacatcttgatgaggagaaacggccccaagacatcagtcagaggggccatgtccaaatatgcttgcttccccatatacctcactcgtctccacaagctgggatcaaggatagattcaactgaagaaaggatgaaaaaacttttcggcgactttgagaaattcaacatcgctgctaatgcaattgcagaagaaccacggcgttacatcaccgaggatgatgacattcggcataggcgattggttcatcccaactcgggtgatcaagttggtgtcattgggtttgatgagcagattaaacagatcgagtatgacttgctagacacaaagaacaggcacctaaccgttgtttccattgtaggtcccggtggggcaggcaaatcaacaatggctaagaaggtgtatagtttgcctgcagtgaagggacactttaaagttcattgttggttaactgtgtcccaacgagctgttgcaactcatgattttttgaaagaggtggttaagatggttgtgccttctcacctcatgaaagttatggagcatgaggtgaaaaagctgcttcacgagtttgcactgagtcaaaggtatttgatagtgttggatgatatatggagcaaagatgcctgggatgctatcaagcatgccttccctaatcagaagaatggcagcagaatcattctgaccacacgcaatgtggatgttgcaaagcttcccggtgcaaggaagaaaatctacaggccaaagctcctgaatgaagatgaaagcacccagttgcttcttaccacggccctcccagagtacatcttggatggcgggcaaaacttggacgagttgaaggagctgggcaaagagcttgcaataaaatgtggtggcctgcctcttgctttgattgttttggggggatacctgtcaaggaatcttgatgttggcgagtggaagaggttgttaacaaacagtatggattggcatgatttgatcacctccgatagggtcattggtgccatactggatcttagttactatgacatgccgagtcatctgagatcatgcttcatgtacaccacggccttccctgaagactctcctattgatgtgcgagttctggcaatgctatggattgctgagggtttcatcccgctggtccgaggccagacccgcgaaaaagtagccttaaagtatgtggctgagctagtgcagcggtgcatgatccaagcggagggatggacgaactctgggatgatcaaggtggtcaaggtgcatgacatcctgcgcgagtgggggtttggacgagctcagagagaagggtttatgaaagattgccattctgcggaggatatcgaggtggcctactcgggggaggagatgatgaaagcttaccgagtggtgctccacagctcactgtcactggaaaggggagttggaaccaccacgagaaagcttcgcactctattagacttcaacaaccacacatcagtacaggtgccaaaatcgttccagggtttacgcgtgcttcacctgaactgttctggcgaggtttctctgccaaaggatattcaccagatgaggtatttgagatatcttggcttgggaggcaactgctcctatgatctcccttccaacattggaggcctcttaagcctcgaaacactgtactgcacagcaagtatagaccacatcccagcatcattgtggcggaacaggacactgaggcaagtgcatatcccctatgctagaagcttatcatcaccacagatcggttcacagtcatcaaaggttcttgttatactagtagattgtgggagcagtacccatatggacgatgctaagcggattgtggagaaaactagaaggcaagtgctgaggaacaagaacctggatctctcgttctgcttgggggtggagtatgggaaatatggcatggaagtcatagggagatgcaatacgggggtccagttccccatcgacctcctcaattttgatgagacgcatgattactgggaactgaagatttgctgcgccaatctactcagcaatgatcacaagatcctggagcttgggaggataaaaaacctcaaggtgctagagataggcgagcagtcatatactggcaaggtgatggttttcccgtcaggcagcttcatgacacttgaacgactggtgctctacgatcttgcagtggagaaatggaaaattgagtgtggatccatgatatgtctcagggtgttgacgctttgcaagtgccccaaactggtccacctgcctgaagagttgttaaggcttccgaaactacgcagtctggctcttatcgcaatgcctctgggttgctaccagaaaggtgaggttcctcagggggtgaagatttcagagtcagatgatgagaaagttttccagcatcttcctatttggcggtaaatcccttcctgaacttgtttgaaaaaacagaataatcgtaatgattgtagtgcctctatactcgtgattttggcacatccatgtattagtgactttctattttgttgcttctatttcttgcgtaggtggctccacctgtctgccccgcccgcatttgatgaatactagaaaacttggccacgacactactaaaggttccacaacactgacatgtatctttgcaactgctgtgatgtgtgcttttcaaaagaactatggtctgtaaagatatatgggtattatacctgtgggctgtaaatatgtgacgccttgtttagatgaataagtagacacttcagagttgaaatatatgggtagaccaagcacaaacttgtgtcatagttaataacaccacgtctacaaaaatgatacatatatgcataatcagtcaactcggtatgcataaaatatatgtctgttttctttaaaagatgtgtaatatatatgtataaaaatgatgcatgtattagagtaaataggaatagtaccacattgcctaccaacatggatgctagttttatatattctacataatcagccatgagacccaatgcaatacatcaacacttccaccaattctatgcttcctacaatcacacaacttgtacagagcatcatgtcatcaaaatctcaatggggggaggggcacattgatgagcaacagaataaaagtttcttatggaacatcatcttgtcaatggtaataattagaaaacatggatgttaataattagaaaacatccactaataattagaaaacatgaatgtcaccacttgacgccagttagaatcagtgtacctcttttgaccagtcactttatccaactctttgccataggtagtggagcaaagctttgacggagggagcgacgacgaaggtgagctgcatgtctcatggagcacgaaacggaacaaaccaattgccaccaattgtttgctagaagcaatttggccgtggaaattccataagcaaaagaagtggcacacaattaggacatggggtatgaaatccattggcaaaaactaaatagaatcagcacactgaaatccacggaacacaatttctagcacatttttctcatgtcctcctgccaacttgcgtagactggatattaaattaaccaacgtcgggtgtatacacgaaaataaattaactccgaccgacgagcacctgcaaaacccggcgaacgtcttgccttggggattagaatctcctccaccatgtcaaacgtcttaccttggggattagaatctcctccaccatgtcattctctttcctggcatcctcttcgtgagaggccaaaaccttgacccgaggaagcaacgtcggtccgccaaaggcctgcaaccaggcatcagcaccagtcgcgacaagcatggatgctcgtcttggcctggcgaaacatccacccacggcgtgggagccagtgtaagccgacgcgagaacgtaatgggctcatcttaggcggtccgcatcggagccgctcctacctgcctctatcaccaacctgtgtaaatatagcattccaaaaattgttccttctgacttatcctataaacatatctttatgcaccaaataatcagcttaaatgcaaattgttggtctaaaaattcatggctgacccataatcactctataacctatatccagtatactacaacgtcatattatttcaactcattgagccatccgagtcgggtaccattcatgcaagaaaaaggaagcatggaatggaagaagggagcacggtaaaaaactgcaagcacatttctctcgggaatttcgataaagacctcgcccacgtgtgtgttgctggaagcccc

SEQ ID NO: 82630 - DNA, 2747 bp, Zea Mays
ccccattaacaaagcacccatcccttcaacaaacctcgagtcgagagagagaagagagcagacaacaagagacaccaacgaacagaggcaaaccggctcacgcctgtctcggtgcggtggccggctaatcatggccaccgtggggcagtccggggccctgagaagggtcaccgtgcactacgccagctcgcccacgcgcggcgcggtggtagaggtgagcctcgacgacctcgacgacgagctgctccagtttgtgctcgccgatcttcttcccggccaggagggtttacaccagtcgatcttggaaggagcacacggcagcaaccaggagaactatatgagaggcgcaggatccagtgcgccgtcacaggaataccatgcacagagcagcaccgctgctgcggcagcagctgcttcgtccaggaggaatccaggcacggatgacgcccagatcgcctcggacttcgagtacgccacgaagctgcagcaggagatggagggcctcagcgtcgacgacgacggcgacggtatcagctgcgtgccgtctccgtctgactctgacgacgggcacgaccatcaaaacgaagaggacgaggaggaggaggatggtaatggtggtggtgatgatgatgatgatccagacaacatgacttatgagcaaagacaggcacttgtagagtctgtggggtctgaggacagaggcttatccgacgagctcatctcctacctgcagccatggaagtacaaggcatcagggtttttctcccggaaaacaaaccatgacgagtaagtagtagtaggtgtatgcctgcccggttttttttcccagtttacattattacaagcttgatctttaactttaagtacagcatgtgaaatatacaaatataatcggaccataaatatcgattcatatgcgcaatcacaacatttttttccttctaatgttgacgacagatagtgaaatttccatggcatcactgatgatgtttctttggatgcagctgccctatctgcctgtcaactttcaggaaccgagagactatgataacgttgccgtgcatgcatcactaccacgcagcttgcgtcaccaaatggctcagggtcaacaagacatgccctgtatgcaaatatgaactgttcggaccttgctagcatccgacaatgggctgataagacaaggtgatggggcgtcacactcacacccagctggttgcatcatctacttttttttgcaccaagaaaaaagaaaatgaaaaacaatccaaaaagagaagggaaaaaagttaggaagtgtagatcttgatcacacaagaaaaagaagaaaaaaaactgaaatttatgtcttttttatctttcctttggcttgtggaaatgtacgtaagtcacggtcttatatttgtttagaagcttgtttttttttcttctcttgccatgactatgtgtatctgttgtcgtgtgatgcattatgcaaaccagaatctcctagtggaatcgctagaaaccgtgcaaaacaccagacggtgccagataacaggagattataactgacacccactatagcatgatggaaaacgatgtacatgacaaagaggctgtttgtgaccttgcgatgatcacatcatttgattcagcaacatgccatacacacgctaactatcagccaaatccaatccaacccactatctcaactcacacacatctggagcgacgccagtgtatgatatgatcatcatcggaaaactgtcaatacataaagctctacagaaagagaagggtggcggcggcaaaagcacttgccagcaccaatcaggcttaggcttatatctcattgcttggctttaccacagtagcgtactaccacccgtgtcctgcaccgaacagcccgctctccaccagttcgttagcgatcatgtcgtcgaggtcctccagttgatggaaggagtcatcgaccttcgagctcacggcattgccagcagcagctggactgctgctcaccgacttgaagctgctgtttctggccgaagccatgctggctgtgctattgttgatgacattgctagggccagtaccagcagcaccctttaccgtgccgttatggttagagctactgttattgacatgctgcccctgctccccagtagcagcaatgacgttgggggtagcaactcctggcgcgagacccccgccgctcgcattcggcggtggtgcatccagaggcggttgctgcgctttcgagcggttgttactgttcttaacttcctgcagaagctggttgaggacatgctgctggtactgcgggttgacaccaaagccatggaaactgttttgctgctgctgctgaaacgacgacgacggtgggtggtgctggaattgaacttggttaggtcccaggaaggacctggccgcttccagctgcatgccgttgtgcattgctgtaggacctttgaagacactcgacgcctcctgctgcagcgaaatcgtactggcacctgagcttctgagcatgttctggtaggtgtttagaggtgcggcaatcggtagattgttgttgccaatggctccggcaccaggagtctggttgttcgcagaagtgcttgtctcttgtttgacccccatcaatttggtgttgctctggttgttggcaaggttagcggcagccatggcctgtctcgaatcatgcatattctcaaactttgccgtggttttagaataactgttcaggctctctgcatatgaacagagaa

SEQ ID NO: 82631 - DNA, 2277 bp, Zea Mays
gatgacatgtattgtctagctcaaccccagatctaggggccacgtcagccctcactcgccagcgccgcagttaactcgacgtcacgggctatagcattgcacaaaggcactccagctgcatcgacgaggaccgccgtagcgatttgcgaagcaagggacgggagaggaacccgaggaaggcgaaaatgatctaccgcaactggtcgctgctctcgtccacagtcgtcatttggggcggcgtcgccaccgccggcctcgccggtatcttcctcttgggcggcaaggagaaattcaatggttatctgtgccgcgaaggcgagaggcttaggcagcaggacagagccgcgatgggccgaagctaagcgttagcttctttggtatctcaagggagcaatagcccttcgaaatttcacaagattcctgcgtccctaccagaacaagtccctatctagggactaggatggaatccatccttctgcaggctttcactttcctgataataacagtaacaataaattgacaatggtttgtgttcttctgcaacctttttggctccctggtttcgcaagggttccgtgctttgtttggcgtcatcacttgcatgtcttgtataaaaaggttgctgttgcatttggcgtacgggactaaaaaaaatatctgggtcctgtctttgacacgtggccgacgattttgccacatattgtacctacccatgatgttcagtgttgcttacgcgcgaaatgtgcagcagcaaggagtcagtgttgctacaaaaaaagaaaatgaaaaacaatccaaaaagagaagggaaaaaagttaggaagtgtagatcttgatcacacaagaaaaagaagaaaaaaaactgaaatttatgtcttttttatctttcctttggcttgtggaaatgtacgtaagtcacggtcttatatttgtttagaagcttgtttttttttcttctcttgccatgactatgtgtatctgttgtcgtgtgatgcattatgcaaaccagaatctcctagtggaatcgctagaaaccgtgcaaaacaccagacggtgccagataacaggagattataactgacacccactatagcatgatggaaaacgatgtacatgacaaagaggctgtttgtgaccttgcgatgatcacatcatttgattcagcaacatgccatacacacgctaactatcagccaaatccaatccaacccactatctcaactcacacacatctggagcgacgccagtgtatgatatgatcatcatcggaaaactgtcaatacataaagctctacagaaagagaagggtggcggcggcaaaagcacttgccagcaccaatcaggcttaggcttatatctcattgcttggctttaccacagtagcgtactaccacccgtgtcctgcaccgaacagcccgctctccaccagttcgttagcgatcatgtcgtcgaggtcctccagttgatggaaggagtcatcgaccttcgagctcacggcattgccagcagcagctggactgctgctcaccgacttgaagctgctgtttctggccgaagccatgctggctgtgctattgttgatgacattgctagggccagtaccagcagcaccctttaccgtgccgttatggttagagctactgttattgacatgctgcccctgctccccagtagcagcaatgacgttgggggtagcaactcctggcgcgagacccccgccgctcgcattcggcggtggtgcatccagaggcggttgctgcgctttcgagcggttgttactgttcttaacttcctgcagaagctggttgaggacatgctgctggtactgcgggttgacaccaaagccatggaaactgttttgctgctgctgctgaaacgacgacgacggtgggtggtgctggaattgaacttggttaggtcccaggaaggacctggccgcttccagctgcatgccgttgtgcattgctgtaggacctttgaagacactcgacgcctcctgctgcagcgaaatcgtactggcacctgagcttctgagcatgttctggtaggtgtttagaggtgcggcaatcggtagattgttgttgccaatggctccggcaccaggagtctggttgttcgcagaagtgcttgtctcttgtttgacccccatcaatttggtgttgctctggttgttggcaaggttagcggcagccatggcctgtctcgaatcatgcatattctcaaactttgccgtggttttagaataactgttcaggctctctgcatatgaacagagaa

SEQ ID NO: 82632 - DNA, 2716 bp, Zea Mays
catgatgacagcagggacgagaggcggggcccatcggcagaacccctctgacggcgacgatggaggaagccaagcggctgcacgcgcgcctgctccgccgtggggagcgccgcctgcagccgctactcctgcgcgtgctggcggcgggggaactgcgctacgccgcgcgccttctcggctcctgccccgcgtctccgccctccgcgccgctccacaaccgcctgctccacgcgctggccgccgcgcgccacccgctgctgctcccttgcttcgcgcgcgcgcaccgcctccgcgtcctcaccccgctctccttcacgcttctcctctcctccgccaccgccacggccgccgcgtgcgcgcacgctttgctggccaagtccggccacgccgcggcggcgcccggcgacccgttcctcgcgtccgcgctcgtctcctcctacgccagggcggggctgctggcggagtcccgcagggcgttcgacgagctgcctgccggggccggggccggggccgcggccgcgcgcaacgcgatgctgtcggcgtacgcgcgaggcgggcgcgtgggcgacgcggagcggctgttcgcgggaatgcccgaccggagcgtggtgtcgtggaccgcgatggtgtcgggctacgcgcagaacgggaggcacgaggaggcggtgcgcacgttcctggacatgtgggacggggccggggtgcggcccaacgagctcaccgtcagcagcgtcctgcccgcgtgcgctgcgctcggggccctcgcgctggggaggaaggtggagcgctacgccagggggagagggatgctcaggaacgtctatgtcgccaacgccttggtcgagatgtacgccaagtgcggcagcatccgccgggcttggaaggtgtttcggggcatggggacgcggagggatctttgttcttggaactccatgatcatggcgtttgccgtgcatggcctctggacggaggcgctggccttgtttcataaactgaggatgacaggggcaaaaccagatggcattacatttgttggagtcattttggcctgtactcatggaggcttggtggatgaaggcaagctgctcttcaactcgatgagaggggagttcggtcttaagccaagaatcgagcactatggttgcatggttgacctgctggggcgtgctggcctgttaaaagaagctgacagtctgatcgcgagcatgccaatggagcctgacgccgtaatttggggagccctgcttggagcctgcagcttccatggcaactttgaactagcggaaatagcagtggaaaaactaatgcacctggagccacacaatacagctaacctagtgattctttcgaatatatacgcgtcatgtggcaaatgggacggtgttgcccgggtgtggaagctgctaaaggaaaaagatcacaagaaatctgctgggtacagctttattgagttagatggtaggatgcacaagttcctggttgaagataaatcgcatccaagatctgagaaggtatatgacgccctggatagcatcacgctggccatgaagcttgtcagcttggaaaatcctgaagtggaaagctgattttaacgtcaccatcttctatcccttttatttatgggagaagaaactgagaaaaccatttgagattggtcatggacttcttgctcagatcctccatatcaagtgaatgcaccacctgaatatcaatggatttttcctctactacgaaatggtcatttctcttgttcttacaatgaataattcagaggtgcaagtgcaccagacagatagaagcatatcattgcatgacatacccaaagcagatcatcatggaagacactagaggaactttcagactgtggggttatgcatgagattggttggaactatgacgcaggaatgaccggggttgtataccatattctcatggttgccttcacttggcagccgtggtttggagcgcaccctcatattgggtgcagccttggaagcaaggcaaacatgccccccgtccgcctttgcagtatatgttttggcatgcttcattggatttaccgtgttccttagttttcttttatatatatagctgcggctcatatgttgaacaagtttacagcttttatctgagcacttcatttgtgcactatggatcagtctggattctatcaaacttggaaatgactgctgcttcttaaggtgtgaacgcaccggcacaaacaagcagaaagatctgctcagactggacacttccagaaggacactggtcaacgttcagaaattgccatgtgattgtggaagaaaagaacaatttcaccgggtcagtttcactttaggagcataaccataacgttagatgcttgacgatgacttgtaaatgctgacgaaatgaacatgacgcagcatcttccttctacttttgtcgctgtttctcttgttgaaataaccggggtaatggtcttgtttcttgtccttttgcattttaaaagctgggtgatcctggaagttagtgctctggatgcttggtggcgctatacatgtccaaatgggttgggcttgccgagcggcccgaaacccgacacgggtttggtctggcctgaacccggcacaacacgtagtgaaccaggcccgtgtcgacccagcccggtcatcgagctgtgtctgggccaaaggcgtggcacggcgggctagacacggcacgacccggttttatt

SEQ ID NO: 82633 - DNA, 1914 bp, Zea Mays
taagactcagatctcggtgcgattaatccatgatgacagcagggacgagaggcggggcccatcggcagaacccctctgacggcgacgatggaggaagccaagcggctgcacgcgcgcctgctccgccgtggggagcgccgcctgcagccgctactcctgcgcgtgctggcggcgggggaactgcgctacgccgcgcgccttctcggctcctgccccgcgtctccgccctccgcgccgctccacaaccgcctgctccacgcgctggccgccgcgcgccacccgctgctgctcccttgcttcgcgcgcgcgcaccgcctccgcgtcctcaccccgctctccttcacgcttctcctctcctccgccaccgccacggccgccgcgtgcgcgcacgctttgctggccaagtccggccacgccgcggcggcgcccggcgacccgttcctcgcgtccgcgctcgtctcctcctacgccagggcggggctgctggcggagtcccgcagggcgttcgacgagctgcctgccggggccggggccggggccgcggccgcgcgcaacgcgatgctgtcggcgtacgcgcgaggcgggcgcgtgggcgacgcggagcggctgttcgcgggaatgcccgaccggagcgtggtgtcgtggaccgcgatggtgtcgggctacgcgcagaacgggaggcacgaggaggcggtgcgcacgttcctggacatgtgggacggggccggggtgcggcccaacgagctcaccgtcagcagcgtcctgcccgcgtgcgctgcgctcggggccctcgcgctggggaggaaggtggagcgctacgccagggggagagggatgctcaggaacgtctatgtcgccaacgccttggtcgagatgtacgccaagtgcggcagcatccgccgggcttggaaggtgtttcggggcatggggacgcggagggatctttgttcttggaactccatgatcatggcgtttgccgtgcatggcctctggacggaggcgctggccttgtttcataaactgaggatcatcatggaagacactagaggaactttcagactgtggggttatgcatgagattggttggaactatgacgcaggaatgaccggggttgtataccatattctcatggttgccttcacttggcagccgtggtttggagcgcaccctcatattgggtgcagccttggaagcaaggcaaacatgccccccgtccgcctttgcagtatatgttttggcatgcttcattggatttaccgtgttccttagttttcttttatatatatagctgcggctcatatgttgaacaagtttacagcttttatctgagcacttcatttgtgcactatggatcagtctggattctatcaaacttggaaatgactgctgcttcttaaggtgtgaacgcaccggcacaaacaagcagaaagatctgctcagactggacacttccagaaggacactggtcaacgttcagaaattgccatgtgattgtggaagaaaagaacaatttcaccgggtcagtttcactttaggagcataaccataacgttagatgcttgacgatgacttgtaaatgctgacgaaatgaacatgacgcagcatcttccttctacttttgtcgctgtttctcttgttgaaataaccggggtaatggtcttgtttcttgtccttttgcattttaaaagctgggtgatcctggaagttagtgctctggatgcttggtggcgctatacatgtccaaatgggttgggcttgccgagcggcccgaaacccgacacgggtttggtctggcctgaacccggcacaacacgtagtgaaccaggcccgtgtcgacccagcccggtcatcgagctgtgtctgggccaaaggcgtggcacggcgggctagacacggcacgacccggttttatt

SEQ ID NO: 82634 - DNA, 2798 bp, Zea Mays
tagacaaggcccaggcccaggacgccagaatggagtcgtacaacacgctcggcccatgggctaagactcagatctcggtgcgattaatccatgatgacagcagggacgagaggcggggcccatcggcagaacccctctgacggcgacgatggaggaagccaagcggctgcacgcgcgcctgctccgccgtggggagcgccgcctgcagccgctactcctgcgcgtgctggcggcgggggaactgcgctacgccgcgcgccttctcggctcctgccccgcgtctccgccctccgcgccgctccacaaccgcctgctccacgcgctggccgccgcgcgccacccgctgctgctcccttgcttcgcgcgcgcgcaccgcctccgcgtcctcaccccgctctccttcacgcttctcctctcctccgccaccgccacggccgccgcgtgcgcgcacgctttgctggccaagtccggccacgccgcggcggcgcccggcgacccgttcctcgcgtccgcgctcgtctcctcctacgccagggcggggctgctggcggagtcccgcagggcgttcgacgagctgcctgccggggccggggccggggccgcggccgcgcgcaacgcgatgctgtcggcgtacgcgcgaggcgggcgcgtgggcgacgcggagcggctgttcgcgggaatgcccgaccggagcgtggtgtcgtggaccgcgatggtgtcgggctacgcgcagaacgggaggcacgaggaggcggtgcgcacgttcctggacatgtgggacggggccggggtgcggcccaacgagctcaccgtcagcagcgtcctgcccgcgtgcgctgcgctcggggccctcgcgctggggaggaaggtggagcgctacgccagggggagagggatgctcaggaacgtctatgtcgccaacgccttggtcgagatgtacgccaagtgcggcagcatccgccgggcttggaaggtgtttcggggcatggggacgcggagggatctttgttcttggaactccatgatcatggcgtttgccgtgcatggcctctggacggaggcgctggccttgtttcataaactgagggggcaaaaccagatggcattacatttgttggagtcattttggcctgtactcatggaggcttggtggatgaaggcaagctgctcttcaactcgatgagaggggagttcggtcttaagccaagaatcgagcactatggttgcatggttgacctgctggggcgtgctggcctgttaaaagaagctgacagtctgatcgcgagcatgccaatggagcctgacgccgtaatttggggagccctgcttggagcctgcagcttccatggcaactttgaactagcggaaatagcagtggaaaaactaatgcacctggagccacacaatacagctaacctagtgattctttcgaatatatacgcgtcatgtggcaaatgggacggtgttgcccgggtgtggaagctgctaaaggaaaaagatcacaagaaatctgctgggtacagctttattgagttagatggtaggatgcacaagttcctggttgaagataaatcgcatccaagatctgagaaggtatatgacgccctggatagcatcacgctggccatgaagcttgtcagcttggaaaatcctgaagtggaaagctgattttaacgtcaccatcttctatcccttttatttatgggagaagaaactgagaaaaccatttgagattggtcatggacttcttgctcagatcctccatatcaagtgaatgcaccacctgaatatcaatggatttttcctctactacgaaatggtcatttctcttgttcttacaatgaataattcagaggtgcaagtgcaccagacagatagaagcatatcattgcatgacatacccaaagcagatcatcatggaagacactagaggaactttcagactgtggggttatgcatgagattggttggaactatgacgcaggaatgaccggggttgtataccatattctcatggttgccttcacttggcagccgtggtttggagcgcaccctcatattgggtgcagccttggaagcaaggcaaacatgccccccgtccgcctttgcagtatatgttttggcatgcttcattggatttaccgtgttccttagttttcttttatatatatagctgcggctcatatgttgaacaagtttacagcttttatctgagcacttcatttgtgcactatggatcagtctggattctatcaaacttggaaatgactgctgcttcttaaggtgtgaacgcaccggcacaaacaagcagaaagatctgctcagactggacacttccagaaggacactggtcaacgttcagaaattgccatgtgattgtggaagaaaagaacaatttcaccgggtcagtttcactttaggagcataaccataacgttagatgcttgacgatgacttgtaaatgctgacgaaatgaacatgacgcagcatcttccttctacttttgtcgctgtttctcttgttgaaataaccggggtaatggtcttgtttcttgtccttttgcattttaaaagctgggtgatcctggaagttagtgctctggatgcttggtggcgctatacatgtccaaatgggttgggcttgccgagcggcccgaaacccgacacgggtttggtctggcctgaacccggcacaacacgtagtgaaccaggcccgtgtcgacccagcccggtcatcgagctgtgtctgggccaaaggcgtggcacggcgggctagacacggcacgacccggttttatt

SEQ ID NO: 82635 - DNA, 1894 bp, Zea Mays
ccctgaccggcctggcccgacttcagtcgcccagcgacgctagggtttcactctcctcagtcgcagcggttcccactctcgtctccagaagaagcgccgcgatgggttccccgccgctgacgccgtaccgccgatgggccactccactgcactccagcagaagagcgaagtcccccaattgaagagtgggacaagaggcgagagggcacccgtccagatcattgccccaccagttgaggccgacgttctccaagcccaagcacaggtagatgagcacggccatgaacgccaggccagcgtcgagcgcgccagagagcaggtagttgtggcgctcccaccagtgacgccggtacctgtagaccacgtaccccgacaggaacccggcaatgatccacgtggtgtagttgacggcggtggccggcggcatcatgccggtggagccgatgagcacgggcatgttgacgagcaggatccagctctggctcgggaacacccggtgcgcgagccacacgaggaggggcgcgacggcgccgcccaggaagaaccagttgaccgccgagtaggtgccgaggtcgccgaagatcctgcgcgggccgatgaggccccagatgacggacgcgtcgtagaacacgtggtccatggggcacgtccaggggctgtcggcggggagcagctccgtgctgcagatgttggggacgctgtccatgagccaccacgccgtcccgatgtacacgagcgccgcgatcagcgtccccaccacctgcgccatgaacatggtcctcggcgggatcttcatgtagtggcccagcttgaagtcttgcaggaaggccagcgcctgcgtcatgctgatgtagccgtacaccttgaagcacatgttggcgacgggacggcccgggtacagtgctaatataagagatcgtcggggtgggtacctggttcgtcgtcgctgtgatgatccctatcgggagggtgaagaagaaggcgatggcgcaggcgagcaggacgccccaccagggcagctggagctgctcgatgtagtactcgcaggcgaatatggtgacggcgacgttggcgacgaggatgcagatgaaccaccactcggggacctgcctgtacctcctcatcagcctcgtgtgcacgtccaccttcttctcttggaacgctgacctgctcagctgccagatctcgctcccgtggaagaggaagacgtgcacaaccgtggcggtgagggacgcgaagccgaccccgtaggtgacggcgaagaaggtgctgaggtagagcgggccgttgcgctcgtatgcctcggtgtcgaaccggaagttggagtccacgatgctggagatgttgtacgtctgcccggcggcggtgaagagcccgtcggagaagatggggaagctgcgcgccccgtacaggccgagccagtagtacgcggcgggcgtgatgacgtacatgatgaggacgaagccggcggccacgttggcggtggcgaaccaggggctggcgagcgggcttccgaggtaggaggagatggtggaccagtcgagccccaccgcgcccacgcccagcccgctcagccccgaccccagctgctgcgccaccacggagcgcgggaacgcccagcagagccacgacagggaggtgagcatctggaacaggtagcccgggaagacgtagtaggcgaagctgcagacgaatgccaccaggaagaactggttccgcgtcatgcctcccttcacgcgccgctccttctcgtggagcgccctggtgatccagcacacacgtgcggagcggaggccagtgtgtttgtgtcaacttccttgtcaccactggagtttttagtggcaaaacaaaacaaataatgtacatccgtatgaatctgtaagaatcttgaata

SEQ ID NO: 82636 - DNA, 2025 bp, Zea Mays
ggcgagcccaaaacaattttgtggcctggctgaaaggaaacgcgagtttgttggttccctgaccggcctggcccgacttcagtcgcccagcgacgctagggtttcactctcctcagtcgcagcggttcccactctcgtctccagaagaagcgccgcgatgggttccccgccgctgacgccgtaccgccgatgggccactccactgcactccagcagaagcttgaggccaccacacagttcaggaagctgcgctccatagagcgaagtcccccaattgaagaggtgatcagcacaggagtcgtgccccgattctacggtgggacaagaggcgagagggcacccgtccagatcattgccccaccagttgaggccgacgttctccaagcccaagcacaggtagatgagcacggccatgaacgccaggccagcgtcgagcgcgccagagagcaggtagttgtggcgctcccaccagtgacgccggtacctgtagaccacgtaccccgacaggaacccggcaatgatccacgtggtgtagttgacggcggtggccggcggcatcatgccggtggagccgatgagcacgggcatgttgacgagcaggatccagctctggctcgggaacacccggtgcgcgagccacacgaggaggggcgcgacggcgccgcccaggaagaaccagttgaccgccgagtaggtgccgaggtcgccgaagatcctgcgcgggccgatgaggccccagatgacggacgcgtcgtagaacacgtggtccatggggcacgtccaggggctgtcggcggggagcagctccgtgctgcagatgttggggacgctgtccatgagccaccacgccgtcccgatgtacacgagcgccgcgatcagcgtccccaccacctgcgccatgaacatggtcctcggcgggatcttcatgtagtggcccagcttgaagtcttgcaggaaggccagcgcctgcgtcatgctgatgtagccgtacaccttgaagcacatgttggcgacgggacggcccgggtacagtgctaatataagagatcgtcggggtgggtacctggttcgtcgtcgctgtgatgatccctatcgggagggtgaagaagaaggcgatggcgcaggcgagcaggacgccccaccagggcagctggagctgctcgatgtagtactcgcaggcgaatatggtgacggcgacgttggcgacgaggatgcagatgaaccaccactcggggacctgcctgtacctcctcatcagcctcgtgtgcacgtccaccttcttctcttggaacgctgacctgctcagctgccagatctcgctcccgtggaagaggaagacgtgcacaaccgtggcggtgagggacgcgaagccgaccccgtaggtgacggcgaagaaggtgctgaggtagagcgggccgttgcgctcgtatgcctcggtgtcgaaccggaagttggagtccacgatgctggagatgttgtacgtctgcccggcggcggtgaagagcccgtcggagaagatggggaagctgcgcgccccgtacaggccgagccagtagtacgcggcgggcgtgatgacgtacatgatgaggacgaagccggcggccacgttggcggtggcgaaccaggggctggcgagcgggcttccgaggtaggaggagatggtggaccagtcgagccccaccgcgcccacgcccagcccgctcagccccgaccccagctgctgcgccaccacggagcgcgggaacgcccagcagagccacgacagggaggtgagcatctggaacaggtagcccgggaagacgtagtaggcgaagctgcagacgaatgccaccaggaagaactggttccgcgtcatgcctcccttcacgcgccgctccttctcgtggagcgccctggtgatccagcacacacgtgcggagcggaggccagtgtgtttgtgtcaacttccttgtcaccactggagtttttagtggcaaaacaaaacaaataatgtacatccgtatgaatctgtaagaatcttgaata

SEQ ID NO: 82637 - DNA, 2036 bp, Zea Mays
gtatgaatatgtttggttgcctggcccagtccgggagcctggctgaggcgagcccaaaacaattttgtggcctggctgaaaggaaacgcgagtttgttggttccctgaccggcctggcccgacttcagtcgcccagcgacgctagggtttcactctcctcagtcgcagcggttcccactctcgtctccagaagaagcgccgcgatgggttccccgccgctgacgccgtaccgccgatgggccactccactgcactccagcagaagcttgaggccaccacacagttcaggaagctgcgctccatagagcgaagtcccccaattgaagagtgggacaagaggcgagagggcacccgtccagatcattgccccaccagttgaggccgacgttctccaagcccaagcacaggtagatgagcacggccatgaacgccaggccagcgtcgagcgcgccagagagcaggtagttgtggcgctcccaccagtgacgccggtacctgtagaccacgtaccccgacaggaacccggcaatgatccacgtggtgtagttgacggcggtggccggcggcatcatgccggtggagccgatgagcacgggcatgttgacgagcaggatccagctctggctcgggaacacccggtgcgcgagccacacgaggaggggcgcgacggcgccgcccaggaagaaccagttgaccgccgagtaggtgccgaggtcgccgaagatcctgcgcgggccgatgaggccccagatgacggacgcgtcgtagaacacgtggtccatggggcacgtccaggggctgtcggcggggagcagctccgtgctgcagatgttggggacgctgtccatgagccaccacgccgtcccgatgtacacgagcgccgcgatcagcgtccccaccacctgcgccatgaacatggtcctcggcgggatcttcatgtagtggcccagcttgaagtcttgcaggaaggccagcgcctgcgtcatgctgatgtagccgtacaccttgaagcacatgttggcgacgggacggcccgggtacagtgctaatataagagatcgtcggggtgggtacctggttcgtcgtcgctgtgatgatccctatcgggagggtgaagaagaaggcgatggcgcaggcgagcaggacgccccaccagggcagctggagctgctcgatgtagtactcgcaggcgaatatggtgacggcgacgttggcgacgaggatgcagatgaaccaccactcggggacctgcctgtacctcctcatcagcctcgtgtgcacgtccaccttcttctcttggaacgctgacctgctcagctgccagatctcgctcccgtggaagaggaagacgtgcacaaccgtggcggtgagggacgcgaagccgaccccgtaggtgacggcgaagaaggtgctgaggtagagcgggccgttgcgctcgtatgcctcggtgtcgaaccggaagttggagtccacgatgctggagatgttgtacgtctgcccggcggcggtgaagagcccgtcggagaagatggggaagctgcgcgccccgtacaggccgagccagtagtacgcggcgggcgtgatgacgtacatgatgaggacgaagccggcggccacgttggcggtggcgaaccaggggctggcgagcgggcttccgaggtaggaggagatggtggaccagtcgagccccaccgcgcccacgcccagcccgctcagccccgaccccagctgctgcgccaccacggagcgcgggaacgcccagcagagccacgacagggaggtgagcatctggaacaggtagcccgggaagacgtagtaggcgaagctgcagacgaatgccaccaggaagaactggttccgcgtcatgcctcccttcacgcgccgctccttctcgtggagcgccctggtgatccagcacacacgtgcggagcggaggccagtgtgtttgtgtcaacttccttgtcaccactggagtttttagtggcaaaacaaaacaaataatgtacatccgtatgaatctgtaagaatcttgaata

SEQ ID NO: 82638 - DNA, 675 bp, Zea Mays
cccaaaacaattttgtggcctggctgaaaggaaacgcgagtttgttggttccctgaccggcctggcccgacttcagtcgcccagcgacgctagggtttcactctcctcagtcgcagcggttcccactctcgtctccagaagaagcgccgcgatgggttccccgccgctgacgccgtaccgccgatgggccactccactgcactccagcagaagcttgaggccaccacacagttcaggaagctgcgctccataggtgagagcgaagtcccccaattgaagaggtgatcagcacaggagtcgtgccccgattctacgggcatgtgatgattttatatttaactgttgcctttacttgcctatgatgatatgttttataatgatgatcaatcaagggagtatgacttgtagcagtcttttcagtgaatcaaggatgagtttctgtttaatgcgtacagtgagaatacattaacaattactagcagtcattcatagtcagtcaacataggccatctgctgctagtacctcttttcttctcatgagttgtagcaatttctgtttaattcatatgaatgtaattacaattatattttaagttgctactatagtttctgtttaattacaatcatagtttctgtttaatagtttctgtttaattaaaattcatatgattgtaa

SEQ ID NO: 82639 - DNA, 676 bp, Zea Mays
ggcgagcccaaaacaattttgtggcctggctgaaaggaaacgcgagtttgttggttccctgaccggcctggcccgacttcagtcgcccagcgacgctagggtttcactctcctcagtcgcagcggttcccactctcgtctccagaagaagcgccgcgatgggttccccgccgctgacgccgtaccgccgatgggccactccactgcactccagcagaagcttgaggccaccacacagttcaggaagctgcgctccatagagcgaagtcccccaattgaagaggtgatcagcacaggagtcgtgccccgattctacgggcatgtgatgattttatatttaactgttgcctttacttgcctatgatgatatgttttataatgatgatcaatcaagggagtatgacttgtagcagtcttttcagtgaatcaaggatgagtttctgtttaatgcgtacagtgagaatacattaacaattactagcagtcattcatagtcagtcaacataggccatctgctgctagtacctcttttcttctcatgagttgtagcaatttctgtttaattcatatgaatgtaattacaattatattttaagttgctactatagtttctgtttaattacaatcatagtttctgtttaatagtttctgtttaattaaaattcatatgattgtaa

SEQ ID NO: 82640 - DNA, 513 bp, Zea Mays
ccctgaccggcctggcccgacttcagtcgcccagcgacgctagggtttcactctcctcagtcgcagcggttcccactctcgtctccagaagaagcgccgcgatgggttccccgccgctgacgccgtaccgccgatgggccactccactgcactccagcagaagcttgaggccaccacacagttcaggaagctgcgctccataggtgaggttcggatcttatgtacagttaccttttccggatggacagtttggtggtgagatttgcgcaatttgttgagtagtattaggccatgcgtgagggcatggtcatttgtgggttttcaggtaactctcgtgtacatgttgacttgtggattgcgagctggcaaaattagttgttgcacctctaattttctgaatttaccgtatcctcaaagaaacaaaccctacccttcagcctctgcaacgtgcatacatgtatgccctgaagtttgaaaacaagctatgctccctaagcatttgatttcatgaac

SEQ ID NO: 82641 - DNA, 273 bp, Zea Mays
atggtgatgaggagatcccccgtgccaccaggagttgtacaccgcaacgcgtcatcatctctggccgccagcagcgcagccgcggtgctgcgctccgccttgaggagggagaagcaggcagccactggctacactaacaccgtatactgggccattggcctcctgaggttggaagtgtcaggactcagcttatgggccatcatcgagaccgactcggatggcctacatgtcaaatatgcaacaacaaagccatttagtctaatgttagagtag

SEQ ID NO: 82642 - DNA, 936 bp, Zea Mays
acttgactcttcaaccaaacactacctaaaaaataaggccccgttcaattgttccggattggagccccggactaatttctaaccggattatttttttaatttatatagattttgatgagctgaaatgaatcatggcttattctggtagaaccgaacgagccctaagctggatctaaaacatgtcctaaatttgctctaaaaagtaagctggatcaaacaggaacctcgtccatcacgcagcttttaaacatactccgtttccgaatccgttccaccattgcctattgccccaccctccccgctagggttttgccagcatggccgccgccgccgcccggaggcgaagaagaagatctacaacgtctcgtgcgagcgctacttcgggtttgggtgcgagatcgatgaggagacatctaacaagctcgaggggctccctggtgttctctttgtgctcccggattcgtatgttgatgctgaatacaaggactacggagctgaactcttcgtcaacggtgagattgttcagaggactcccgagaggcagaggagggtggagcccgtgccgcagagggcagcagacaggccgaggtacaatgacagaacccgctacgcacgcaggagggagaaccagcgatgaactgtgcgataaaatcataaaaaagaccacagcaacaagtcccaggtggtttcagctctggaattcaaggatcacctagtatcacctgtattaaattggcaatctcactttacctgcagtctagagtatcgtttctatgtgctcagcttggacgtattgtattctgtaattacagctacttggagatttggaaggacctggcttgcaacgtagtataatctctagtcttttttctttgtggcaatatataattgctatgaataccagattgagatggttgcatactgttcgcagctcaa

SEQ ID NO: 82643 - DNA, 1580 bp, Zea Mays
caaagctttacttggcctggcatagatacttatagccacaacatggatagtatagagagagggtacaaaaggataatttgaaagatgggaggaagaaagcagccctaactcgaataggatccatttcatctgaacaagcagctgataatggagatcctacaaagaagcgcagggttgagcgctcacgcaaaatggcagaagcaaaggaaagaagttccacaccagtaataccatctgatatgcaagccgtacttaaacgctgtgaaaccctagagaaggaggtccgatcactaaaacttaacctgtctttcatgaacaggaaagattcagaacagaccaagcagatcgaggagcttcagaagcaaaacgaggatttggccgaagagaaggagcggctggtggaagagatcgaaaggattgtctctgaccccaacacatgaccgcccaatcatttctgacatttttttatatactaatagaattagacttgaaatggtcctagatacaaatacacatacacaatccagcagggggcagcaagaattaagtgctggcctaaatgtaccattctttccttgttttcacaagtgtaacgtatacgaatatcaacaagcaaagggatcagggattacagtttatttcctgcagcatgttggcctcatgggtatcaatcagaacatgcgtgtgatatgaatgtggagtatgtgtgttatgtgtatctagttgcaaccaataaaaacagaacatgacatgcgggtaatcgttatttcagtagtagatttgaacaaaactcagcagtcttaattagattgaaaatcgcaaagcgaagacacctacggtttttccctaaagaccatcttaaaaaaaggaaaagaagagactggaaaaaaaaacaatctccttggtccttgctgactccatcggtcactccaatgcgatgcgagcccatcaaccttttcgctcaccagcagccgctgctgcggccgcaatggccactcgttccagttctttggcgtcggccagccacggccgccgcctcaacgccgccgtatcttcaacgtcaccggcggcatccgacgaggtgccatcgaaggtgccgtcgaacggcgcctcgcagaaggccatcgtggccacgagcctatccaccggccgcttcttcgtcttcgcggctgcggccagcctcgccggggcctcggggacgttcgttgcgcaggcgcggcctccgacagcggcacctggcgacagagcccaggcgccgtcgaacggcgcctcgcagaaggccatcatggccgcgaccctctccatcggccacttggcggccagcaacgccaacctcgacggcgcagccttgggaacgttggatgaggatgggctgttcccggcggcaagcgacgacgcagccgaggtgcggtcgaacggtgcctcgctgaaggccaccatggcaatgaggctctccatctccatcgccgctacctcgagtctgttcgattggttttggtcggggatgagatgctggcggcaggcggcgtctatatatatatggacgcctcaatatcgatgtcgttcggagtccgacgcag

SEQ ID NO: 82644 - DNA, 2537 bp, Zea Mays
tggggatcactcacttctatcatttcggaaagtacatagtggatattctatccctggatttgggtcagtgaacaatcaccctcgacaaccatctaggttgtcatcagaagccgcaggccttccgaatcaacagcatgacattgctcaacaaagttttctcactgacaacttggttccacagaatttaacaattccttctgtcgaatatccaaataaccacaaccagcaatcactcaaaaatgcagcagagaagggaatgcaagccagtgacctacttctagcaaaacttttctcattttatccatttgtaggcctggttccacagcactcaaccaatgactagaagtcgttcgtcagagttaaggaggaggtatgctgcgatgcaaactaatatggcaccaataacaataggaagcattgaaacacctaaccaattaaaacaagattttacaaacacaacaaacatcacaccaatgagcaacacacttgttcatacaccaaagtttgtatctccttcaagttcatcaacatcccctctggataatccacatgtggcagcacaagatactgttacctcagtggtgagcatgctcaaggacacacttgagcgcaagaagcttggtagccatgctaacaaagacacctcagcaggcaattcttttggattctatgacactcagcagtttcaacaaaacattcttggaggaacagatttctttcccatagtgacaactgcccaagttcaggattccctgatgcttcccaaggttgacaggcccatggaaccaaacaatggtaacttcgttgctcctgcaaaccaggtttggttcagtgcagcttctcgagagccttcacacagtggatcgtctactgctatgactactcattcagctggatttgaaatgtgtgatgagctacctcctgcagcgcaagcgatgagtgtttgtgagagcaccagaaaaaatgctgcaaatggaacaaccgactgcaaatcaaaaggcaaagagtatagagagagggtacaaaaggataatttgaaagatgggaggaagaaagcagccctaactcgaataggatccatttcatctgaacaagcagctgataatggagatcctacaaagaagcgcagggttgagcgctcacgcaaaatggcagaagcaaaggaaagaagttccacaccagtaataccatctgatatgcaagccgtacttaaacgctgtgaaaccctagagaaggaggtccgatcactaaaacttaacctgtctttcatgaacaggaaagattcagaacagaccaagcagatcgaggagcttcagaagcaaaacgaggatttggccgaagagaaggagcggctggtggaagagatcgaaaggattgtctctgaccccaacacatgaccgcccaatcatttctgacatttttttatatactaatagaattagacttgaaatggtcctagatacaaatacacatacacaatccagcagggggcagcaagaattaagtgctggcctaaatgtaccattctttccttgttttcacaagtgtaacgtatacgaatatcaacaagcaaagggatcagggattacagtttatttcctgcagcatgttggcctcatgggtatcaatcagaacatgcgtgtgatatgaatgtggagtatgtgtgttatgtgtatctagttgcaaccaataaaaacagaacatgacatgcgggtaatcgttatttcagtagtagatttgaacaaaactcagcagtcttaattagattgaaaatcgcaaagcgaagacacctacggtttttccctaaagaccatcttaaaaaaaggaaaagaagagactggaaaaaaaaacaatctccttggtccttgctgactccatcggtcactccaatgcgatgcgagcccatcaaccttttcgctcaccagcagccgctgctgcggccgcaatggccactcgttccagttctttggcgtcggccagccacggccgccgcctcaacgccgccgtatcttcaacgtcaccggcggcatccgacgaggtgccatcgaaggtgccgtcgaacggcgcctcgcagaaggccatcgtggccacgagcctatccaccggccgcttcttcgtcttcgcggctgcggccagcctcgccggggcctcggggacgttcgttgcgcaggcgcggcctccgacagcggcacctggcgacagagcccaggcgccgtcgaacggcgcctcgcagaaggccatcatggccgcgaccctctccatcggccacttggcggccagcaacgccaacctcgacggcgcagccttgggaacgttggatgaggatgggctgttcccggcggcaagcgacgacgcagccgaggtgcggtcgaacggtgcctcgctgaaggccaccatggcaatgaggctctccatctccatcgccgctacctcgagtctgttcgattggttttggtcggggatgagatgctggcggcaggcggcgtctatatatatatggacgcctcaatatcgatgtcgttcggagtccgacgcag

SEQ ID NO: 82645 - DNA, 2332 bp, Zea Mays
cttttgctggggatcactcacttctatcatttcggaaagtacatagtggatattctatccctggatttgggtcagtgaacaatcaccctcgacaaccatctaggttgtcatcagaagccgcaggccttccgaatcaacagcatgacattgctcaacaaagttttctcactgacaacttggttccacagaatttaacaattccttctgtcgaatatccaaataaccacaaccagcaatcactcaaaaatgcagcagagaagggaatgcaagccagtgacctacttctagcaaaagcctggttccacagcactcaaccaatgactagaagtcgttcgtcagagttaaggtggcagcacaagatactgttacctcagtggtgagcatgctcaaggacacacttgagcgcaagaagcttggtagccatgctaacaaagacacctcagcaggcaattcttttggattctatgacactcagcagtttcaacaaaacattcttggaggaacagatttctttcccatagtgacaactgcccaagttcaggattccctgatgcttcccaaggttgacaggcccatggaaccaaacaatggtaacttcgttgctcctgcaaaccaggtttggttcagtgcagcttctcgagagccttcacacagtggatcgtctactgctatgactactcattcagctggatttgaaatgtgtgatgagctacctcctgcagcgcaagcgatgagtgtttgtgagagcaccagaaaaaatgctgcaaatggaacaaccgactgcaaatcaaaaggcaaagagtatagagagagggtacaaaaggataatttgaaagatgggaggaagaaagcagccctaactcgaataggatccatttcatctgaacaagcagctgataatggagatcctacaaagaagcgcagggttgagcgctcacgcaaaatggcagaagcaaaggaaagaagttccacaccagtaataccatctgatatgcaagccgtacttaaacgctgtgaaaccctagagaaggaggtccgatcactaaaacttaacctgtctttcatgaacaggaaagattcagaacagaccaagcagatcgaggagcttcagaagcaaaacgaggatttggccgaagagaaggagcggctggtggaagagatcgaaaggattgtctctgaccccaacacatgaccgcccaatcatttctgacatttttttatatactaatagaattagacttgaaatggtcctagatacaaatacacatacacaatccagcagggggcagcaagaattaagtgctggcctaaatgtaccattctttccttgttttcacaagtgtaacgtatacgaatatcaacaagcaaagggatcagggattacagtttatttcctgcagcatgttggcctcatgggtatcaatcagaacatgcgtgtgatatgaatgtggagtatgtgtgttatgtgtatctagttgcaaccaataaaaacagaacatgacatgcgggtaatcgttatttcagtagtagatttgaacaaaactcagcagtcttaattagattgaaaatcgcaaagcgaagacacctacggtttttccctaaagaccatcttaaaaaaaggaaaagaagagactggaaaaaaaaacaatctccttggtccttgctgactccatcggtcactccaatgcgatgcgagcccatcaaccttttcgctcaccagcagccgctgctgcggccgcaatggccactcgttccagttctttggcgtcggccagccacggccgccgcctcaacgccgccgtatcttcaacgtcaccggcggcatccgacgaggtgccatcgaaggtgccgtcgaacggcgcctcgcagaaggccatcgtggccacgagcctatccaccggccgcttcttcgtcttcgcggctgcggccagcctcgccggggcctcggggacgttcgttgcgcaggcgcggcctccgacagcggcacctggcgacagagcccaggcgccgtcgaacggcgcctcgcagaaggccatcatggccgcgaccctctccatcggccacttggcggccagcaacgccaacctcgacggcgcagccttgggaacgttggatgaggatgggctgttcccggcggcaagcgacgacgcagccgaggtgcggtcgaacggtgcctcgctgaaggccaccatggcaatgaggctctccatctccatcgccgctacctcgagtctgttcgattggttttggtcggggatgagatgctggcggcaggcggcgtctatatatatatggacgcctcaatatcgatgtcgttcggagtccgacgcag

SEQ ID NO: 82646 - DNA, 4209 bp, Zea Mays
gaggcaagcacgcgcgtgacgaccacccctgaacccgtcagcgacaccgtcaaagatctgaaagcaagttgcagtttggcactccggcgacgccatgaaggggggtttaaagaaatgcgggcccctctgttctgaggtcaggcgacgggtgcggtcgccatcgccggggggcgatgccgcgtccgcgtgcgcgccggcggcagaatccgcccttgcgcctggacaggagctattgggcctacggctgctgcaaagattggcgaggcagccagggatgtatctggacggactgacgacggagatctcggttgattgtcctggtcaaacactctttgtttctgtaaatggaagttggataggaaacacaaaggccctttttggtggttgatccctgatcggaggggattggattcattggggaaaaaacaaggtttgtttggtgatcagagaattgaagtgggaaaattctcttgctattcaattatctggtaagaagatttcttcacatggatcccctccaattttctggtcattcagttggtttagagaaaaggtagagaaggtacagtttttgccgtgttaactagccagtaaattcgtgtttgactgctgcagctagaggagcatgacgaaacacaacctttttttccagatgttttgttttttgattggatgggaaaaaaattcgtttgtgagatttgcagtttcgcaagaaattcgaaaaggaaccgttgtcaggatcagcagaagcttccaaagcaacactttttttcctgtaaaaactatgtcaacaattaaacatgacgagaggagccagtttaccttaccagtaatacagagacatgatttggcgagaggtccatgttagggaagggaggctccaaaccggcgcttttcagccttgcgtcagtgttttatatatatgattcaaatatgtcgctgtaatgccgagtaaatctatgggcacttattagactggccatccacttcctccaattgctgcatcatgttagatgctgtcagtgtcaaaacacctaggaccaagctgctgcaaattaatccttggactaggaattctgagacgtgttgttgaattcaagcagtgtactgcttttctgttcatacatacacctaatataggccgcttgtgcgtgttcattggcgcgaaagtggccaaattcttcactggccgatttttccactgatgagacaaaatgaggagaacggaatctttgcctccgatgaagggaaagatacctgccatcactttgtttagtcccagctagctagtgccacactcaactagtacatgtcttctgtgcttgaactcttctgccaggcactatttttgtaaggttatttggtgctttaggtgggattctattttatattatctcatatgtttcattgcttctgttgcttgaatttcaagcgattgtccttagtagccctgctactgcaacactactaaagacagcttcttgtgactcccgttatcaatctggtcaatcgttgcaccaggagaggggagggtgagctgagaggggtttcatggagatggagggcagaggcctgtctgatttgttcaggaacaccagcgaggagatcttcctcaaggcagtgatggagaactcgatgggagtagcagcagcgccaagcatggagatgctggggttcaagaacacgtcgcgaagtctcagagaagacagcgaggagctgttcaacaactggcttatgaatggagagatccctggatttgggtcagtgaacaatcaccctcgacaaccatctaggttgtcatcagaagccgcaggccttccgaatcaacagcatgacattgctcaacaaagttttctcactgacaacttggttccacagaatttaacaattccttctgtcgaatatccaaataaccacaaccagcaatcactcaaaaatgcagcagagaagggaatgcaagccagtgacctacttctagcaaaagcctggttccacagcactcaaccaatgactagaagtcgttcgtcagagttaaggaggaggtatgctgcgatgcaaactaatatggcaccaataacaataggaagcattgaaacacctaaccaattaaaacaagattttacaaacacaacaaacatcacaccaatgagcaacacacttgttcatacaccaaagtttgtatctccttcaagttcatcaacatcccctctggataatccacatgtggcagcacaagatactgttacctcagtggtgagcatgctcaaggacacacttgagcgcaagaagcttggtagccatgctaacaaagacacctcagcaggcaattcttttggattctatgacactcagcagtttcaacaaaacattcttggaggaacagatttctttcccatagtgacaactgcccaagttcaggattccctgatgcttcccaaggttgacaggcccatggaaccaaacaatggtaacttcgttgctcctgcaaaccaggtttggttcagtgcagcttctcgagagccttcacacagtggatcgtctactgctatgactactcattcagctggatttgaaatgtgtgatgagctacctcctgcagcgcaagcgatgagtgtttgtgagagcaccagaaaaaatgctgcaaatggaacaaccgactgcaaatcaaaaggcaaagagtatagagagagggtacaaaaggataatttgaaagatgggaggaagaaagcagccctaactcgaataggatccatttcatctgaacaagcagctgataatggagatcctacaaagaagcgcagggttgagcgctcacgcaaaatggcagaagcaaaggaaagaagttccacaccagtaataccatctgatatgcaagccgtacttaaacgctgtgaaaccctagagaaggaggtccgatcactaaaacttaacctgtctttcatgaacaggaaagattcagaacagaccaagcagatcgaggagcttcagaagcaaaacgaggatttggccgaagagaaggagcggctggtggaagagatcgaaaggattgtctctgaccccaacacatgaccgcccaatcatttctgacatttttttatatactaatagaattagacttgaaatggtcctagatacaaatacacatacacaatccagcagggggcagcaagaattaagtgctggcctaaatgtaccattctttccttgttttcacaagtgtaacgtatacgaatatcaacaagcaaagggatcagggattacagtttatttcctgcagcatgttggcctcatgggtatcaatcagaacatgcgtgtgatatgaatgtggagtatgtgtgttatgtgtatctagttgcaaccaataaaaacagaacatgacatgcgggtaatcgttatttcagtagtagatttgaacaaaactcagcagtcttaattagattgaaaatcgcaaagcgaagacacctacggtttttccctaaagaccatcttaaaaaaaggaaaagaagagactggaaaaaaaaacaatctccttggtccttgctgactccatcggtcactccaatgcgatgcgagcccatcaaccttttcgctcaccagcagccgctgctgcggccgcaatggccactcgttccagttctttggcgtcggccagccacggccgccgcctcaacgccgccgtatcttcaacgtcaccggcggcatccgacgaggtgccatcgaaggtgccgtcgaacggcgcctcgcagaaggccatcgtggccacgagcctatccaccggccgcttcttcgtcttcgcggctgcggccagcctcgccggggcctcggggacgttcgttgcgcaggcgcggcctccgacagcggcacctggcgacagagcccaggcgccgtcgaacggcgcctcgcagaaggccatcatggccgcgaccctctccatcggccacttggcggccagcaacgccaacctcgacggcgcagccttgggaacgttggatgaggatgggctgttcccggcggcaagcgacgacgcagccgaggtgcggtcgaacggtgcctcgctgaaggccaccatggcaatgaggctctccatctccatcgccgctacctcgagtctgttcgattggttttggtcggggatgagatgctggcggcaggcggcgtctatatatatatggacgcctcaatatcgatgtcgttcggagtccgacgcag

SEQ ID NO: 82647 - DNA, 4155 bp, Zea Mays
gaggcaagcacgcgcgtgacgaccacccctgaacccgtcagcgacaccgtcaaagatctgaaagcaagttgcagtttggcactccggcgacgccatgaaggggggtttaaagaaatgcgggcccctctgttctgaggtcaggcgacgggtgcggtcgccatcgccggggggcgatgccgcgtccgcgtgcgcgccggcggcagaatccgcccttgcgcctggacaggagctattgggcctacggctgctgcaaagattggcgagacacaggcagccagggatgtatctggacggactgacgacggagatctcggttgattgtcctggtcaaacactctttgtttctgtaaatggaagttggataggaaacacaaaggtttgtttggtgatcagagaattgaagtgggaaaattctcttgctattcaattatctggtaagaagatttcttcacatggatcccctccaattttctggtcattcagttggtttagagaaaaggtagagaaggtacagtttttgccgtgttaactagccagtaaattcgtgtttgactgctgcagctagaggagcatgacgaaacacaacctttttttccagatgttttgttttttgattggatgggaaaaaaattcgtttgtgagatttgcagtttcgcaagaaattcgaaaaggaaccgttgtcaggatcagcagaagcttccaaagcaacactttttttcctgtaaaaactatgtcaacaattaaacatgacgagaggagccagtttaccttaccagtaatacagagacatgatttggcgagaggtccatgttagggaagggaggctccaaaccggcgcttttcagccttgcgtcagtgttttatatatatgattcaaatatgtcgctgtaatgccgagtaaatctatgggcacttattagactggccatccacttcctccaattgctgcatcatgttagatgctgtcagtgtcaaaacacctaggaccaagctgctgcaaattaatccttggactaggaattctgagacgtgttgttgaattcaagcagtgtactgcttttctgttcatacatacacctaatataggccgcttgtgcgtgttcattggcgcgaaagtggccaaattcttcactggccgatttttccactgatgagacaaaatgaggagaacggaatctttgcctccgatgaagggaaagatacctgccatcactttgtttagtcccagctagctagtgccacactcaactagtacatgtcttctgtgcttgaactcttctgccaggcactatttttgtaaggttatttggtgctttaggtgggattctattttatattatctcatatgtttcattgcttctgttgcttgaatttcaagcgattgtccttagtagccctgctactgcaacactactaaagacagcttcttgtgactcccgttatcaatctggtcaatcgttgcaccaggagaggggagggtgagctgagaggggtttcatggagatggagggcagaggcctgtctgatttgttcaggaacaccagcgaggagatcttcctcaaggcagtgatggagaactcgatgggagtagcagcagcgccaagcatggagatgctggggttcaagaacacgtcgcgaagtctcagagaagacagcgaggagctgttcaacaactggcttatgaatggagagatccctggatttgggtcagtgaacaatcaccctcgacaaccatctaggttgtcatcagaagccgcaggccttccgaatcaacagcatgacattgctcaacaaagttttctcactgacaacttggttccacagaatttaacaattccttctgtcgaatatccaaataaccacaaccagcaatcactcaaaaatgcagcagagaagggaatgcaagccagtgacctacttctagcaaaagcctggttccacagcactcaaccaatgactagaagtcgttcgtcagagttaaggaggaggtatgctgcgatgcaaactaatatggcaccaataacaataggaagcattgaaacacctaaccaattaaaacaagattttacaaacacaacaaacatcacaccaatgagcaacacacttgttcatacaccaaagtttgtatctccttcaagttcatcaacatcccctctggataatccacatgtggcagcacaagatactgttacctcagtggtgagcatgctcaaggacacacttgagcgcaagaagcttggtagccatgctaacaaagacacctcagcaggcaattcttttggattctatgacactcagcagtttcaacaaaacattcttggaggaacagatttctttcccatagtgacaactgcccaagttcaggattccctgatgcttcccaaggttgacaggcccatggaaccaaacaatggtaacttcgttgctcctgcaaaccaggtttggttcagtgcagcttctcgagagccttcacacagtggatcgtctactgctatgactactcattcagctggatttgaaatgtgtgatgagctacctcctgcagcgcaagcgatgagtgtttgtgagagcaccagaaaaaatgctgcaaatggaacaaccgactgcaaatcaaaaggcaaagagtatagagagagggtacaaaaggataatttgaaagatgggaggaagaaagcagccctaactcgaataggatccatttcatctgaacaagcagctgataatggagatcctacaaagaagcgcagggttgagcgctcacgcaaaatggcagaagcaaaggaaagaagttccacaccagtaataccatctgatatgcaagccgtacttaaacgctgtgaaaccctagagaaggaggtccgatcactaaaacttaacctgtctttcatgaacaggaaagattcagaacagaccaagcagatcgaggagcttcagaagcaaaacgaggatttggccgaagagaaggagcggctggtggaagagatcgaaaggattgtctctgaccccaacacatgaccgcccaatcatttctgacatttttttatatactaatagaattagacttgaaatggtcctagatacaaatacacatacacaatccagcagggggcagcaagaattaagtgctggcctaaatgtaccattctttccttgttttcacaagtgtaacgtatacgaatatcaacaagcaaagggatcagggattacagtttatttcctgcagcatgttggcctcatgggtatcaatcagaacatgcgtgtgatatgaatgtggagtatgtgtgttatgtgtatctagttgcaaccaataaaaacagaacatgacatgcgggtaatcgttatttcagtagtagatttgaacaaaactcagcagtcttaattagattgaaaatcgcaaagcgaagacacctacggtttttccctaaagaccatcttaaaaaaaggaaaagaagagactggaaaaaaaaacaatctccttggtccttgctgactccatcggtcactccaatgcgatgcgagcccatcaaccttttcgctcaccagcagccgctgctgcggccgcaatggccactcgttccagttctttggcgtcggccagccacggccgccgcctcaacgccgccgtatcttcaacgtcaccggcggcatccgacgaggtgccatcgaaggtgccgtcgaacggcgcctcgcagaaggccatcgtggccacgagcctatccaccggccgcttcttcgtcttcgcggctgcggccagcctcgccggggcctcggggacgttcgttgcgcaggcgcggcctccgacagcggcacctggcgacagagcccaggcgccgtcgaacggcgcctcgcagaaggccatcatggccgcgaccctctccatcggccacttggcggccagcaacgccaacctcgacggcgcagccttgggaacgttggatgaggatgggctgttcccggcggcaagcgacgacgcagccgaggtgcggtcgaacggtgcctcgctgaaggccaccatggcaatgaggctctccatctccatcgccgctacctcgagtctgttcgattggttttggtcggggatgagatgctggcggcaggcggcgtctatatatatatggacgcctcaatatcgatgtcgttcggagtccgacgcag

SEQ ID NO: 82648 - DNA, 3327 bp, Zea Mays
gaggcaagcacgcgcgtgacgaccacccctgaacccgtcagcgacaccgtcaaagatctgaaagcaagttgcagtttggcactccggcgacgccatgaaggggggtttaaagaaatgcgggcccctctgttctgaggtcaggcgacgggtgcggtcgccatcgccggggggcgatgccgcgtccgcgtgcgcgccggcggcagaatccgcccttgcgcctggacaggagctattgggcctacggctgctgcaaagattggcgaggcagccagggatgtatctggacggactgacgacggagatctcggttgattgtcctggtcaaacactctttgtttctgtaaatggaagttggataggaaacacaaaggtcagtgtcagtgaaaaccatatgcaaattcgtgtgaatccatcaccatgccccttcttcaggccctttttggtggttgatccctgatcggaggggattggattcattggggaaaaaacaaggtttgtttggtgatcagagaattgaagtgggaaaattctcttgctattcaattatctgcgattgtccttagtagccctgctactgcaacactactaaagacagcttcttgtgactcccgttatcaatctggtcaatcgttgcaccaggagaggggagggtgagctgagaggggtttcatggagatggagggcagaggcctgtctgatttgttcaggaacaccagcgaggagatcttcctcaaggcagtgatggagaactcgatgggagtagcagcagcgccaagcatggagatgctggggttcaagaacacgtcgcgaagtctcagagaagacagcgaggagctgttcaacaactggcttatgaatggagagatccctggatttgggtcagtgaacaatcaccctcgacaaccatctaggttgtcatcagaagccgcaggccttccgaatcaacagcatgacattgctcaacaaagttttctcactgacaacttggttccacagaatttaacaattccttctgtcgaatatccaaataaccacaaccagcaatcactcaaaaatgcagcagagaagggaatgcaagccagtgacctacttctagcaaaagcctggttccacagcactcaaccaatgactagaagtcgttcgtcagagttaaggaggaggtatgctgcgatgcaaactaatatggcaccaataacaataggaagcattgaaacacctaaccaattaaaacaagattttacaaacacaacaaacatcacaccaatgagcaacacacttgttcatacaccaaagtttgtatctccttcaagttcatcaacatcccctctggataatccacatgtggcagcacaagatactgttacctcagtggtgagcatgctcaaggacacacttgagcgcaagaagcttggtagccatgctaacaaagacacctcagcaggcaattcttttggattctatgacactcagcagtttcaacaaaacattcttggaggaacagatttctttcccatagtgacaactgcccaagttcaggattccctgatgcttcccaaggttgacaggcccatggaaccaaacaatggtaacttcgttgctcctgcaaaccaggtttggttcagtgcagcttctcgagagccttcacacagtggatcgtctactgctatgactactcattcagctggatttgaaatgtgtgatgagctacctcctgcagcgcaagcgatgagtgtttgtgagagcaccagaaaaaatgctgcaaatggaacaaccgactgcaaatcaaaaggcaaagagtatagagagagggtacaaaaggataatttgaaagatgggaggaagaaagcagccctaactcgaataggatccatttcatctgaacaagcagctgataatggagatcctacaaagaagcgcagggttgagcgctcacgcaaaatggcagaagcaaaggaaagaagttccacaccagtaataccatctgatatgcaagccgtacttaaacgctgtgaaaccctagagaaggaggtccgatcactaaaacttaacctgtctttcatgaacaggaaagattcagaacagaccaagcagatcgaggagcttcagaagcaaaacgaggatttggccgaagagaaggagcggctggtggaagagatcgaaaggattgtctctgaccccaacacatgaccgcccaatcatttctgacatttttttatatactaatagaattagacttgaaatggtcctagatacaaatacacatacacaatccagcagggggcagcaagaattaagtgctggcctaaatgtaccattctttccttgttttcacaagtgtaacgtatacgaatatcaacaagcaaagggatcagggattacagtttatttcctgcagcatgttggcctcatgggtatcaatcagaacatgcgtgtgatatgaatgtggagtatgtgtgttatgtgtatctagttgcaaccaataaaaacagaacatgacatgcgggtaatcgttatttcagtagtagatttgaacaaaactcagcagtcttaattagattgaaaatcgcaaagcgaagacacctacggtttttccctaaagaccatcttaaaaaaaggaaaagaagagactggaaaaaaaaacaatctccttggtccttgctgactccatcggtcactccaatgcgatgcgagcccatcaaccttttcgctcaccagcagccgctgctgcggccgcaatggccactcgttccagttctttggcgtcggccagccacggccgccgcctcaacgccgccgtatcttcaacgtcaccggcggcatccgacgaggtgccatcgaaggtgccgtcgaacggcgcctcgcagaaggccatcgtggccacgagcctatccaccggccgcttcttcgtcttcgcggctgcggccagcctcgccggggcctcggggacgttcgttgcgcaggcgcggcctccgacagcggcacctggcgacagagcccaggcgccgtcgaacggcgcctcgcagaaggccatcatggccgcgaccctctccatcggccacttggcggccagcaacgccaacctcgacggcgcagccttgggaacgttggatgaggatgggctgttcccggcggcaagcgacgacgcagccgaggtgcggtcgaacggtgcctcgctgaaggccaccatggcaatgaggctctccatctccatcgccgctacctcgagtctgttcgattggttttggtcggggatgagatgctggcggcaggcggcgtctatatatatatggacgcctcaatatcgatgtcgttcggagtccgacgcag

SEQ ID NO: 82649 - DNA, 3365 bp, Zea Mays
ccggatcctcccgtcgaatattcatgcagagagaggcaagcacgcgcgtgacgaccacccctgaacccgtcagcgacaccgtcaaagatctgaaagcaagttgcagtttggcactccggcgacgccatgaaggggggtttaaagaaatgcgggcccctctgttctgaggtcaggcgacgggtgcggtcgccatcgccggggggcgatgccgcgtccgcgtgcgcgccggcggcagaatccgcccttgcgcctggacaggagctattgggcctacggctgctgcaaagattggcgagacacaggcagccagggatgtatctggacggactgacgacggagatctcggttgattgtcctggtcaaacactctttgtttctgtaaatggaagttggataggaaacacaaaggtcagtgtcagtgaaaaccatatgcaaattcgtgtgaatccatcaccatgccccttcttcaggccctttttggtggttgatccctgatcggaggggattggattcattggggaaaaaacaaggtttgtttggtgatcagagaattgaagtgggaaaattctcttgctattcaattatctgcgattgtccttagtagccctgctactgcaacactactaaagacagcttcttgtgactcccgttatcaatctggtcaatcgttgcaccaggagaggggagggtgagctgagaggggtttcatggagatggagggcagaggcctgtctgatttgttcaggaacaccagcgaggagatcttcctcaaggcagtgatggagaactcgatgggagtagcagcagcgccaagcatggagatgctggggttcaagaacacgtcgcgaagtctcagagaagacagcgaggagctgttcaacaactggcttatgaatggagagatccctggatttgggtcagtgaacaatcaccctcgacaaccatctaggttgtcatcagaagccgcaggccttccgaatcaacagcatgacattgctcaacaaagttttctcactgacaacttggttccacagaatttaacaattccttctgtcgaatatccaaataaccacaaccagcaatcactcaaaaatgcagcagagaagggaatgcaagccagtgacctacttctagcaaaagcctggttccacagcactcaaccaatgactagaagtcgttcgtcagagttaaggaggaggtatgctgcgatgcaaactaatatggcaccaataacaataggaagcattgaaacacctaaccaattaaaacaagattttacaaacacaacaaacatcacaccaatgagcaacacacttgttcatacaccaaagtttgtatctccttcaagttcatcaacatcccctctggataatccacatgtggcagcacaagatactgttacctcagtggtgagcatgctcaaggacacacttgagcgcaagaagcttggtagccatgctaacaaagacacctcagcaggcaattcttttggattctatgacactcagcagtttcaacaaaacattcttggaggaacagatttctttcccatagtgacaactgcccaagttcaggattccctgatgcttcccaaggttgacaggcccatggaaccaaacaatggtaacttcgttgctcctgcaaaccaggtttggttcagtgcagcttctcgagagccttcacacagtggatcgtctactgctatgactactcattcagctggatttgaaatgtgtgatgagctacctcctgcagcgcaagcgatgagtgtttgtgagagcaccagaaaaaatgctgcaaatggaacaaccgactgcaaatcaaaaggcaaagagtatagagagagggtacaaaaggataatttgaaagatgggaggaagaaagcagccctaactcgaataggatccatttcatctgaacaagcagctgataatggagatcctacaaagaagcgcagggttgagcgctcacgcaaaatggcagaagcaaaggaaagaagttccacaccagtaataccatctgatatgcaagccgtacttaaacgctgtgaaaccctagagaaggaggtccgatcactaaaacttaacctgtctttcatgaacaggaaagattcagaacagaccaagcagatcgaggagcttcagaagcaaaacgaggatttggccgaagagaaggagcggctggtggaagagatcgaaaggattgtctctgaccccaacacatgaccgcccaatcatttctgacatttttttatatactaatagaattagacttgaaatggtcctagatacaaatacacatacacaatccagcagggggcagcaagaattaagtgctggcctaaatgtaccattctttccttgttttcacaagtgtaacgtatacgaatatcaacaagcaaagggatcagggattacagtttatttcctgcagcatgttggcctcatgggtatcaatcagaacatgcgtgtgatatgaatgtggagtatgtgtgttatgtgtatctagttgcaaccaataaaaacagaacatgacatgcgggtaatcgttatttcagtagtagatttgaacaaaactcagcagtcttaattagattgaaaatcgcaaagcgaagacacctacggtttttccctaaagaccatcttaaaaaaaggaaaagaagagactggaaaaaaaaacaatctccttggtccttgctgactccatcggtcactccaatgcgatgcgagcccatcaaccttttcgctcaccagcagccgctgctgcggccgcaatggccactcgttccagttctttggcgtcggccagccacggccgccgcctcaacgccgccgtatcttcaacgtcaccggcggcatccgacgaggtgccatcgaaggtgccgtcgaacggcgcctcgcagaaggccatcgtggccacgagcctatccaccggccgcttcttcgtcttcgcggctgcggccagcctcgccggggcctcggggacgttcgttgcgcaggcgcggcctccgacagcggcacctggcgacagagcccaggcgccgtcgaacggcgcctcgcagaaggccatcatggccgcgaccctctccatcggccacttggcggccagcaacgccaacctcgacggcgcagccttgggaacgttggatgaggatgggctgttcccggcggcaagcgacgacgcagccgaggtgcggtcgaacggtgcctcgctgaaggccaccatggcaatgaggctctccatctccatcgccgctacctcgagtctgttcgattggttttggtcggggatgagatgctggcggcaggcggcgtctatatatatatggacgcctcaatatcgatgtcgttcggagtccgacgcag

SEQ ID NO: 82650 - DNA, 3108 bp, Zea Mays
ccggatcctcccgtcgaatattcatgcagagagaggcaagcacgcgcgtgacgaccacccctgaacccgtcagcgacaccgtcaaagatctgaaagcaagttgcagtttggcactccggcgacgccatgaaggggggtttaaagaaatgcgggcccctctgttctgaggtcaggcgacgggtgcggtcgccatcgccggggggcgatgccgcgtccgcgtgcgcgccggcggcagaatccgcccttgcgcctggacaggagctattgggcctacggctgctgcaaagattggcgagacacaggcagccagggatgtatctggacggactgacgacggagatctcggttgattgtcctggtcaaacactctttgtttctgtaaatggaagttggataggaaacacaaaggccctttttggtggttgatccctgatcggaggggattggattcattggggaaaaaacaaggtttgtttggtgatcagagaattgaagtgggaaaattctcttgctattcaattatctggagaggggagggtgagctgagaggggtttcatggagatggagggcagaggcctgtctgatttgttcaggaacaccagcgaggagatcttcctcaaggcagtgatggagaactcgatgggagtagcagcagcgccaagcatggagatgctggggttcaagaacacgtcgcgaagtctcagagaagacagcgaggagctgttcaacaactggcttatgaatggagagatccctggatttgggtcagtgaacaatcaccctcgacaaccatctaggttgtcatcagaagccgcaggccttccgaatcaacagcatgacattgctcaacaaagttttctcactgacaacttggttccacagaatttaacaattccttctgtcgaatatccaaataaccacaaccagcaatcactcaaaaatgcagcagagaagggaatgcaagccagtgacctacttctagcaaaagcctggttccacagcactcaaccaatgactagaagtcgttcgtcagagttaaggaggaggtatgctgcgatgcaaactaatatggcaccaataacaataggaagcattgaaacacctaaccaattaaaacaagattttacaaacacaacaaacatcacaccaatgagcaacacacttgttcatacaccaaagtttgtatctccttcaagttcatcaacatcccctctggataatccacatgtggcagcacaagatactgttacctcagtggtgagcatgctcaaggacacacttgagcgcaagaagcttggtagccatgctaacaaagacacctcagcaggcaattcttttggattctatgacactcagcagtttcaacaaaacattcttggaggaacagatttctttcccatagtgacaactgcccaagttcaggattccctgatgcttcccaaggttgacaggcccatggaaccaaacaatggtaacttcgttgctcctgcaaaccagcgcaagcgatgagtgtttgtgagagcaccagaaaaaatgctgcaaatggaacaaccgactgcaaatcaaaaggcaaagagtatagagagagggtacaaaaggataatttgaaagatgggaggaagaaagcagccctaactcgaataggatccatttcatctgaacaagcagctgataatggagatcctacaaagaagcgcagggttgagcgctcacgcaaaatggcagaagcaaaggaaagaagttccacaccagtaataccatctgatatgcaagccgtacttaaacgctgtgaaaccctagagaaggaggtccgatcactaaaacttaacctgtctttcatgaacaggaaagattcagaacagaccaagcagatcgaggagcttcagaagcaaaacgaggatttggccgaagagaaggagcggctggtggaagagatcgaaaggattgtctctgaccccaacacatgaccgcccaatcatttctgacatttttttatatactaatagaattagacttgaaatggtcctagatacaaatacacatacacaatccagcagggggcagcaagaattaagtgctggcctaaatgtaccattctttccttgttttcacaagtgtaacgtatacgaatatcaacaagcaaagggatcagggattacagtttatttcctgcagcatgttggcctcatgggtatcaatcagaacatgcgtgtgatatgaatgtggagtatgtgtgttatgtgtatctagttgcaaccaataaaaacagaacatgacatgcgggtaatcgttatttcagtagtagatttgaacaaaactcagcagtcttaattagattgaaaatcgcaaagcgaagacacctacggtttttccctaaagaccatcttaaaaaaaggaaaagaagagactggaaaaaaaaacaatctccttggtccttgctgactccatcggtcactccaatgcgatgcgagcccatcaaccttttcgctcaccagcagccgctgctgcggccgcaatggccactcgttccagttctttggcgtcggccagccacggccgccgcctcaacgccgccgtatcttcaacgtcaccggcggcatccgacgaggtgccatcgaaggtgccgtcgaacggcgcctcgcagaaggccatcgtggccacgagcctatccaccggccgcttcttcgtcttcgcggctgcggccagcctcgccggggcctcggggacgttcgttgcgcaggcgcggcctccgacagcggcacctggcgacagagcccaggcgccgtcgaacggcgcctcgcagaaggccatcatggccgcgaccctctccatcggccacttggcggccagcaacgccaacctcgacggcgcagccttgggaacgttggatgaggatgggctgttcccggcggcaagcgacgacgcagccgaggtgcggtcgaacggtgcctcgctgaaggccaccatggcaatgaggctctccatctccatcgccgctacctcgagtctgttcgattggttttggtcggggatgagatgctggcggcaggcggcgtctatatatatatggacgcctcaatatcgatgtcgttcggagtccgacgcag

SEQ ID NO: 82651 - DNA, 3363 bp, Zea Mays
caaaaacctgcactgcgcatattattgcagagagaggcaagcacgcgcgtgacgaccacccctgaacccgtcagcgacaccgtcaaagatctgaaagcaagttgcagtttggcactccggcgacgccatgaaggggggtttaaagaaatgcgggcccctctgttctgaggtcaggcgacgggtgcggtcgccatcgccggggggcgatgccgcgtccgcgtgcgcgccggcggcagaatccgcccttgcgcctggacaggagctattgggcctacggctgctgcaaagattggcgagacacaggcagccagggatgtatctggacggactgacgacggagatctcggttgattgtcctggtcaaacactctttgtttctgtaaatggaagttggataggaaacacaaaggtcagtgtcagtgaaaaccatatgcaaattcgtgtgaatccatcaccatgccccttcttcaggccctttttggtggttgatccctgatcggaggggattggattcattggggaaaaaacaaggtttgtttggtgatcagagaattgaagtgggaaaattctcttgctattcaattatctggagaggggagggtgagctgagaggggtttcatggagatggagggcagaggcctgtctgatttgttcaggaacaccagcgaggagatcttcctcaaggcagtgatggagaactcgatgggagtagcagcagcgccaagcatggagatgctggggttcaagaacacgtcgcgaagtctcagagaagacagcgaggagctgttcaacaactggcttatgaatggagagatccctggatttgggtcagtgaacaatcaccctcgacaaccatctaggttgtcatcagaagccgcaggccttccgaatcaacagcatgacattgctcaacaaagttttctcactgacaacttggttccacagaatttaacaattccttctgtcgaatatccaaataaccacaaccagcaatcactcaaaaatgcagcagagaagggaatgcaagccagtgacctacttctagcaaaagcctggttccacagcactcaaccaatgactagaagtcgttcgtcagagttaaggcaggaccttctgattccatgtgcgctattaccttcccgcatgaaatatatggttcttgcctcagttttcttggtcatatttgcaggaggaggtatgctgcgatgcaaactaatatggcaccaataacaataggaagcattgaaacacctaaccaattaaaacaagattttacaaacacaacaaacatcacaccaatgagcaacacacttgttcatacaccaaagtttgtatctccttcaagttcatcaacatcccctctggataatccacatgtggcagcacaagatactgttacctcagtggtgagcatgctcaaggacacacttgagcgcaagaagcttggtagccatgctaacaaagacacctcagcaggcaattcttttggattctatgacactcagcagtttcaacaaaacattcttggaggaacagatttctttcccatagtgacaactgcccaagttcaggattccctgatgcttcccaaggttgacaggcccatggaaccaaacaatggtaacttcgttgctcctgcaaaccaggtttggttcagtgcagcttctcgagagccttcacacagtggatcgtctactgctatgactactcattcagctggatttgaaatgtgtgatgagctacctcctgcagcgcaagcgatgagtgtttgtgagagcaccagaaaaaatgctgcaaatggaacaaccgactgcaaatcaaaaggcaaagagtatagagagagggtacaaaaggataatttgaaagatgggaggaagaaagcagccctaactcgaataggatccatttcatctgaacaagcagctgataatggagatcctacaaagaagcgcagggttgagcgctcacgcaaaatggcagaagcaaaggaaagaagttccacaccagtaataccatctgatatgcaagccgtacttaaacgctgtgaaaccctagagaaggaggtccgatcactaaaacttaacctgtctttcatgaacaggaaagattcagaacagaccaagcagatcgaggagcttcagaagcaaaacgaggatttggccgaagagaaggagcggctggtggaagagatcgaaaggattgtctctgaccccaacacatgaccgcccaatcatttctgacatttttttatatactaatagaattagacttgaaatggtcctagatacaaatacacatacacaatccagcagggggcagcaagaattaagtgctggcctaaatgtaccattctttccttgttttcacaagtgtaacgtatacgaatatcaacaagcaaagggatcagggattacagtttatttcctgcagcatgttggcctcatgggtatcaatcagaacatgcgtgtgatatgaatgtggagtatgtgtgttatgtgtatctagttgcaaccaataaaaacagaacatgacatgcgggtaatcgttatttcagtagtagatttgaacaaaactcagcagtcttaattagattgaaaatcgcaaagcgaagacacctacggtttttccctaaagaccatcttaaaaaaaggaaaagaagagactggaaaaaaaaacaatctccttggtccttgctgactccatcggtcactccaatgcgatgcgagcccatcaaccttttcgctcaccagcagccgctgctgcggccgcaatggccactcgttccagttctttggcgtcggccagccacggccgccgcctcaacgccgccgtatcttcaacgtcaccggcggcatccgacgaggtgccatcgaaggtgccgtcgaacggcgcctcgcagaaggccatcgtggccacgagcctatccaccggccgcttcttcgtcttcgcggctgcggccagcctcgccggggcctcggggacgttcgttgcgcaggcgcggcctccgacagcggcacctggcgacagagcccaggcgccgtcgaacggcgcctcgcagaaggccatcatggccgcgaccctctccatcggccacttggcggccagcaacgccaacctcgacggcgcagccttgggaacgttggatgaggatgggctgttcccggcggcaagcgacgacgcagccgaggtgcggtcgaacggtgcctcgctgaaggccaccatggcaatgaggctctccatctccatcgccgctacctcgagtctgttcgattggttttggtcggggatgagatgctggcggcaggcggcgtctatatatatatggacgcctcaatatcgatgtcgttcggagtccgacgcag

SEQ ID NO: 82652 - DNA, 4293 bp, Zea Mays
caaaaacctgcactgcgcatattattgtaagaaagaagaagcatctccggatcctcccgtcgaatattcatgcagagagaggcaagcacgcgcgtgacgaccacccctgaacccgtcagcgacaccgtcaaagatctgaaagcaagttgcagtttggcactccggcgacgccatgaaggggggtttaaagaaatgcgggcccctctgttctgaggtcaggcgacgggtgcggtcgccatcgccggggggcgatgccgcgtccgcgtgcgcgccggcggcagaatccgcccttgcgcctggacaggagctattgggcctacggctgctgcaaagattggcgagacacaggcagccagggatgtatctggacggactgacgacggagatctcggttgattgtcctggtcaaacactctttgtttctgtaaatggaagttggataggaaacacaaaggccctttttggtggttgatccctgatcggaggggattggattcattggggaaaaaacaaggtttgtttggtgatcagagaattgaagtgggaaaattctcttgctattcaattatctggtaagaagatttcttcacatggatcccctccaattttctggtcattcagttggtttagagaaaaggtagagaaggtacagtttttgccgtgttaactagccagtaaattcgtgtttgactgctgcagctagaggagcatgacgaaacacaacctttttttccagatgttttgttttttgattggatgggaaaaaaattcgtttgtgagatttgcagtttcgcaagaaattcgaaaaggaaccgttgtcaggatcagcagaagcttccaaagcaacactttttttcctgtaaaaactatgtcaacaattaaacatgacgagaggagccagtttaccttaccagtaatacagagacatgatttggcgagaggtccatgttagggaagggaggctccaaaccggcgcttttcagccttgcgtcagtgttttatatatatgattcaaatatgtcgctgtaatgccgagtaaatctatgggcacttattagactggccatccacttcctccaattgctgcatcatgttagatgctgtcagtgtcaaaacacctaggaccaagctgctgcaaattaatccttggactaggaattctgagacgtgttgttgaattcaagcagtgtactgcttttctgttcatacatacacctaatataggccgcttgtgcgtgttcattggcgcgaaagtggccaaattcttcactggccgatttttccactgatgagacaaaatgaggagaacggaatctttgcctccgatgaagggaaagatacctgccatcactttgtttagtcccagctagctagtgccacactcaactagtacatgtcttctgtgcttgaactcttctgccaggcactatttttgtaaggttatttggtgctttaggtgggattctattttatattatctcatatgtttcattgcttctgttgcttgaatttcaagcgattgtccttagtagccctgctactgcaacactactaaagacagcttcttgtgactcccgttatcaatctggtcaatcgttgcaccaggagaggggagggtgagctgagaggggtttcatggagatggagggcagaggcctgtctgatttgttcaggaacaccagcgaggagatcttcctcaaggcagtgatggagaactcgatgggagtagcagcagcgccaagcatggagatgctggggttcaagaacacgtcgcgaagtctcagagaagacagcgaggagctgttcaacaactggcttatgaatggagagatccctggatttgggtcagtgaacaatcaccctcgacaaccatctaggttgtcatcagaagccgcaggccttccgaatcaacagcatgacattgctcaacaaagttttctcactgacaacttggttccacagaatttaacaattccttctgtcgaatatccaaataaccacaaccagcaatcactcaaaaatgcagcagagaagggaatgcaagccagtgacctacttctagcaaaagcctggttccacagcactcaaccaatgactagaagtcgttcgtcagagttaaggaggaggtatgctgcgatgcaaactaatatggcaccaataacaataggaagcattgaaacacctaaccaattaaaacaagattttacaaacacaacaaacatcacaccaatgagcaacacacttgttcatacaccaaagtttgtatctccttcaagttcatcaacatcccctctggataatccacatgtggcagcacaagatactgttacctcagtggtgagcatgctcaaggacacacttgagcgcaagaagcttggtagccatgctaacaaagacacctcagcaggcaattcttttggattctatgacactcagcagtttcaacaaaacattcttggaggaacagatttctttcccatagtgacaactgcccaagttcaggattccctgatgcttcccaaggttgacaggcccatggaaccaaacaatggtaacttcgttgctcctgcaaaccaggtttggttcagtgcagcttctcgagagccttcacacagtggatcgtctactgctatgactactcattcagctggatttgaaatgtgtgatgagctacctcctgcagcgcaagcgatgagtgtttgtgagagcaccagaaaaaatgctgcaaatggaacaaccgactgcaaatcaaaaggcaaagagtatagagagagggtacaaaaggataatttgaaagatgggaggaagaaagcagccctaactcgaataggatccatttcatctgaacaagcagctgataatggagatcctacaaagaagcgcagggttgagcgctcacgcaaaatggcagaagcaaaggaaagaagttccacaccagtaataccatctgatatgcaagccgtacttaaacgctgtgaaaccctagagaaggaggtccgatcactaaaacttaacctgtctttcatgaacaggaaagattcagaacagaccaagcagatcgaggagcttcagaagcaaaacgaggatttggccgaagagaaggagcggctggtggaagagatcgaaaggattgtctctgaccccaacacatgaccgcccaatcatttctgacatttttttatatactaatagaattagacttgaaatggtcctagatacaaatacacatacacaatccagcagggggcagcaagaattaagtgctggcctaaatgtaccattctttccttgttttcacaagtgtaacgtatacgaatatcaacaagcaaagggatcagggattacagtttatttcctgcagcatgttggcctcatgggtatcaatcagaacatgcgtgtgatatgaatgtggagtatgtgtgttatgtgtatctagttgcaaccaataaaaacagaacatgacatgcgggtaatcgttatttcagtagtagatttgaacaaaactcagcagtcttaattagattgaaaatcgcaaagcgaagacacctacggtttttccctaaagaccatcttaaaaaaaggaaaagaagagactggaaaaaaaaacaatctccttggtccttgctgactccatcggtcactccaatgcgatgcgagcccatcaaccttttcgctcaccagcagccgctgctgcggccgcaatggccactcgttccagttctttggcgtcggccagccacggccgccgcctcaacgccgccgtatcttcaacgtcaccggcggcatccgacgaggtgccatcgaaggtgccgtcgaacggcgcctcgcagaaggccatcgtggccacgagcctatccaccggccgcttcttcgtcttcgcggctgcggccagcctcgccggggcctcggggacgttcgttgcgcaggcgcggcctccgacagcggcacctggcgacagagcccaggcgccgtcgaacggcgcctcgcagaaggccatcatggccgcgaccctctccatcggccacttggcggccagcaacgccaacctcgacggcgcagccttgggaacgttggatgaggatgggctgttcccggcggcaagcgacgacgcagccgaggtgcggtcgaacggtgcctcgctgaaggccaccatggcaatgaggctctccatctccatcgccgctacctcgagtctgttcgattggttttggtcggggatgagatgctggcggcaggcggcgtctatatatatatggacgcctcaatatcgatgtcgttcggagtccgacgcag

SEQ ID NO: 82653 - DNA, 288 bp, Zea Mays
aagacataataatagtgtaaggacacggcggttagctatagatcactcactcacatacattccaatatgaataatacgagtgatagagccttgttggtacttatgttgcttctatctttattattcgttgcgcaatgcggtcgtcctcatgtgtacatggatgatgatgttgttggaaccgcaaggggccgccgagctgcttttagcctcaccgagaatggatattgtgacacggagcaccaaaacaataacattccgtccgtggagtccgaggaagttgcagaagac

SEQ ID NO: 82654 - DNA, 4166 bp, Zea Mays
attaaattgatgtctttccatgtggtattggtctctttattaatatgtacatataagtgccattcacgatatatattattgtgtgaggacatagttaggtcactcactgtccaatatgaatatgagtaatatgtgtggagctacaatacttgtattgtttctctttgtattccttgcacaatgtcgtcctcatgagcttgatgtcgttggaacttcttatggtatcaccaaaagaaaagatgtattttgtcaggcgggtcacatagataataaattggtctactactgcatgcatcagaagccaaaaccaatatgctatgacactttgcaggagtgtcttgccaaatgcctatagccaatgatagatgcacaatctgtgcaaaccttaaggccatttgatcgatggtattaaacttaaaccatcattgataacctaaataatgtaggcctcatcgattggcaacaataggagcttgttttgtttgtatgccactatctatcattggactccttgaatcttaagttattgctaagcagaagattcagaggtgaccttgtgcatggaagcctagtgctatggaaggaagtgtcatggtggtggtgaaagcgattggtcgtggtcgctgggtttagtggatacactttctcatttcaagtctacccacatatgttttgcggtgatatttgcctgacatgttttacaaaaaaccttccatgctcttctctcccatacccaactgcatatttgcaaaaaaacttccgtgaaatgaccctacttgtagtgcgtggctacaacaactacaaaccacaccatactcgatgatatggaaactcatactcgccattgtggcctatcacttgccattgtggcatgtacaacatacgactcaagaactatgacaaaaagaaatggttggatctctattgggcgacactccccgtccatatggagatgtaactctttccttccttgtgccataaaatggaggcgtagagaaaaatagaattggacttacttgatttaaagcctatttaggcatcatttgagcatttaggcatcatttaggcatcatttgagcatgtaaagcctatccatacttgcatcaattcatccaccatacagaggatgtagggtattatgctcaagctatcaggacctttttatattgtatgtgtgcatactaccatatcgacgctctattgcagtagcctaggcctataatcctctctttatctatgttttcctctggtactcttagtatcttgatgccacgcaagacaacgctccgtattaccaagagaaccatgattatgttactttcaccattttagcaacgagtgtctctagcccattagtattgcactactacatacacgattttagcaaaggagatattttgagcagaggtggctcattcaaaaccgtcctttaaaaatggttttcgtgctaactcgcttctataaattgatttctagagacggttgtcaaggggacccgcctccaaaattaccattccttgtgatgctctgcaatttggcttgtctcaaaaatagatagatcacaatacaactcatagcttattcaaatcaagtcggatgatgataaactttttataaaagttgtacactactaaaaatcacttttctgcaatggacaaaaatcgttgcgatagaccataaatcattgcaataggtaccaattgcaatagaacaactgtcgttgcctgttgttgcagaaaatagagtggcaataggctatgacaacaattttacgtttttgttgcaattactatgtccattgcaatgtattcaagtgttgtagtcgttcgatgttacaatgttacaatggattattctgttgcaagaatatattttgcaacatttaaggtagttaaaaaactctattgccacaacatatttcatggtaataagtgttaatgtcacgtttgaatcggttgcaaatgactttgttaccacaagatgcttcatggcaacaaaacactagtgccacataagtggctcttggtaacaagatgtatcaccatgcaaataattttgtcgcatttgatcatttttgcaacataatgtgtctcgtagtaactaaggagatctagaaatttgtatttgactataccatttgaatcgattcattgaacaaaaaaatatatttaaagattctagattttgaaacccaatcttcttgaatttttccaaatgacctcagatagagaaaatacctaaaccaaagtaacattactagaaggcatctgtaactttttagctggcgactatttcgatcgaaatcatttagcgccaatgaaaatagctttaagttttcatatttttaaattcatttttctattttttaaagtacctcgtataaagaaatgacctaaactgaagttgtagtactcatacatatataaaactttgtattaatttgatgccttcattcattcgaaatcatttaagaccaaaaaaatatgttttaatacaaatgattttaattttaaaaaaaattaatgaccatggatggatgaatgacctaaacaaaaattatattactcaaagagataaaatttcaagttcattttttatttaaatttgtgtcagattttgcaatctgacatgtgagggataaatcgtgagtttgattccggcaacttggtgtctagtaaaatatgacttctttaggaatggcaatgggtcgggtttagatcgggtggagcaaaaacctgaccataatcgctcccatgaagtctaactaaacccgtccacgaccgcacccacatgtgcaatttcaaacccacacccaaacctgtcgggttttgggtcacgcacaagtttttactgagtgtaaacttttaaacaataatttagctataaacgattaaataccaccaataattgagttatatctatgtattttaagtcttctcatgttgagcagcaataaaaaacttcatgaatcattagccaagttacttattcaaaataattactattgtatcttaatcattgttgcgcaaaatactgaataaaccaaattttgggtcgggtgcgagtcacccgtggcttaaaatagaaacccgcgcccacacgtgcgaaacttcaggtcgggtgcgggttagacccgcgggtcaaattcttcacccgtacccgcacttgtcgggtcgggtacccatcgggttttgggtttgcgggttaaattggcatccctagacttcctttatttactactataaagcaccagtttcgactcttgcatcatgcgtgaagcgcgtaggtctgttttcctcctcctcccctgtcagtggaccgttatctcatagatagatcgaagcaccggtttcgatggtcattctgtgtcacacgcaaatcatgtaagtctattcttctccctaccagtgggtcattaccccatatatatggatattactataaagcatcatctttaacgatcgtcccacgtcacacgcaaagcgcgtaggtctattctccacccctatcgaccttatagataggtcgtgaaaactacccaagctagaatttaatacccaagccagttttgatgttttaggaataatataatagtacaggctagtaggtccaatctatagtgaagaagtcagaatttaataactggggtccaatttacatctaatttgcactttttataaaatttgagatcatctagtgttgggggccttcgtcttctaaaggtcctcaaaaacatgatttaacaatatttcccaagtgtaatatatgtacaggtaccttcggactcggaatgaaactgtacacaatatgaaaagcatggtcgagacgaaggatgatgtagctccgaagctacgcgcaaggcagcttcggctcagcggcaggaaaaggaaccaacttaaaggggaaaaggctatctagtcctcgttggattgtccttacgtcaatagtaaacataaagggcatgaatgtaattttacataggctgcgccctgtgcctataaatagatgaacagtacccccgcactgttcacgctgactggtattcattcgtgcgtcacacttggacttttgccttctgtcaagccgaaggtacaaatgtaattcaatattgttcattttcatttataatgatttaataaagatatataaaagatgttgtataatta

SEQ ID NO: 82655 - DNA, 3434 bp, Zea Mays
cgcttcccttcccgcgcccatggcaatggctgccgctcctcacagtcatcacactccagtgggggccgcagcggccacgtccgccgccgtatccatgccctgctgctcctccgcttcctgttacgacgacaaggacggcgacccgtcctcctcctggtcgctgtcctcgccgcggcgccggcagccgtaccggcgcctcctccgcgacgaggcgcagcggctccggcgcgcgcggcggagccagggcccgggcgccgacacgccgcggtgggtgcggcgcaccacggatcagatggcccggtacatcgaggacgaccgcgcggggcacgtgtacgggcggcacgtggtcgccgccgtccgcgcggtgcgggccacggcgtcgcgcccgtccgcggacatgcgccaggccatggcgtcgtttgttaccaggctcaccttccgcgagatgtgcgtcgtgctccgcgagcagcgcggctggcgtcaggcgcgcgacttcttcgcttggatgaagctccagctgtgctacgaaccaagcgtcgtcgcctacaccgttctgctgcggttgtatggcagggtcgggaaggtgaagcttgccgaagagacgtttcttgagatgctccaggttggctgcgagcctgacgccgtggcgtgcgggaccctcctgtgcgcgtacgctaggtgggggcggcacgaggacatgatgctgttctactcggcggtgcgcgggcggggcctagtccctccgatctctgtctacaactacatgatctcgtctctgcagaagcagaagctgcacggcaaggtcatccatgtgtggaagcagatgctggaagctggcgcgccgcctaaccaattcacctacacagtcgtcatcggctcccttgtgaaggaagatctcctggaggaggccgtcgatttgttcggtgagatgcggcggcgtaggttcgttccggaagaggcgacttacagcctgttgatcagtgcgagctccagacatggcaaaggagaacaggcgttgcggctcttcgaagagatgaagggccagggaatcgcccccagcaactacacctgtgcgtctctcttggcactgcactgcaagaacgaagactacccaaaggctcttgctctcttctctgacatggaaagcagcaaggtcattcctgacgaggtcatctacgggattcttatcaggatatacgggaaactcgggctttacgaggaggcacgtcagacgtttggcgagatcgagaaggcaggtcttctgaacgacgagcagacttacgtggcaatggctcaggtccacctgaacgctggagactgtgacagagcactggaggtgttagaatctatgaagacgagaggcgtgaagccttcgcgcttctcttacagcgctcttctcagatgtcacgtcgcaaaggaagacgtagtcgccgcagaagacaccttcagagctctctcccagtcccagcacggcctccctgacgcgttctgctgtaacgacatgctcaggctgtacatgaggctgggacgtctagacaaggccagggcactggtttcggtgctgctgagggaagatggtttccagcttgacgagaacctctctacgacagtgatggagttttactgcaaaagcggtatggttgaggacgcagagaagttactcgaagatattcagaggaacaggaaacccgtgaaggttccaacgctgcttttgcttgtagagatgtacgctagaaacagacccagtgtggttctggaagaacgcagctcgtcgagggcactcggcagttcagcagctagcgtggccttgaactccctgttggacatgcctgggggcttgtccagtgtgtccctactgatcagcagattggctagggaaggtgagaacaacggggcacagcactcgtgtgcctaaccataacaatctctgaccgctgtctatatatacatgtactattttgctgtagggagcacagatgaggcgagattcatttacgatcagctgactgaactgggaaccaagcctgacgattcggcggtcgctactctgatcgtccagtatggccaggcaaagcagttagagcgagcacaagaactattcgattcagcgtcagcgtcgttcccagatggggcgcttgtctgcaacgccatggtcgacgcgttctgtaaatgtggcagagctgaggacgcgtaccatcttttcatggagatggctgatcaaggcagttacagaaatgctgtgacagctagcattcttgtcactcacctgactaagcatgggaaatttcaagaggttgagaacatcatgcatggctgtttccgagatgaagtccagctcgacactgccttgtacaacacatttatcaagtcgatgcttgaatcagtttccaagcaggtaaactgcattcggccgtcagcatatacgatcgcatggtatcctctggcgtttctcagtccatgcagacgttcaatacaatgataagtgtttatggcaaaggaggaaagctggacaaggccgttgagatgtttgctgctgcgcaggagctgggcctgccgatcgacgagaagatgtacacgaacatgcttagcttatatgggaaagccggcatcaagaggcgtctttgatgttcaaaagaatgaaggaagatggcatcagacctggaaagatcagcttcaactccatgatcaatgcctacgccacttcaggactgttcagcgaggcgaaaagcgtgttccaggagatgcaggactgcgggcacgcccccgactccttctcctacctcgcgctgatcagagcgtacacggaggctaagctgtacaccgaagcagaagaagccatccggacgatgacgctgagcagcagcaacacgaccccttcctgcccgcacttcagccacctgattctcgcgttcttgaaggaaggccgggtcggtgaagcccggaggatctacggccagatgatggaggtaggcgtggctcctgacctggcctgctgtagggccatgatgagggtgtacgtggaccgcggtctcgtcgacgatggcatctcgctctatgagacgacgtgtgggtcgttgaaacctgatagcttcgtcttgagcgctgcgtttcatctgtatgagcgtgcgggcagggagtgtgaagcccagggtgtcctggagtccatcagtgcgagtggtacctccttcctgaggaacatgaagattggatttggatcgtctttaagaagttagaacttaaacatgctagtttttctcttttttttcaagtgtttgggttaaatatcttaacttatattctagcttttccaatatttggcttaaatactgctagacattcccacacatgtaaataatttagtaaggacttcctcttagtccataattcatatgtgttttaggcactaacttacttaaaactctgttaaggatatg

SEQ ID NO: 82656 - DNA, 3336 bp, Zea Mays
cgcttcccttcccgcgcccatggcaatggctgccgctcctcacagtcatcacactccagtgggggccgcagcggccacgtccgccgccgtatccatgccctgctgctcctccgcttcctgttacgacgacaaggacggcgacccgtcctcctcctggtcgctgtcctcgccgcggcgccggcagccgtaccggcgcctcctccgcgacgaggcgcagcggctccggcgcgcgcggcggagccagggcccgggcgccgacacgccgcggtgggtgcggcgcaccacggatcagatggcccggtacatcgaggacgaccgcgcggggcacgtgtacgggcggcacgtggtcgccgccgtccgcgcggtgcgggccacggcgtcgcgcccgtccgcggacatgcgccaggccatggcgtcgtttgttaccaggctcaccttccgcgagatgtgcgtcgtgctccgcgagcagcgcggctggcgtcaggcgcgcgacttcttcgcttggatgaagctccagctgtgctacgaaccaagcgtcgtcgcctacaccgttctgctgcggttgtatggcagggtcgggaaggtgaagcttgccgaagagacgtttcttgagatgctccaggttggctgcgagcctgacgccgtggcgtgcgggaccctcctgtgcgcgtacgctaggtgggggcggcacgaggacatgatgctgttctactcggcggtgcgcgggcggggcctagtccctccgatctctgtctacaactacatgatctcgtctctgcagaagcagaagctgcacggcaaggtcatccatgtgtggaagcagatgctggaagctggcgcgccgcctaaccaattcacctacacagtcgtcatcggctcccttgtgaaggaagatctcctggaggaggccgtcgatttgttcggtgagatgcggcggcgtaggttcgttccggaagaggcgacttacagcctgttgatcagtgcgagctccagacatggcaaaggagaacaggcgttgcggctcttcgaagagatgaagggccagggaatcgcccccagcaactacacctgtgcgtctctcttggcactgcactgcaagaacgaagactacccaaaggctcttgctctcttctctgacatggaaagcagcaaggtcattcctgacgaggtcatctacgggattcttatcaggatatacgggaaactcgggctttacgaggaggcacgtcagacgtttggcgagatcgagaaggcaggtcttctgaacgacgagcagacttacgtggcaatggctcaggtccacctgaacgctggagactgtgacagagcactggaggtgttagaatctatgaagacgagaggcgtgaagccttcgcgcttctcttacagcgctcttctcagatgtcacgtcgcaaaggaagacgtagtcgccgcagaagacaccttcagagctctctcccagtcccagcacggcctccctgacgcgttctgctgtaacgacatgctcaggctgtacatgaggctgggacgtctagacaaggccagggcactggtttcggtgctgctgagggaagatggtttccagcttgacgagaacctctctacgacagtgatggagttttactgcaaaagcggtatggttgaggacgcagagaagttactcgaagatattcagaggaacaggaaacccgtgaaggttccaacgctgcttttgcttgtagagatgtacgctagaaacagacccagtgtggttctggaagaacgcagctcgtcgagggcactcggcagttcagcagctagcgtggccttgaactccctgttggacatgcctgggggcttgtccagtgtgtccctactgatcagcagattggctagggaagggagcacagatgaggcgagattcatttacgatcagctgactgaactgggaaccaagcctgacgattcggcggtcgctactctgatcgtccagtatggccaggcaaagcagttagagcgagcacaagaactattcgattcagcgtcagcgtcgttcccagatggggcgcttgtctgcaacgccatggtcgacgcgttctgtaaatgtggcagagctgaggacgcgtaccatcttttcatggagatggctgatcaaggcagttacagaaatgctgtgacagctagcattcttgtcactcacctgactaagcatgggaaatttcaagaggttgagaacatcatgcatggctgtttccgagatgaagtccagctcgacactgccttgtacaacacatttatcaagtcgatgcttgaatcaggtaaactgcattcggccgtcagcatatacgatcgcatggtatcctctggcgtttctcagtccatgcagacgttcaatacaatgataagtgtttatggcaaaggaggaaagctggacaaggccgttgagatgtttgctgctgcgcaggagctgggcctgccgatcgacgagaagatgtacacgaacatgcttagcttatatgggaaagccggcatcaagaggcgtctttgatgttcaaaagaatgaaggaagatggcatcagacctggaaagatcagcttcaactccatgatcaatgcctacgccacttcaggactgttcagcgaggcgaaaagcgtgttccaggagatgcaggactgcgggcacgcccccgactccttctcctacctcgcgctgatcagagcgtacacggaggctaagctgtacaccgaagcagaagaagccatccggacgatgacgctgagcagcagcaacacgaccccttcctgcccgcacttcagccacctgattctcgcgttcttgaaggaaggccgggtcggtgaagcccggaggatctacggccagatgatggaggtaggcgtggctcctgacctggcctgctgtagggccatgatgagggtgtacgtggaccgcggtctcgtcgacgatggcatctcgctctatgagacgacgtgtgggtcgttgaaacctgatagcttcgtcttgagcgctgcgtttcatctgtatgagcgtgcgggcagggagtgtgaagcccagggtgtcctggagtccatcagtgcgagtggtacctccttcctgaggaacatgaagattggatttggatcgtctttaagaagttagaacttaaacatgctagtttttctcttttttttcaagtgtttgggttaaatatcttaacttatattctagcttttccaatatttggcttaaatactgctagacattcccacacatgtaaataatttagtaaggacttcctcttagtccataattcatatgtgttttaggcactaacttacttaaaactctgttaaggatatg

SEQ ID NO: 82657 - DNA, 3342 bp, Zea Mays
cgcttcccttcccgcgcccatggcaatggctgccgctcctcacagtcatcacactccagtgggggccgcagcggccacgtccgccgccgtatccatgccctgctgctcctccgcttcctgttacgacgacaaggacggcgacccgtcctcctcctggtcgctgtcctcgccgcggcgccggcagccgtaccggcgcctcctccgcgacgaggcgcagcggctccggcgcgcgcggcggagccagggcccgggcgccgacacgccgcggtgggtgcggcgcaccacggatcagatggcccggtacatcgaggacgaccgcgcggggcacgtgtacgggcggcacgtggtcgccgccgtccgcgcggtgcgggccacggcgtcgcgcccgtccgcggacatgcgccaggccatggcgtcgtttgttaccaggctcaccttccgcgagatgtgcgtcgtgctccgcgagcagcgcggctggcgtcaggcgcgcgacttcttcgcttggatgaagctccagctgtgctacgaaccaagcgtcgtcgcctacaccgttctgctgcggttgtatggcagggtcgggaaggtgaagcttgccgaagagacgtttcttgagatgctccaggttggctgcgagcctgacgccgtggcgtgcgggaccctcctgtgcgcgtacgctaggtgggggcggcacgaggacatgatgctgttctactcggcggtgcgcgggcggggcctagtccctccgatctctgtctacaactacatgatctcgtctctgcagaagcagaagctgcacggcaaggtcatccatgtgtggaagcagatgctggaagctggcgcgccgcctaaccaattcacctacacagtcgtcatcggctcccttgtgaaggaagatctcctggaggaggccgtcgatttgttcggtgagatgcggcggcgtaggttcgttccggaagaggcgacttacagcctgttgatcagtgcgagctccagacatggcaaaggagaacaggcgttgcggctcttcgaagagatgaagggccagggaatcgcccccagcaactacacctgtgcgtctctcttggcactgcactgcaagaacgaagactacccaaaggctcttgctctcttctctgacatggaaagcagcaaggtcattcctgacgaggtcatctacgggattcttatcaggatatacgggaaactcgggctttacgaggaggcacgtcagacgtttggcgagatcgagaaggcaggtcttctgaacgacgagcagacttacgtggcaatggctcaggtccacctgaacgctggagactgtgacagagcactggaggtgttagaatctatgaagacgagaggcgtgaagccttcgcgcttctcttacagcgctcttctcagatgtcacgtcgcaaaggaagacgtagtcgccgcagaagacaccttcagagctctctcccagtcccagcacggcctccctgacgcgttctgctgtaacgacatgctcaggctgtacatgaggctgggacgtctagacaaggccagggcactggtttcggtgctgctgagggaagatggtttccagcttgacgagaacctctctacgacagtgatggagttttactgcaaaagcggtatggttgaggacgcagagaagttactcgaagatattcagaggaacaggaaacccgtgaaggttccaacgctgcttttgcttgtagagatgtacgctagaaacagacccagtgtggttctggaagaacgcagctcgtcgagggcactcggcagttcagcagctagcgtggccttgaactccctgttggacatgcctgggggcttgtccagtgtgtccctactgatcagcagattggctagggaagatgaggcgagattcatttacgatcagctgactgaactgggaaccaagcctgacgattcggcggtcgctactctgatcgtccagtatggccaggcaaagcagttagagcgagcacaagaactattcgattcagcgtcagcgtcgttcccagatggggcgcttgtctgcaacgccatggtcgacgcgttctgtaaatgtggcagagctgaggacgcgtaccatcttttcatggagatggctgatcaaggcagttacagaaatgctgtgacagctagcattcttgtcactcacctgactaagcatgggaaatttcaagaggttgagaacatcatgcatggctgtttccgagatgaagtccagctcgacactgccttgtacaacacatttatcaagtcgatgcttgaatcagtttccaagcaggtaaactgcattcggccgtcagcatatacgatcgcatggtatcctctggcgtttctcagtccatgcagacgttcaatacaatgataagtgtttatggcaaaggaggaaagctggacaaggccgttgagatgtttgctgctgcgcaggagctgggcctgccgatcgacgagaagatgtacacgaacatgcttagcttatatgggaaagccggcaggcatcaagaggcgtctttgatgttcaaaagaatgaaggaagatggcatcagacctggaaagatcagcttcaactccatgatcaatgcctacgccacttcaggactgttcagcgaggcgaaaagcgtgttccaggagatgcaggactgcgggcacgcccccgactccttctcctacctcgcgctgatcagagcgtacacggaggctaagctgtacaccgaagcagaagaagccatccggacgatgacgctgagcagcagcaacacgaccccttcctgcccgcacttcagccacctgattctcgcgttcttgaaggaaggccgggtcggtgaagcccggaggatctacggccagatgatggaggtaggcgtggctcctgacctggcctgctgtagggccatgatgagggtgtacgtggaccgcggtctcgtcgacgatggcatctcgctctatgagacgacgtgtgggtcgttgaaacctgatagcttcgtcttgagcgctgcgtttcatctgtatgagcgtgcgggcagggagtgtgaagcccagggtgtcctggagtccatcagtgcgagtggtacctccttcctgaggaacatgaagattggatttggatcgtctttaagaagttagaacttaaacatgctagtttttctcttttttttcaagtgtttgggttaaatatcttaacttatattctagcttttccaatatttggcttaaatactgctagacattcccacacatgtaaataatttagtaaggacttcctcttagtccataattcatatgtgttttaggcactaacttacttaaaactctgttaaggatatg

SEQ ID NO: 82658 - DNA, 3350 bp, Zea Mays
cgcttcccttcccgcgcccatggcaatggctgccgctcctcacagtcatcacactccagtgggggccgcagcggccacgtccgccgccgtatccatgccctgctgctcctccgcttcctgttacgacgacaaggacggcgacccgtcctcctcctggtcgctgtcctcgccgcggcgccggcagccgtaccggcgcctcctccgcgacgaggcgcagcggctccggcgcgcgcggcggagccagggcccgggcgccgacacgccgcggtgggtgcggcgcaccacggatcagatggcccggtacatcgaggacgaccgcgcggggcacgtgtacgggcggcacgtggtcgccgccgtccgcgcggtgcgggccacggcgtcgcgcccgtccgcggacatgcgccaggccatggcgtcgtttgttaccaggctcaccttccgcgagatgtgcgtcgtgctccgcgagcagcgcggctggcgtcaggcgcgcgacttcttcgcttggatgaagctccagctgtgctacgaaccaagcgtcgtcgcctacaccgttctgctgcggttgtatggcagggtcgggaaggtgaagcttgccgaagagacgtttcttgagatgctccaggttggctgcgagcctgacgccgtggcgtgcgggaccctcctgtgcgcgtacgctaggtgggggcggcacgaggacatgatgctgttctactcggcggtgcgcgggcggggcctagtccctccgatctctgtctacaactacatgatctcgtctctgcagaagcagaagctgcacggcaaggtcatccatgtgtggaagcagatgctggaagctggcgcgccgcctaaccaattcacctacacagtcgtcatcggctcccttgtgaaggaagatctcctggaggaggccgtcgatttgttcggtgagatgcggcggcgtaggttcgttccggaagaggcgacttacagcctgttgatcagtgcgagctccagacatggcaaaggagaacaggcgttgcggctcttcgaagagatgaagggccagggaatcgcccccagcaactacacctgtgcgtctctcttggcactgcactgcaagaacgaagactacccaaaggctcttgctctcttctctgacatggaaagcagcaaggtcattcctgacgaggtcatctacgggattcttatcaggatatacgggaaactcgggctttacgaggaggcacgtcagacgtttggcgagatcgagaaggcaggtcttctgaacgacgagcagacttacgtggcaatggctcaggtccacctgaacgctggagactgtgacagagcactggaggtgttagaatctatgaagacgagaggcgtgaagccttcgcgcttctcttacagcgctcttctcagatgtcacgtcgcaaaggaagacgtagtcgccgcagaagacaccttcagagctctctcccagtcccagcacggcctccctgacgcgttctgctgtaacgacatgctcaggctgtacatgaggctgggacgtctagacaaggccagggcactggtttcggtgctgctgagggaagatggtttccagcttgacgagaacctctctacgacagtgatggagttttactgcaaaagcggtatggttgaggacgcagagaagttactcgaagatattcagaggaacaggaaacccgtgaaggttccaacgctgcttttgcttgtagagatgtacgctagaaacagacccagtgtggttctggaagaacgcagctcgtcgagggcactcggcagttcagcagctagcgtggccttgaactccctgttggacatgcctgggggcttgtccagtgtgtccctactgatcagcagattggctagggaagggagcacagatgaggcgagattcatttacgatcagctgactgaactgggaaccaagcctgacgattcggcggtcgctactctgatcgtccagtatggccaggcaaagcagttagagcgagcacaagaactattcgattcagcgtcagcgtcgttcccagatggggcgcttgtctgcaacgccatggtcgacgcgttctgtaaatgtggcagagctgaggacgcgtaccatcttttcatggagatggctgatcaaggcagttacagaaatgctgtgacagctagcattcttgtcactcacctgactaagcatgggaaatttcaagaggttgagaacatcatgcatggctgtttccgagatgaagtccagctcgacactgccttgtacaacacatttatcaagtcgatgcttgaatcagtttccaagcaggtaaactgcattcggccgtcagcatatacgatcgcatggtatcctctggcgtttctcagtccatgcagacgttcaatacaatgataagtgtttatggcaaaggaggaaagctggacaaggccgttgagatgtttgctgctgcgcaggagctgggcctgccgatcgacgagaagatgtacacgaacatgcttagcttatatgggaaagccggcaggcatcaagaggcgtctttgatgttcaaaagaatgaaggaagatggcatcagacctggaaaatcagcttcaactccatgatcaatgcctacgccacttcaggactgttcagcgaggcgaaaagcgtgttccaggagatgcaggactgcgggcacgcccccgactccttctcctacctcgcgctgatcagagcgtacacggaggctaagctgtacaccgaagcagaagaagccatccggacgatgacgctgagcagcagcaacacgaccccttcctgcccgcacttcagccacctgattctcgcgttcttgaaggaaggccgggtcggtgaagcccggaggatctacggccagatgatggaggtaggcgtggctcctgacctggcctgctgtagggccatgatgagggtgtacgtggaccgcggtctcgtcgacgatggcatctcgctctatgagacgacgtgtgggtcgttgaaacctgatagcttcgtcttgagcgctgcgtttcatctgtatgagcgtgcgggcagggagtgtgaagcccagggtgtcctggagtccatcagtgcgagtggtacctccttcctgaggaacatgaagattggatttggatcgtctttaagaagttagaacttaaacatgctagtttttctcttttttttcaagtgtttgggttaaatatcttaacttatattctagcttttccaatatttggcttaaatactgctagacattcccacacatgtaaataatttagtaaggacttcctcttagtccataattcatatgtgttttaggcactaacttacttaaaactctgttaaggatatg

SEQ ID NO: 82659 - DNA, 3614 bp, Zea Mays
aatctaaccaaaccttatctcgcttcccttcccgcgcccatggcaatggctgccgctcctcacagtcatcacactccagtgggggccgcagcggccacgtccgccgccgtatccatgccctgctgctcctccgcttcctgttacgacgacaaggacggcgacccgtcctcctcctggtcgctgtcctcgccgcggcgccggcagccgtaccggcgcctcctccgcgacgaggcgcagcggctccggcgcgcgcggcggagccagggcccgggcgccgacacgccgcggtgggtgcggcgcaccacggatcagatggcccggtacatcgaggacgaccgcgcggggcacgtgtacgggcggcacgtggtcgccgccgtccgcgcggtgcgggccacggcgtcgcgcccgtccgcggacatgcgccaggccatggcgtcgtttgttaccaggctcaccttccgcgagatgtgcgtcgtgctccgcgagcagcgcggctggcgtcaggcgcgcgacttcttcgcttggatgaagctccagctgtgctacgaaccaagcgtcgtcgcctacaccgttctgctgcggttgtatggcagggtcgggaaggtgaagcttgccgaagagacgtttcttgagatgctccaggttggctgcgagcctgacgccgtggcgtgcgggaccctcctgtgcgcgtacgctaggtgggggcggcacgaggacatgatgctgttctactcggcggtgcgcgggcggggcctagtccctccgatctctgtctacaactacatgatctcgtctctgcagaagcagaagctgcacggcaaggtcatccatgtgtggaagcagatgctggaagctggcgcgccgcctaaccaattcacctacacagtcgtcatcggctcccttgtgaaggaagatctcctggaggaggccgtcgatttgttcggtgagatgcggcggcgtaggttcgttccggaagaggcgacttacagcctgttgatcagtgcgagctccagacatggcaaaggagaacaggcgttgcggctcttcgaagagatgaagggccagggaatcgcccccagcaactacacctgtgcgtctctcttggcactgcactgcaagaacgaagactacccaaaggctcttgctctcttctctgacatggaaagcagcaaggtcattcctgacgaggtcatctacgggattcttatcaggatatacgggaaactcgggctttacgaggaggcacgtcagacgtttggcgagatcgagaaggcaggtcttctgaacgacgagcagacttacgtggcaatggctcaggtccacctgaacgctggagactgtgacagagcactggaggtgttagaatctatgaagacgagaggcgtgaagccttcgcgcttctcttacagcgctcttctcagatgtcacgtcgcaaaggaagacgtagtcgccgcagaagacaccttcagagctctctcccagtcccagcacggcctccctgacgcgttctgctgtaacgacatgctcaggctgtacatgaggctgggacgtctagacaaggccagggcactggtttcggtgctgctgagggaagatggtttccagcttgacgagaacctctctacgacagtgatggagttttactgcaaaagcggtatggttgaggacgcagagaagttactcgaagatattcagaggaacaggaaacccgtgaaggttccaacgctgcttttgcttgtagagatgtacgctagaaacagacccagtgtggttctggaagaacgcagctcgtcgagggcactcggcagttcagcagctagcgtggccttgaactccctgttggacatgcctgggggcttgtccagtgtgtccctactgatcagcagattggctagggaaggtgagaacaacggggcacagcactcgtgtgcctaaccataacaatctctgaccgctgtctatatatacatgtactattttgctgtagggagcacagatgaggcgagattcatttacgatcagctgactgaactgggaaccaagcctgacgattcggcggtcgctactctgatcgtccagtatggccaggcaaagcagttagagcgagcacaagaactattcgattcagcgtcagcgtcgttcccagatggggcgcttgtctgcaacgccatggtcgacgcgttctgtaaatgtggcagagctgaggacgcgtaccatcttttcatggagatggctgatcaaggcagttacagaaatgctgtgacagctagcattcttgtcactcacctgactaagcatgggaaatttcaagaggttgagaacatcatgcatggctgtttccgagatgaagtccagctcgacactgccttgtacaacacatttatcaagtcgatgcttgaatcaggtctggctaacatattatactgttcatcagataggcaagcagggctatcatacctgaccgctgcagttttagtttccaagcaggtaaactgcattcggccgtcagcatatacgatcgcatggtatcctctggcgtttctcagtccatgcagacgttcaatacaatgataagtgtttatggcaaaggaggaaagctggacaaggccgttgagatgtttgctgctgcgcaggagctgggcctgccgatcgacgagaagatgtacacgaacatgcttagcttatatgggaaagccggtcaggttcttctgccctgtgcaaagaaaacaattagagcccttctcattgatctgtttcacccaccactgacttcagtctcctcctatccagttctaagcctgtggatttttcatgtgttcaggcaggcatcaagaggcgtctttgatgttcaaaagaatgaaggaagatggcatcagacctggaaaggactgttcagcgaggcgaaaagcgtgttccaggagatgcaggactgcgggcacgcccccgactccttctcctacctcgcgctgatcagagcgtacacggaggctaagctgtacaccgaagcagaagaagccatccggacgatgacgctgagcagcagcaacacgaccccttcctgcccgcacttcagccacctgattctcgcgttcttgaaggaaggccgggtcggtgaagcccggaggatctacggccagatgatggaggtaggcgtggctcctgacctggcctgctgtagggccatgatgagggtgtacgtggaccgcggtctcgtcgacgatggcatctcgctctatgagacgacgtgtgggtcgttgaaacctgatagcttcgtcttgagcgctgcgtttcatctgtatgagcgtgcgggcagggagtgtgaagcccagggtgtcctggagtccatcagtgcgagtggtacctccttcctgaggaacatgaagattggatttggatcgtctttaagaagttagaacttaaacatgctagtttttctcttttttttcaagtgtttgggttaaatatcttaacttatattctagcttttccaatatttggcttaaatactgctagacattcccacacatgtaaataatttagtaaggacttcctcttagtccataattcatatgtgttttaggcactaacttacttaaaactctgttaaggatatg

SEQ ID NO: 82660 - DNA, 277 bp, Zea Mays
ctaaatcggatgtgcttcagacctttgccgcaccacggcagcaagaaggtgatgagcatccatggatccacctagacagtccactccttcgcctcatcctccgcgttgctgccaaccgtcgtttcctaaccacataatatgttatagctgatcaaaggaatttaattaatggaagtagatagtattagtggaatccaacaaaaaaagaaaaacaaacaaaataaatgaagatccaagctgcctccgaccgtccatccgtccatccatccaaaagaag

SEQ ID NO: 82661 - DNA, 300 bp, Zea Mays
tgcatcgtcaggctggccgtgtagctggagttgatgattagcaccattgacagttttcttctggatttcctgtgcttccattataatttgattaaaatgggagaggaagaatttcatattcattgtgcgcaaataaggtggaccagatcatggtgtcaactactccacattgtatcctagtacaaaatttggtggtatttttagcattgacatctttgatacctgatattggtgatctagtacaaaattatccatgaccttgcgacttttctgtcatttcccgtttgaactggaattacc

SEQ ID NO: 82662 - DNA, 1018 bp, Zea Mays
tccatccagaaaatgcagctaccgtgctgaattatttcagttgctttttcccattgccgatagtcatttcctcattaagatggggactagaagccagcaggaaaaccgtggtaagtccaattaaatcgcttcgcttttttgttttgttttgccaaacttatacagctgttccttgaaatgcctcaccaggtggctactgttttactgctattcacattatctggccctgtaaaagcgtcaacttatctgctaatgcatggagtagttggtctcatcatgggtactgtttggagattggagaccaactggattgtctccatcatcctctgctccattgtccgtgccctgggagcttgtggttacgtgctagtgtcatcgtttctgataagagaaaatattctcgcgctgataacggttaacattcatgcttcgttgacatacatcctgacggcagctggcgtgaacacaattccttccatgggcacaatatatctactctttgggacactgcttctacttaattgtgggttcttcgtcttcctcctgcatgtgatgtatacggtattcctggcgaagcttgggataaagccgtcgctgaggtcaccaagatggctggacagagtgatgtgaaaattttaggagtagggcatcgtacgtagtgactgttcttcctgttctgctgttttagccttgctgtttgtcgcccctacctatactgggacctgtaaccatggggtgcatctgtgcatgcaaacgcgacaagcaaaattcgggattatcaatcaatcatctgtgctactcgtgctctgttgatgatcttcttgttaaggcaaatgcgagaggaagttctggagtgccaataatctacggtgagcctgaaactaatactggcaccgttccatgaaaaaaataaaaaaatgaaaccaggaaggataaaaaacaatactagcaaatacggaacgagagaaactgcaacaaaaaaaaagtgaatcaaggaaagagagcgagtgatagagag

SEQ ID NO: 82663 - DNA, 1266 bp, Zea Mays
caaggcctcacccttcccctcctctcctctccacctcatccgtatctccctccctcttctcggcggccgtggcggcgccggaggactatgcgcggcctccaccgctgcccgcaccagctcctcctggtctctccaccgccgcggtccgcccccgcgtgccgccagtcggccaccgcctcatcgcggggcctcaggagctccctcgccgtcttctccgcacccggggctcgggtagcggcggcggcgcgcgagcagaagtggggccacgtggagggtgatgaagacggtggagaggagggcctaggggaggcgctccacaggacgcgggagctcgtggagtgcgccatgttcgcggccgtcgctgggctggcctacttcctcagcaattccctcgccattgagaattatttcagttgctttttcccattgccgatagtcatttcctcattaagatggggactagaagccagcaggaaaaccgtggtggctactgttttactgctattcacattatctggccctgtaaaagcgtcaacttatctgctaatgcatggagtagttggtctcatcatgggtactgtttggagattggagaccaactggattgtctccatcatcctctgctccattgtccgtgccctgggagcttgtggttacgtgctagtgtcatcgtttctgataagagaaaatattctcgcgctgctggcgtgaacacaattccttccatgggcacaatatatctactctttgggacactgcttctacttaattgtgggttcttcgtcttcctcctgcatgtgatgtatacggtattcctggcgaagcttgggataaagccgtcgctgaggtcaccaagatggctggacagagtgatgtgaaaattttaggagtagggcatcgtacgtagtgactgttcttcctgttctgctgttttagccttgctgtttgtcgcccctacctatactgggacctgtaaccatggggtgcatctgtgcatgcaaacgcgacaagcaaaattcgggattatcaatcaatcatctgtgctactcgtgctctgttgatgatcttcttgttaaggcaaatgcgagaggaagttctggagtgccaataatctacggtgagcctgaaactaatactggcaccgttccatgaaaaaaataaaaaaatgaaaccaggaaggataaaaaacaatactagcaaatacggaacgagagaaactgcaacaaaaaaaaagtgaatcaaggaaagagagcgagtgatagagag

SEQ ID NO: 82664 - DNA, 1233 bp, Zea Mays
caaggcctcacccttcccctcctctcctctccacctcatccgtatctccctccctcttctcggcggccgtggcggcgccggaggactatgcgcggcctccaccgctgcccgcaccagctcctcctggtctctccaccgccgcggtccgcccccgcgtgccgccagtcggccaccgcctcatcgcggggcctcaggagctccctcgccgtcttctccgcacccggggctcgggtagcggcggcggcgcgcgagcagaagtggggccacgtggagggtgatgaagacggtggagaggagggcctaggggaggcgctccacaggacgcgggagctcgtggagtgcgccatgttcgcggccgtcgctgggctggcctacttcctcagcaattccctcgccattgagaattatttcagttgctttttcccattgccgatagtcatttcctcattaagatggggactagaagccagcaggaaaaccgtggtggctactgttttactgctattcacattatctggccctgtaaaagcgtcaacttatctgctaatgcatggagtagttggtctcatcatgggtactgtttggaggtgagaagtacagaggttaaatattgaagcttctgctttcgtcatcggcttctttaacccgcaagcgatgacattttttcttcctctataatcagattggagaccaactggattgtctccatcatcctctgctccattcttctacttaattgtgggttcttcgtcttcctcctgcatgtgatgtatacggtattcctggcgaagcttgggataaagccgtcgctgaggtcaccaagatggctggacagagtgatgtgaaaattttaggagtagggcatcgtacgtagtgactgttcttcctgttctgctgttttagccttgctgtttgtcgcccctacctatactgggacctgtaaccatggggtgcatctgtgcatgcaaacgcgacaagcaaaattcgggattatcaatcaatcatctgtgctactcgtgctctgttgatgatcttcttgttaaggcaaatgcgagaggaagttctggagtgccaataatctacggtgagcctgaaactaatactggcaccgttccatgaaaaaaataaaaaaatgaaaccaggaaggataaaaaacaatactagcaaatacggaacgagagaaactgcaacaaaaaaaaagtgaatcaaggaaagagagcgagtgatagagag

SEQ ID NO: 82665 - DNA, 1317 bp, Zea Mays
gggaggaccaaggcctcacccttcccctcctctcctctccacctcatccgtatctccctccctcttctcggcggccgtggcggcgccggaggactatgcgcggcctccaccgctgcccgcaccagctcctcctggtctctccaccgccgcggtccgcccccgcgtgccgccagtcggccaccgcctcatcgcggggcctcaggagctccctcgccgtcttctccgcacccggggctcgggtagcggcggcggcgcgcgagcagaagtggggccacgtggagggtgatgaagacggtggagaggagggcctaggggaggcgctccacaggacgcgggagctcgtggagtgcgccatgttcgcggccgtcgctgggctggcctacttcctcagcaattccctcgccattgagaattatttcagttgctttttcccattgccgatagtcatttcctcattaagatggggactagaagccagcaggaaaaccgtggctactgttttactgctattcacattatctggccctgtaaaagcgtcaacttatctgctaatgcatggagtagttggtctcatcatgggtactgtttggagattggagaccaactggattgtctccatcatcctctgctccattgtccgtgccctgggagcttgtggttacgtgctagtgtcatcgtttctgataagagaaaatattctcgcgctgataacggttaacattcatgcttcgttgacatacatcctgacggcagctggcgtgaacacaattccttccatgggcacaatatatctactctttgggacactgcttctacttaattgtgggttcttcgtcttcctcctgcatgtgatgtatacggtattcctggcgaagcttgggataaagccgtcgctgaggtcaccaagatggctggacagagtgatgtgaaaattttaggagtagggcatcgtacgtagtgactgttcttcctgttctgctgttttagccttgctgtttgtcgcccctacctatactgggacctgtaaccatggggtgcatctgtgcatgcaaacgcgacaagcaaaattcgggattatcaatcaatcatctgtgctactcgtgctctgttgatgatcttcttgttaaggcaaatgcgagaggaagttctggagtgccaataatctacggtgagcctgaaactaatactggcaccgttccatgaaaaaaataaaaaaatgaaaccaggaaggataaaaaacaatactagcaaatacggaacgagagaaactgcaacaaaaaaaaagtgaatcaaggaaagagagcgagtgatagagag

SEQ ID NO: 82666 - DNA, 2935 bp, Zea Mays
aattgcagaatgcttcccaacttgtgcatttttattacatccccacaacttcatcgtatagcttctcattcttatccgcatggccgtccttggtctgttccttacttggagaattaagcacaagaatgaggatgccatttggctctggggcatgtctgttgtctgcgaactctggtttggtttttcatggctgctcgaccagctgccaaagctgtgccctgtgaaccgggccaccgaccttgccgtcctgaaagacaagtttgagaccccaacgccgtccaaccctactggacggtcggatttaccagggcttgatatatttgtgtctactgctgatccggagaaagaacctccactggtcacagcaaacactatcctgtccatccttgctgctgactaccctgtggagaagctttcttgctatgtttctgatgatggaggggctctcctgacttttgaagccatggctgaagctgctagctttgctaatatgtgggttcctttctgtcgcaagcacaacattgagcctcgcaatcctgacagctacttcaatcttaagaaggacccatacaagaacaaggttcgccaggattttgtcaaggacaggaggagggtcaagagggagtatgacgagttcaaggtcaggatcaatggtctgcctgactcgatacgccgacgctctgatgcgtaccatgccagagaggaaatcaaggctatgaagaggcagcgtgaggccgctcttgatgatgcagtggagcctgttaagatccctaaagctacatggatggctgatggcactcactggcctggtacttggattcaaccttctgctgagcatacccgtggtgatcatgctggaattattcaggtgatgctgaaacctcccagtgacgatcccttgtacggcagcaccggtgatgaaggcagacctcttgatttcaccgaggtcgacatccgtttgccaatgctggtgtatgtgtcccgagagaagcggcctggttatgatcacaacaagaaggctggagcgatgaatgctctggtccgttcatctgctgtcatgtcaaatggccccttcatcctcaacctcgactgtgatcactatgtctacaactcgcaagctttccgcgaagggatgtgcttcatgatggaccgtggtggcgaccgcattggttatgtccagttcccgcagcggtttgagggcatcgatccatcagatcgctatgccaaccacaacaccgtcttcttcgacgtcaacatgcgcgcgctggatggtctcatgggaccagtctatgttggcactggctgccttttccgccgtgttgccctatatggatttgaccctccgcgctccaaggagcacggtggctgctgcagctgttgcttcccccagagacgcaagatcaaagcttcagccgctgcaccggaggagacccgggctctaaggatggcagacttcgacgaggatgaaatgaacatgtcgtcgttccccaagaagtttggtaactcgagcttcctcatcgactccattccgattgctgagttccaagggcgcccgcttgctgatcaccctggtgtcaagaacggccgccctcccggtgctctcactgtcccccgtgaccttctggatgcatccacagtcgctgaggccgtcagtgtcatctcatgctggtacgaagacaagaccgagtggggccaccgtgttggttggatctatggctcggtgacggaggatgtggtcactgggtaccggatgcacaaccggggttggaagtcggtgtactgtgtcaccaagcgtgacgccttccgcggcaccgcgcccatcaacctgaccgaccgtctccaccaggtgctccggtgggctactggatcagtggagatcttcttctcccgcaacaacgcgctgctggcgagccgcagaatgaagttcttgcagaggatcgcgtacctgaacgtgggtatctacccgttcacgtccatcttcctgatcgtctactgcttcctgccggcgctgtcgctgttctcggggcagttcatcgtgaagacgctgaacgtgacgttcctgacgtacctgctggtgatcacgctgacgctgtgcctgctggcggtgctggagatcaagtggtcggggatcagcctggaggagtggtggcggaacgagcagttctggctgatcggcggcacgagcgcgcacctggcggccgtgctgcagggcctgctgaaggtggtggcgggcatcgagatctccttcactctgacgtccaagtcgggcggcgacgacgtggacgacgagttcgcggacctgtacatcgtcaagtggacgtcgctgatgatcccgcccatcgtgatcatgatggtgaacctgatcggcatcgcggtcgggttcagccgcaccatctacagcgagatcccgcagtggagcaagctgctgggcggcgtcttcttcagcttctgggtgctggcgcacctgtacccgttcgccaagggcctgatggggcggaggggccgcacgccgaccatcgtcttcgtctgggcgggcctcctctccatcaccatctcgctgctgtgggtggccatcaacccgccgtcccagaaccagcagattggtgggtcgttcacattcccctgaaagctctctgggccaatggcggattcatgcatgcttcgtcgcagtgggatccttgcgttgctctgcatcagttcctggttgcagcggttcactatctgaggacgaagctgctggggggaatgtgggatcctgactgtcgaactggctacttttttgttgtcgaagctgataatactcttatgatgagctatagtagtagttcttttgttcttttgtttttgctatatataaaatacatgttctggtcccataatttggttatgttggacaattaaacgtggagccccaaatttccagtcttttgttgga

SEQ ID NO: 82667 - DNA, 4575 bp, Zea Mays
ctcatgtgaagcgaggccgcgttggttgcccgtttcgctagctcccaacccaaatccgcgtccctcgctcgtgtccgcgtcttgctcctctctctcacgccactcacgcgagctcgcttgctgcttcctgtggacttgttcgtcttccaactcctgcttcctgtctgtccccaactcggagcggcgacgccgagctcaccaaccctcccgtccggccaccccgtccccacccacggctactactactagtacccggcgctcccccttcctcgttccattcatttgccaccgccgtcccctcctctcctctgccccttcgcttctctctgtccttcctaccgcttctattttagttcattcaactcaggttccattcgtcgttcaaagaagagcaaggagcttcacagatccggccgccgccgctacctcactctacttcctgctgtggcccctggcttcctcccctccctccctgcttctcccccatctgaatctgcgtgcgcgccgctgcttcttgctttgaatcctgtcccggggttccgccctgatttctcggtctttgtcggatttgctttccgttcgcaattcgcaaggaggaccaaaaaaaaaaaaagttgccatcttttttctgtccttccgcagcgaaatctgccggttttgattgatcagccaccgccactgaccgatccgtacctgcatcctccagtacccgggccgcccgccatggcctccaccggcggcggcggcggcctccgccacagcaacagcagccgcctctcgcgcatgtccttctccggcggcggaagcgacgacgcccgcgcgcaggcggccgccgccccgggcggcgaccgccccatggtcaccttcgcccgccgcacccgctcgggacgctacgtcagctactcccgcgacgacctcgacagcgagctcggcgccgccggcgtcgacatgtcccccgaccgcgacgagcagttcgccagctaccacgtccacatcccggccacgcccgacaaccagcccatggacccggccatctccgcccgcgtggaggagcagtacgtctccaactccctcttcacgggcggcttcaacagtgtcacgcgcgcgcacctcatggacaaggtcatcgactcggaggccagccacccgcagatggcgggggccaggggctcctcctgcgccgtcaacggctgcgacgccaacgtcatgagcgacgagcgcggcgacgacatcctcccctgtgagtgcgacttcaagatctgcgccgagtgcttcgccgacgccgtcaagaacgccggtgccatctgccccgggtgcaaggagccatacaagaacacggagcttgacgacgtcgttggcgctgccgctgatgccacagccgggggcaggcctacgctctcgctgcccccgccgcctggcgccgctgcttccaggatggagaggaggctctccatcatgcgctcccagaaggccatgaccaggagccagaccggagactgggaccacaaccgctggctcttcgagaccaaggggacgtatgggtatggcaatgctatctggcccaaggagaatgaggtggacgctgcaggcggcttgggtggaggtggagctgatggacagccggccgagttcaccaccaagccatggaggccgctcactcggaagctttccatccctgctggagtactcagcccatacaggcttctcattcttatccgcatggccgtccttggtctgttccttacttggagaattaagcacaagaatgaggatgccatttggctctggggcatgtctgttgtctgcgaactctggtttggtttttcatggctgctcgaccagctgccaaagctgtgccctgtgaaccgggccaccgaccttgccgtcctgaaagacaagtttgagaccccaacgccgtccaaccctactggacggtcggatttaccagggcttgatatatttgtgtctactgctgatccggagaaagaacctccactggtcacagcaaacactatcctgtccatccttgctgctgactaccctgtggagaagctttcttgctatgtttctgatgatggaggggctctcctgacttttgaagccatggctgaagctgctagctttgctaatatgtgggttcctttctgtcgcaagcacaacattgagcctcgcaatcctgacagctacttcaatcttaagaaggacccatacaagaacaaggttcgccaggattttgtcaaggacaggaggagggtcaagagggagtatgacgagttcaaggtcaggatcaatggtctgcctgactcgatacgccgacgctctgatgcgtaccatgccagagaggaaatcaaggctatgaagaggcagcgtgaggccgctcttgatgatgcagtggagcctgttaagatccctaaagctacatggatggctgatggcactcactggcctggtacttggattcaaccttctgctgagcatacccgtggtgatcatgctggaattattcaggtgatgctgaaacctcccagtgacgatcccttgtacggcagcaccggtgatgaaggcagacctcttgatttcaccgaggtcgacatccgtttgccaatgctggtgtatgtgtcccgagagaagcggcctggttatgatcacaacaagaaggctggagcgatgaatgctctggtccgttcatctgctgtcatgtcaaatggccccttcatcctcaacctcgactgtgatcactatgtctacaactcgcaagctttccgcgaagggatgtgcttcatgatggaccgtggtggcgaccgcattggttatgtccagttcccgcagcggtttgagggcatcgatccatcagatcgctatgccaaccacaacaccgtcttcttcgacgtcaacatgcgcgcgctggatggtctcatgggaccagtctatgttggcactggctgccttttccgccgtgttgccctatatggatttgaccctccgcgctccaaggagcacggtggctgctgcagctgttgcttcccccagagacgcaagatcaaagcttcagccgctgcaccggaggagacccgggctctaaggatggcagacttcgacgaggatgaaatgaacatgtcgtcgttccccaagaagtttggtaactcgagcttcctcatcgactccattccgattgctgagttccaagggcgcccgcttgctgatcaccctggtgtcaagaacggccgccctcccggtgctctcactgtcccccgtgaccttctggatgcatccacagtcgctgaggccgtcagtgtcatctcatgctggtacgaagacaagaccgagtggggccaccgtgttggttggatctatggctcggtgacggaggatgtggtcactgggtaccggatgcacaaccggggttggaagtcggtgtactgtgtcaccaagcgtgacgccttccgcggcaccgcgcccatcaacctgaccgaccgtctccaccaggtgctccggtgggctactggatcagtggagatcttcttctcccgcaacaacgcgctgctggcgagccgcagaatgaagttcttgcagaggatcgcgtacctgaacgtgggtatctacccgttcacgtccatcttcctgatcgtctactgcttcctgccggcgctgtcgctgttctcggggcagttcatcgtgaagacgctgaacgtgacgttcctgacgtacctgctggtgatcacgctgacgctgtgcctgctggcggtgctggagatcaagtggtcggggatcagcctggaggagtggtggcggaacgagcagttctggctgatcggcggcacgagcgcgcacctggcggccgtgctgcagggcctgctgaaggtggtggcgggcatcgagatctccttcactctgacgtccaagtcgggcggcgacgacgtggacgacgagttcgcggacctgtacatcgtcaagtggacgtcgctgatgatcccgcccatcgtgatcatgatggtgaacctgatcggcatcgcggtcgggttcagccgcaccatctacagcgagatcccgcagtggagcaagctgctgggcggcgtcttcttcagcttctgggtgctggcgcacctgtacccgttcgccaagggcctgatggggcggaggggccgcacgccgaccatcgtcttcgtctgggcgggcctcctctccatcaccatctcgctgctgtgggtggccatcaacccgccgtcccagaaccagcagattggtgggtcgttcacattcccctgaaagctctctgggccaatggcggattcatgcatgcttcgtcgcagtgggatccttgcgttgctctgcatcagttcctggttgcagcggttcactatctgaggacgaagctgctggggggaatgtgggatcctgactgtcgaactggctacttttttgttgtcgaagctgataatactcttatgatgagctatagtagtagttcttttgttcttttgtttttgctatatataaaatacatgttctggtcccataatttggttatgttggacaattaaacgtggagccccaaatttccagtcttttgttgga

SEQ ID NO: 82668 - DNA, 4533 bp, Zea Mays
ctcatgtgaagcgaggccgcgttggttgcccgtttcgctagctcccaacccaaatccgcgtccctcgctcgtgtccgcgtcttgctcctctctctcacgccactcacgcgagctcgcttgctgcttcctgtggacttgttcgtcttccaactcctgcttcctgtctgtccccaactcggagcggcgacgccgagctcaccaaccctcccgtccggccaccccgtccccacccacggctactactactagtacccggcgctcccccttcctcgttccattcatttgccaccgccgtcccctcctctcctctgccccttcgcttctctctgtccttcctaccgcttctattttagttcattcaactcaggttccattcgtcgttcaaagaagagcaaggagcttcacagatccggccgccgccgctacctcactctacttcctgctgtggcccctggcttcctcccctccctccctgcttctcccccatctgaatctgcgtgcgcgccgctgcttcttgctttgaatcctgtcccggggttccgccctgatttctcggtctttgtcggatttgctttccgttcgcaattcgcaaggaggaccaaaaaaaaaaaaagttgccatcttttttctgtccttccgcagcgaaatctgccggttttgattgtacccgggccgcccgccatggcctccaccggcggcggcggcggcctccgccacagcaacagcagccgcctctcgcgcatgtccttctccggcggcggaagcgacgacgcccgcgcgcaggcggccgccgccccgggcggcgaccgccccatggtcaccttcgcccgccgcacccgctcgggacgctacgtcagctactcccgcgacgacctcgacagcgagctcggcgccgccggcgtcgacatgtcccccgaccgcgacgagcagttcgccagctaccacgtccacatcccggccacgcccgacaaccagcccatggacccggccatctccgcccgcgtggaggagcagtacgtctccaactccctcttcacgggcggcttcaacagtgtcacgcgcgcgcacctcatggacaaggtcatcgactcggaggccagccacccgcagatggcgggggccaggggctcctcctgcgccgtcaacggctgcgacgccaacgtcatgagcgacgagcgcggcgacgacatcctcccctgtgagtgcgacttcaagatctgcgccgagtgcttcgccgacgccgtcaagaacgccggtgccatctgccccgggtgcaaggagccatacaagaacacggagcttgacgacgtcgttggcgctgccgctgatgccacagccgggggcaggcctacgctctcgctgcccccgccgcctggcgccgctgcttccaggatggagaggaggctctccatcatgcgctcccagaaggccatgaccaggagccagaccggagactgggaccacaaccgctggctcttcgagaccaaggggacgtatgggtatggcaatgctatctggcccaaggagaatgaggtggacgctgcaggcggcttgggtggaggtggagctgatggacagccggccgagttcaccaccaagccatggaggccgctcactcggaagctttccatccctgctggagtactcagcccatacaggcttctcattcttatccgcatggccgtccttggtctgttccttacttggagaattaagcacaagaatgaggatgccatttggctctggggcatgtctgttgtctgcgaactctggtttggtttttcatggctgctcgaccagctgccaaagctgtgccctgtgaaccgggccaccgaccttgccgtcctgaaagacaagtttgagaccccaacgccgtccaaccctactggacggtcggatttaccagggcttgatatatttgtgtctactgctgatccggagaaagaacctccactggtcacagcaaacactatcctgtccatccttgctgctgactaccctgtggagaagctttcttgctatgtttctgatgatggaggggctctcctgacttttgaagccatggctgaagctgctagctttgctaatatgtgggttcctttctgtcgcaagcacaacattgagcctcgcaatcctgacagctacttcaatcttaagaaggacccatacaagaacaaggttcgccaggattttgtcaaggacaggaggagggtcaagagggagtatgacgagttcaaggtcaggatcaatggtctgcctgactcgatacgccgacgctctgatgcgtaccatgccagagaggaaatcaaggctatgaagaggcagcgtgaggccgctcttgatgatgcagtggagcctgttaagatccctaaagctacatggatggctgatggcactcactggcctggtacttggattcaaccttctgctgagcatacccgtggtgatcatgctggaattattcaggtgatgctgaaacctcccagtgacgatcccttgtacggcagcaccggtgatgaaggcagacctcttgatttcaccgaggtcgacatccgtttgccaatgctggtgtatgtgtcccgagagaagcggcctggttatgatcacaacaagaaggctggagcgatgaatgctctggtccgttcatctgctgtcatgtcaaatggccccttcatcctcaacctcgactgtgatcactatgtctacaactcgcaagctttccgcgaagggatgtgcttcatgatggaccgtggtggcgaccgcattggttatgtccagttcccgcagcggtttgagggcatcgatccatcagatcgctatgccaaccacaacaccgtcttcttcgacgtcaacatgcgcgcgctggatggtctcatgggaccagtctatgttggcactggctgccttttccgccgtgttgccctatatggatttgaccctccgcgctccaaggagcacggtggctgctgcagctgttgcttcccccagagacgcaagatcaaagcttcagccgctgcaccggaggagacccgggctctaaggatggcagacttcgacgaggatgaaatgaacatgtcgtcgttccccaagaagtttggtaactcgagcttcctcatcgactccattccgattgctgagttccaagggcgcccgcttgctgatcaccctggtgtcaagaacggccgccctcccggtgctctcactgtcccccgtgaccttctggatgcatccacagtcgctgaggccgtcagtgtcatctcatgctggtacgaagacaagaccgagtggggccaccgtgttggttggatctatggctcggtgacggaggatgtggtcactgggtaccggatgcacaaccggggttggaagtcggtgtactgtgtcaccaagcgtgacgccttccgcggcaccgcgcccatcaacctgaccgaccgtctccaccaggtgctccggtgggctactggatcagtggagatcttcttctcccgcaacaacgcgctgctggcgagccgcagaatgaagttcttgcagaggatcgcgtacctgaacgtgggtatctacccgttcacgtccatcttcctgatcgtctactgcttcctgccggcgctgtcgctgttctcggggcagttcatcgtgaagacgctgaacgtgacgttcctgacgtacctgctggtgatcacgctgacgctgtgcctgctggcggtgctggagatcaagtggtcggggatcagcctggaggagtggtggcggaacgagcagttctggctgatcggcggcacgagcgcgcacctggcggccgtgctgcagggcctgctgaaggtggtggcgggcatcgagatctccttcactctgacgtccaagtcgggcggcgacgacgtggacgacgagttcgcggacctgtacatcgtcaagtggacgtcgctgatgatcccgcccatcgtgatcatgatggtgaacctgatcggcatcgcggtcgggttcagccgcaccatctacagcgagatcccgcagtggagcaagctgctgggcggcgtcttcttcagcttctgggtgctggcgcacctgtacccgttcgccaagggcctgatggggcggaggggccgcacgccgaccatcgtcttcgtctgggcgggcctcctctccatcaccatctcgctgctgtgggtggccatcaacccgccgtcccagaaccagcagattggtgggtcgttcacattcccctgaaagctctctgggccaatggcggattcatgcatgcttcgtcgcagtgggatccttgcgttgctctgcatcagttcctggttgcagcggttcactatctgaggacgaagctgctggggggaatgtgggatcctgactgtcgaactggctacttttttgttgtcgaagctgataatactcttatgatgagctatagtagtagttcttttgttcttttgtttttgctatatataaaatacatgttctggtcccataatttggttatgttggacaattaaacgtggagccccaaatttccagtcttttgttgga

SEQ ID NO: 82669 - DNA, 1236 bp, Zea Mays
cacacacaccccaccacacagatgagatgacagacccatccaacctgcccctgcccctgcccctgcctttgcctttgaaaacctccactgcctgattggtcctttgaaaacctcccacgcacattcttggcagctactctactcaatggcgctgtcctcctccggccacccggcgacgacccgcctgctcttctcgcttctgctcgtgggctcggcggcgggcttgccggagcgggcggccatcgacagggtcaaccggcgaggcccttccctcggcctcgtcatgtcctacgtcgacgaggccaccgcgctgcaggcctccggctacttccagccttggcgtgccctccctttcgttgacctctacggacggcggtatcacatcggcagcattcggggcgtgaacgtgatatacgcactgacagggcaacgcaggctgaacgccgccgtcacagtacagacgctcatcgacgtcttcagcgtgtccggcattgttcactacggcacggcagggagctgcaacgactccatctccttcggcgacgtcagtgtccccaggctcgtcgcctacacgggtgcctggacatggaaggtggaacttgaaagatgcaacgacactttctgcttacccacagctccacggattgtctacgggctgaaggggtcgtcggctgacatgttcctcgacaacgcggaatacaggaagttccttttccaagagtttggggtgtctacaatggacgaggagagcgcagcggtggtgatgacagcaacgtcgcctggcatacctgtgatcgtgttccgaggagtgtctgacttggctggaggggagccgacatggtcgtccacaagcctgatgaacctggcgtccattaatgcattaaaagtggcggtagagttcatcgctgcagttggcaagcatagttcaaccgcatcagtaaaaagatgatcgccatcctcgtccgttgctgctccaaaataggcctgcggcagtaactggaagttacttatgttcagaatgatgtcaaaccttgtggcttcaagtcataatataatacgtcctctctaataaagcggtaggaagattgacgtacatatccacattactttgctctcagttgcgttgcgtcgatcccctgctttggggatgtgtacccattctcgaggctataaaatggacctctaaatgtatggaacaacacatcaaacattctaagagtacattataacttcgag

SEQ ID NO: 82670 - DNA, 1430 bp, Zea Mays
cacacacaccccaccacacagatgagatgacagacccatccaacctgcccctgcccctgcccctgcctttgcctttgaaaacctccactgcctgattggtcctttgaaaacctcccacgcacattcttggcagctactctactcaatggcgctgtcctcctccggccacccggcgacgacccgcctgctcttctcgcttctgctcgtgggctcggcggcgggcttgccggagcgggcggccatcgacagggtcaaccggcgaggcccttccctcggcctcgtcatgtcctacgtcgacgaggccaccgcgctgcaggcctccggctacttccagccttggcgtgccctccctttcgttgacctctacggacggcggtatcacatcggcagcattcggggcgtgaacgtgatatacgcactgacagggcaacgcaggctgaacgccgccgtcacagtacagacgctcatcgacgtcttcagcgtgtccggcattgttcactacggcacggcagggagctgcaacgactccatctccttcggcgacgtcagtgtccccaggctcgtcgcctacacgggtgcctggacatggaagaagttcagatcaccgagagagtcatcggcggaattgagcttcggcgaatacaacgtcccagacggaggaggaggggagaatctgctcggatccctcaagtacagaaacgaggagctttactcggccggcaagcccatggaagaggtcttctggctgcctgtgcattcggcatggttcagaactgcagaacagctcacggtggaacttgaaagatgcaacgacactttctgcttacccacagctccacggattgtctacgggctgaaggggtcgtcggctgacatgttcctcgacaacgcggaatacaggaagttccttttccaagagtttggggtgtctacaatggacgaggagagcgcagcggtggtgatgcaacgtcgcctggcatacctgtgatcgtgttccgaggagtgtctgacttggctggaggggagccgacatggtcgtccacaagcctgatgaacctggcgtccattaatgcattaaaagtggcggtagagttcatcgctgcagttggcaagcatagttcaaccgcatcagtaaaaagatgatcgccatcctcgtccgttgctgctccaaaataggcctgcggcagtaactggaagttacttatgttcagaatgatgtcaaaccttgtggcttcaagtcataatataatacgtcctctctaataaagcggtaggaagattgacgtacatatccacattactttgctctcagttgcgttgcgtcgatcccctgctttggggatgtgtacccattctcgaggctataaaatggacctctaaatgtatggaacaacacatcaaacattctaagagtacattataacttcgag

SEQ ID NO: 82671 - DNA, 1426 bp, Zea Mays
cacacacaccccaccacacagatgagatgacagacccatccaacctgcccctgcccctgcccctgcctttgcctttgaaaacctccactgcctgattggtcctttgaaaacctcccacgcacattcttggcagctactctactcaatggcgctgtcctcctccggccacccggcgacgacccgcctgctcttctcgcttctgctcgtgggctcggcggcgggcttgccggagcgggcggccatcgacagggtcaaccggcgaggcccttccctcggcctcgtcatgtcctacgtcgacgaggccaccgcgctgcaggcctccggctacttccagccttggcgtgccctccctttcgttgacctctacggacggcggtatcacatcggcagcattcggggcgtgaacgtgatatacgcactgacagggcaacgcaggctgaacgccgccgtcacagtacagacgctcatcgacgtcttcagcgtgtccggcattgttcactacggcacggcagggagctgcaacgactccatctccttcggcgacgtcagtgtccccaggctcgtcgcctacacgggtgcctggacatggaagatcaccgagagagtcatcggcggaattgagcttcggcgaatacaacgtcccagacggaggaggaggggagaatctgctcggatccctcaagtacagaaacgaggagctttactcggccggcaagcccatggaagaggtcttctggctgcctgtgcattcggcatggttcagaactgcagaacagctcacggtggaacttgaaagatgcaacgacactttctgcttacccacagctccacggattgtctacgggctgaaggggtcgtcggctgacatgttcctcgacaacgcggaatacaggaagttccttttccaagagtttggggtgtctacaatggacgaggagagcgcagcggtggtgatgacagcaacgtcgcctggcatacctgtgatcgtgttccgaggagtgtctgacttggctggaggggagccgacatggtcgtccacaagcctgatgaacctggcgtccattaatgcattaaaagtggcggtagagttcatcgctgcagttggcaagcatagttcaaccgcatcagtaaaaagatgatcgccatcctcgtccgttgctgctccaaaataggcctgcggcagtaactggaagttacttatgttcagaatgatgtcaaaccttgtggcttcaagtcataatataatacgtcctctctaataaagcggtaggaagattgacgtacatatccacattactttgctctcagttgcgttgcgtcgatcccctgctttggggatgtgtacccattctcgaggctataaaatggacctctaaatgtatggaacaacacatcaaacattctaagagtacattataacttcgag

SEQ ID NO: 82672 - DNA, 3891 bp, Zea Mays
cgattatagggtttagcttcggctttgcgtttgcctttggcctggccgccgccgccccctccgcctctgtctcctctctcctctctcctctctcctctccgtcgtcctgacaccgcaccacggcgcccatggcgaagcgcccgcgccacgccggaaacggccccggacgatctcagctggtgcctttcgagtggaagctccaccgcctcatactcaacggcggcttggccggtcccggcgcctccgccgaagacgtcgccgacgccctccgcgtccaccacccggagttccgccgccagaagcaaggccccttcgtcgcctccgtccgccgcgctctcacctccatccccatcccctccccatcctcctctgactcctccgacgacggctcctccgcctcccgccgccgcggccaccacgacgcccacgccaccacctcctcctccacctccgtctctgacgccgctgcccgaccgtcgccaccagcccccgcctacgacgtcaccaagtccatgctccgctcccagtacgccgcgcagacgcccaagcggagccagcagctggagatcgaggtcgcggcggagaaaccgcgccgcctcatcacggccgacggcggcggcggaggcgatgccaagccggaggccgccccggcttctgaagggttcggcagaggggacaaggggcccaggttcgccgacctcggcgggatggaggcggtgatcgaggaactcatgatggaggtggtcgtgcccatgtgccatccggagataccgcatcgccttggcgttaggcctgtcgcggggctgctgctgcacgggccgcccggctgcggaaagaccacccttgcccatgccattgctaatgagactggcgtgcccgttctataagatctccgcaccggaagtcgtatctggggtgtctggagcatctgaggaaaacatcaggggcttgtttcagaaggcctatcggactgccccctcgattgtatttattgatgagatagatgcgattgcatccaagagggagaatctacaacgagagatggaacggcggatagttactcaattaatgacatgcatggatcaattccaccagaatattggatcgggaagtagcaatttggaagctgaatcatctgaaaagaaacctggttatgttattgtcattggagccacaaataggcctgatgctgtggaccaagctctgcgaaggccaggcaggtttgaccgagagatatcacttggtgttccagatgagaatgcacggaaacaaatactgaagatgcttactcagcatctccgacttgaaggcgaatttgacttgttcaagatagctagggcaacaccagggtttgttggtgctgacttgaaagcattagtggataaagcaggaaatctagcaatgaagagaataattgatgaaagaagggctcggtgttgcattgagcaggacggtagtagcaagcatgactggtggagacaaccttgggatgaaagtgaggtggacgaactacatattaccatgaatgactttgaggaagcagcaaaaatggttcagccatctttgagaagagaagggttttcttctgtccctggtgtcacatgggatgatgttggaggtcttgattcattaagaaaagagttcgaccgctgcattatccgttgtatcaagcaccccgaagactatgaggtatttggagtgaatatgcaagctggcttcctgctgtttggacctcctggttgcgggaaaacactaatagcaaaagcagtggcacatgaggcaggggctaactttattcacatcaaggggcctgagctattgaacaagtatgttggggagagtgaatcggaagttaggaaaatattcactcgtgcacggactaactccccatgcatcctgttttttgatgaggttgatgctttgacaacaaaaagagggaaagagggaggatgggttgttgaacgtctcttaaatcagttacttatagaacttgatggtgctgatcaaagacaaggtgtctatgtgataggagctacaaacagacgagagagtttcaatattaaaggcacatgctcgtagcaagcccatctcgactgatgttgatttggatgcacttggtcgtcgtgctgagtgcaacaatctcactggtgccgacctagcatcactggtcaatgaagcagccatggcagcactggaagagagactggaattccgtgacaaggggacatcctcactgagttcgtctagcttgattgagatgccgcacttcgaacgtgctctatcgaagatcaagccatcagtatctgaacagcaaatcaagaattatgaggcgttgtcaatgagatactcgtcaaactgatccatcaccagctgtccacatgttagtgtgtatatgaggacaaccttgtgaaaaaaatgtggtgtctgtaccatgtttgcaaggagtgtgcaccgtcaccagcttttacccatttctgaagcacattataatctcatgtgagagcctgtggtagagtagtttagatacaaatagaaatctgcatgttatcgcgatcagttttgtttccattttcatttgtctgtaacagactggcctacaggcaattttgtatgcatctcatcaagatacatcatacatacacgaatgagttgttattgaatcatgcgtggaagtggaatattgcaagaaattgtttttggctactagcacttgtgttcctcagctacagttgtgtgagttttccattggtctcagcagcagcagcttgaggcctggtggtgtccagtttgtccaaagccgcccatagcttggggtcttcgtagtccctgatgacgagcgttgcgccgacggcgagaagcttgtcctctctgctttcctcggcgatggcaaccaccggcatccctgccgcaatgccggcctgcacgccagtggtggagtcctcgaacacgagcgcgtggtccggcgagacgccgagcaggtcgagcgccctgaggtacgggtcagggtagggcttggatcggccgcactcctcggcggtgacgacgagggaaaaaaagtcggagaggccgaggatggagatcatgagctcggcgttggccctgggtgcgttggtgacggcggcgcgcctgagcccgcggccggcggcccagcggcagagcggcgtgaggccggcgatctcccggagcccctcggcggcgtacctggcgaagagcgcctccttctcggcgaagaaggcgtcgaggcggcgctggtcccagtccgggaacaggaagcggccgatctgctcgttgctccggccggccatgttcgccatgccgaactcgggcgtgatgggcacgccgttgttgtagcccaccttgaggagcatctccgaggtggcccggtggtggaacgggtcggagatggccatggtgccgtcgatgtcgaagaggacggcctccagtggggccactctgccgatcccactgctgcaaagcaaccacacacacacacacagggaaagaagataaaactttaaactgggacggccatggttgcggagaacttgctcggattgaaatgaaatcttgacagttttggtcggattgaaacgaaatcttgacagtttctgtctctctgggaatgggggaatagaactgagtgaaatcatgcagaaaatactctggatgattacctttccatggccagttgctgctggatgccaaaactgaggcttcttttggtcttgtggtcactgctcgagtgctgatgctgcctgcacattttataaggagaagactgaagaggcagggagagttggtgaggattccgtggttcagttggcgcggttggtggtagtctctcacattctcatgttccacaccacactgcagcatctcagcagctccacc

SEQ ID NO: 82673 - DNA, 1816 bp, Zea Mays
ctacaaatagtccattgccggagcattgttatggcaaattcaggtgaagcgaagcgaagcgaagcagctagcaatgtcggggatggcggcgcgcatcggcgagtggaagccggtgatggcgatgctcatcttcgacctcatctccgccgtgacgacggccctgatcaagaaggcgctgcaggaggggctggaccgcctggtgcttatcacgctgcggcagctcgtggccaccgtcttcctcgcgccgatcgcctacttcagagagcggtatatatacgccgtcgtacggtgcagaaagaaatgcatgcgtgacgtcgtcttctcagtgaagtggatggccgaagttcagatcgatgattcagaacccaagctagtagctaggctgttgtagtgtggtggtcacatatataatgctggtaaattttgtctttttcatatgcaggagcacgaggcctaagctgacactggagatcctagtctacctcttcttcagcgcagcgtttggcgccgctctctcccagtacaccttcttctacgggctgcagtacaccaccgcgacgttcgccataactttcaccaacgtggctcctgtgctcactttcctcattgcagtcttgctaagggtggagtcactgagcatgaagaacaaggcaggagcagcgaagatcgccgggacgctgacgtcgttcgccggcgtcatgctcctcaccctctacaagggcgtctcactgacgcaccaccaagctggagaagcgagcccggaggatcacagcctcggagcagcagcagcatcgccgtctgacaggaagagctggacgctgggcaccctggcattgctcgccaactgcctgtgcttctccttctggctcctgctgcagtccaggctgaccaagaagtacccggcgctctactccagcacggcctacatgttcctcatcagctcgatgcagggaggggccctcacggcggccattcagaggcgagcgtcggtgtggcttctcacaaggccgatagagatcgtcacggtcttatatacaggaatcatggggtccggagtgggctacgtgctgatgacgtggtgcgtggagaagcgagggccggtgttcacgtcagccttcatccctgtcatccagatcatggtcgccatggtcgacttcttctttctccatgagaatctctatctcgggaggtaagctagctagctgcttttactataccacatcactcagcatccttatcaccagctgtagaatatattgtgaagctagctgctggctagcaaaatggatggatggcctccatccagcaggccatgccacacacacacacacactcagaagatagaggtatagcatgcagctagctgtgtctctggaattgcaatggatggaccaaattgcgtcacttttctgtgctgttgatgcatgcatgcagtgttctgggatccatactcttgatcctgggcctctatattctgctgtggggaaagaagagggatgcctcatcatcagcggctgccaaggaagaggaagatggagagaaagaagatgaggaggaggaggacaaagagaagcaagtcagatcatgaggaccagaccactctcatatatatatggattaggaccaaattaaagatacagttcttcggaatgtgtgatgatctatacttgacagatatatatatatatatatatatatatatatatatatatatatatatagtatttgtttaatatataactctgctagtatatatagtatttgttctgaattcaaaatcagtatcaatttataagtgttctctctaaaaagaaac

SEQ ID NO: 82674 - DNA, 1889 bp, Zea Mays
gctatggtattggtatggtagctagctagggttctgtaaccaatctcacccatcttttctttccttcgtcggagaaggggagaaaagcgtacctgaaacgattccctgcattccattccgctgcatacttgcattgcatctcatccctcctgctcctgcgtcctcctcctctatttctctcctgctgcttgctactacctcatcgatccattccatccatcgccgaggggggagggccgccgcccgcccgggtcgcatcgcatcgcctggtcggccggggactcggggcaggcgagcgacactagctataaaagacctcccgccgcctgcgactgggccgtgtgcaagcaaattaaagcgcaaggccgatccgagggtggactgtggagggccggccatggtgatgatgatgcggtcgtgcctcggcggtggcctgctgccggtggcggtcatgctctgcctcaacgtggtggcggcggtcatggtatcgctcgtcaaggtggccatggacggcggcatgaaaccgctcgtgatcgtcaccctgcagcagctcaccgccgccgtcttcctcgcgccaatcgcattcttcaaggagaggaagtcgaggccaaagctgacgctggagatcttcgcctacatcttcgtcagtgcggcgctcggggcagctcttcgtcagtacatgatcttcgtggccctgcgctacaccacggccaccttcgtgaccgccttctccaacatcgcccccgtgctcaccttcctcctggccgtcgccacgcggtccgaagcgctggacctcaagagcaggacggggttggcgaagctgctgggcacgctggtgtcgctggccggcgccatggtgctcaccctctacaagggcgtggcgctcacccacgcggcggcagcctcgcaggaccagcagcagcactcccacggccggttgccgccgagcgccgccgacagccgcggcaagtggacgctgggcaccgtggccatcctgggcaactgcgtctgcctctcctgctggttcctgctccacggccgcctcgccaagaagtacccgcacgtctactcctgcaacgcgctcatgtccttgctcagcttcctccaggtcgccgtcgtcggcctctgcacccagcgcagcatctccccctggatcgtcaccagcaagttcaacatcctcaccgtcctatacgccagaggagccgtgttcgtggccgccttcataccggtggtgcagatcatcgtctccgtcatcgacttctccatcctgcacgagcagctctacctcggaagcgtgctgggatcagtgctagtgataggtggcctttaccttctgctgtggggcaagaggcaggaggccctgcactgtcctcctcctcctcctccaaaggttgccgaagaagaccctgctgacaaagagcagcagcaagtgcagcacaactgaagacggacagcatcctctgactgttggtcgtttggttgtaacagtgccagcaataagatccctctgcctccttttcttttcttttggtgtctcaggggggtgggcaatgttccttccttctcagatcgatcaccaacaaagtgtttagattctaatccaaaacagtagaatggtcttaaatacagtactcctgcttactgatgatagcaacaccactaccaactaggcctctggagaaatacagagtagagtgtgtgtgcgcgcaatactggagagcagaatattcctgcaaatatagtacgcagttgctgtccgcctttttcttatgaggacatatctggtgcacatggaggattggtgcacatggtgcacatattaaatcaccaccacttattttaaatctaacgcctctaattgatcattcaatttacaaataacaccttcc

SEQ ID NO: 82675 - DNA, 2143 bp, Zea Mays
aagaaagagagagaggtggccacatcctgatctgtgttcagtgttgtgctgctgctgggtttgtggccactggccaggcaggccaacaccaatggcgactgcatcattgcccacacaccgaaagctaagcaagggagaaataaagggagaacagctcccgtgcactacccccagcccagcagctatggtattggtatggtagctagctagggttctgtaaccaatctcacccatcttttctttccttcgtcggagaaggggagaaaagcgtacctgaaacgattccctgcattccattccgctgcatacttgcattgcatctcatccctcctgctcctgcgtcctcctcctctatttctctcctgctgcttgctactacctcatcgatccattccatccatcgccgaggggggagggccgccgcccgcccgggtcgcatcgcatcgcctggtcggccggggactcggggcaggcgagcgacactagctataaaagacctcccgccgcctgcgactgggccgtgtgcaagcaaattaaagcgcaaggccgatccgagggtggactgtggagggccggccatggtgatgatgatgcggtcgtgcctcggcggtggcctgctgccggtggcggtcatgctctgcctcaacgtggtggcggcggtcatggtatcgctcgtcaaggtggccatggacggcggcatgaaaccgctcgtgatcgtcaccctgcagcagctcaccgccgccgtcttcctcgcgccaatcgcattcttcaaggagaggaagtcgaggccaaagctgacgctggagatcttcgcctacatcttcgtcagtgcggcgctcggcctgcgccatatattgcagggcagctcttcgtcagtacatgatcttcgtggccctgcgctacaccacggccaccttcgtgaccgccttctccaacatcgcccccgtgctcaccttcctcctggccgtcgccacgcggtccgaagcgctggacctcaagagcaggacggggttggcgaagctgctgggcacgctggtgtcgctggccggcgccatggtgctcaccctctacaagggcgtggcgctcacccacgcggcggcagcctcgcaggaccagcagcagcactcccacggccggttgccgccgagcgccgccgacagccgcggcaagtggacgctgggcaccgtggccatcctgggcaactgcgtctgcctctcctgctggttcctgctccacggccgcctcgccaagaagtacccgcacgtctactcctgcaacgcgctcatgtccttgctcagcttcctccaggtcgccgtcgtcggcctctgcacccagcgcagcatctccccctggatcgtcaccagcaagttcaacatcctcaccgtcctatacgccggcatcgtcggctgcggcgtctcgttcgtgctggtgacatggtgcatcgagaagagaggagccgtgttcgtggccgccttcataccggtggtgcagatcatcgtctccgtcatcgacttctccatcctgcacgagcagctctacctcggaagcgtgctgggatcagtgctagtgataggtggcctttaccttctgctgtggggcaagaggcaggaggccctgcactgtcctcctcctcctcctccaaaggttgccgaagaagaccctgctgacaaagagcagcagcaagtgcagcacaactgaagacggacagcatcctctgactgttggtcgtttggttgtaacagtgccagcaataagatccctctgcctccttttcttttcttttggtgtctcaggggggtgggcaatgttccttccttctcagatcgatcaccaacaaagtgtttagattctaatccaaaacagtagaatggtcttaaatacagtactcctgcttactgatgatagcaacaccactaccaactaggcctctggagaaatacagagtagagtgtgtgtgcgcgcaatactggagagcagaatattcctgcaaatatagtacgcagttgctgtccgcctttttcttatgaggacatatctggtgcacatggaggattggtgcacatggtgcacatattaaatcaccaccacttattttaaatctaacgcctctaattgatcattcaatttacaaataacaccttcc

SEQ ID NO: 82676 - DNA, 1686 bp, Zea Mays
gattgcctggacccagccgttgatcgtccgacaggtggtcccggcccgtcatcagctccggcagaagggtgggagtacggcaaaaggcctgcctctctgcgactgatctccggcggcgaggcgccgcaccggggtatgggccaggatgtggtcgcgcacgtctacgacgtcgccaccgccggctccgacaccaccgtgctccacatcaaccgcttctttaaggacgccatcggcctcggcggcatcttccacaccgccatccagttgaggctctgttgtgatcaactcctgagcatctcggctaacaggtctacggtgatgaagaatggtcctttggctactgtgaacgtggcactggggtttttagctgtcccccatgcaaaaatcccatgtacacttatcgcgagtccatagtgctggggaagaccaactgctgtatcctcaaggtaaatcagatactaagggagctgagctgggagtggcctggacattcatatgaactcctgtcaagaaactgcaatcacttctgcaataccttctgcgaaaagcttgaagtatcgaagcttccaggttgggtcaatcgctttgcaaatgcgggtgacgctgctctagaggtcgctgaaaccacagcaggaaagctgaaacaagcgaaaaaggaaatcgtgaccgcatgcaaagcagcctcaacatttttgaccggcacatcgtcaagcgcctcttcaaatgcggaggatacgggtggctcaacctcgacaggaaattccctcttcgagggggcatggatccgaagtatcatcggtatgacaatgaagccgtcgaagagcctagtctgtgtagatagttcagatagcgacagctccgggagcgaatcagaatcagatggcgatcggcccaacagcgatgacaacgctgagcgacaagctaaaggcgtgaagcaggagcgaggcacgaaaaaaaagaataacggaccacattgccattcatgaagctcactcacaccaatactgcagagagaggaaagacttctacatgctgccgggagcagacctacagcaggaactaactttacaattatgttcatttctggttgagagctgggagcggcgaaagggccctgaggagtgcggaggcgatggagcgcaccacaatgcgtgcaatcttgagcttgatttgcccgcgccgtgggagcgggcgagccgtcctttgcctttcagccctgtaaactctggtgagacgggttgtgctcgctttctctgccatccttgtcaaacgaaggagatgtttcttctgtagcgagtagaagctgacggtggaggagatgttagagagcctggttgcacttatgcttagtttcatgctactgtggtctatttatagacgtcgaggagtttatctgaacataagacatgacagctagattcttgtttctgtgtagtatcaacagaatgctgttcgttataataatcctgcagtgtctgtaggtatgagaaacctcagctggtgtgtgtgtgtgtgtgtgtgtgtttgagtaatcatgattggtctgttcgtccgtgtggccgaatcttcagatctttgacttggtgatgtccatacgcgtctcttcggagcagatacgtatgcatcctatgaagaacaaatgattggcttgaatggtagtgtggcatttggcgcctcacctctgat

SEQ ID NO: 82677 - DNA, 2375 bp, Zea Mays
gattgcctggacccagccgttgatcgtccgacaggtggtcccggcccgtcatcagctccggcagaagggtgggagtacggcaaaaggcctgcctctctgcgactgatctccggcggcgaggcgccgcaccggggtatgggccaggatgtggtcgcgcacgtctacgacgtcgccaccgccggctccgacaccaccgtgctccacatcaaccgcttctttaaggacgccatcggcctcggcggcatcttccacaccgccatccaggtcatccgtttctccaaatcccaccaccattttttgaatgcctgcaacgcccgcaaagattggatctcgacgccagcggtttagtgttcgagagaatcgtttcttttatatatagtggcgttggttaatgcgtccaatcagtttttaacccccaaatcttaattcaatgctgttgctactgaatgaatgggggcgattatctttttattgctcctgtgaataatctaacttgatctttccttgggattgacaaactgtgcttctgatacgtgtatgtaactgctagccatagttaccatttagcctgataccgtgcccctggaagagggtgtgacttcaaagttcaaactgtaattctcaatgggagcttggagatttcctatgaggccactagggttgaatgcagccttgtggtaaaagagatccctgtatcgtcctaaggatgatgccacggattgtgaaagaaaaaaactctttattctttatagccattctgctccttgttctgcgaactgcttgttaggctgctttactgctctagaatgggcactgattattaggctcgtttactgctctctttaacgaaaaatgtgtagattcatcccacaaaactagtcctttatggtatcaatgagcttatttgtgattggattcctagcaactggctaatcattagtaggtgcttatagttgaggctctgttgtgatcaactcctgagcatctcggctaacaggtctacggtgatgaagaatggtcctttggctactgtgaacgtggcactggggtttttagctgtcccccatgcaaaaatcccatgtacacttatcgcgagtccatagtgctggggaagaccaactgctgtatcctcaaggtaaatcagatactaagggagctgagctgggagtggcctggacattcatatgaactcctgtcaagaaactgcaatcacttctgcaataccttctgcgaaaagcttgaagtatcgaagcttccaggttgggtcaatcgctttgcaaatgcgggtgacgctgctctagaggtcgctgaaaccacagcaggaaagctgaaacaagcgaaaaaggaaatcgtgaccgcatgcaaagcagcctcaacatttttgaccggcacatcgtcaagcgcctcttcaaatgcggaggatacgggtggctcaacctcgacaggaaattccctcttcgagggggcatggatccgaagtatcatcggtatgacaatgaagccgtcgaagagcctagtctgtgtagatagttcagatagcgacagctccgggagcgaatcagaatcagatggcgatcggcccaacagcgatgacaacgctgagcgacaagctaaaggcgtgaagcaggagcgaggcacgaaaaaaaagaataacggaccacattgccattcatgaagctcactcacaccaatactgcagagagaggaaagacttctacatgctgccgggagcagacctacagcaggaactaactttacaattatgttcatttctggttgagagctgggagcggcgaaagggccctgaggagtgcggaggcgatggagcgcaccacaatgcgtgcaatcttgagcttgatttgcccgcgccgtgggagcgggcgagccgtcctttgcctttcagccctgtaaactctggtgagacgggttgtgctcgctttctctgccatccttgtcaaacgaaggagatgtttcttctgtagcgagtagaagctgacggtggaggagatgttagagagcctggttgcacttatgcttagtttcatgctactgtggtctatttatagacgtcgaggagtttatctgaacataagacatgacagctagattcttgtttctgtgtagtatcaacagaatgctgttcgttataataatcctgcagtgtctgtaggtatgagaaacctcagctggtgtgtgtgtgtgtgtgtgtgtgtttgagtaatcatgattggtctgttcgtccgtgtggccgaatcttcagatctttgacttggtgatgtccatacgcgtctcttcggagcagatacgtatgcatcctatgaagaacaaatgattggcttgaatggtagtgtggcatttggcgcctcacctctgat

SEQ ID NO: 82678 - DNA, 1773 bp, Zea Mays
gaacccttcaaagtttttgaatttgacttttcggaacgtccagatagtcatcgtgaaacaaagattgagataaaagcaacagctgatgggcatgctcatgctattgtttcatggtgggtgcttcagttggattcttctggatcagtcttttactcaactgctcctagatgggcacgaaggattggtgtgatcattggaagcagtgtgtttggtttatacaagggacaggggctcctgcaaagaaagatcaaactctttctttgagcgctagccataatcaaactagcatctcatatcagttgaatataaatgatgaaggaagtagaagccccaaaagtaatcatctaacactgttaccagaaagggtagcactttatggtgataaagtttggagatcagcgttgataagtgtaatcaggaattatacgagcgaaagatcctctccgatctgcattgtggctgatgacagcgtgttcctagctctcattgtttcttttctgttaccatcttcaaaagtcctcgctatgtttccatgtcttagagacagtggcctcaactatcttcaagctgttgcagatgcaaataatttatccatggaccggattaaagtgattggtaaaaaggcatcgtcccttactacaaatgacttaaatcatgaaaaggttaatatgttagtgggggaacccttttatcatggaagtgaagggatgctgccatggcaaaatctgcgtttctggaatgaaaggactctgcttgatccgttgctctctgaggatgcattcatcatgccttgtaagggaatattaaggttctgtgccatgtcacttccggacttgtggagaagccgtcgtagccttaaagatgttgagggttttgaccactcagttgttaatgatactttaggggcctgtggtgacctgcctggagagcaacaaggcccttgcctaccttattatgtgtggcaatgcggttataccaagaaattaagtgaagtttactctctcatggatttgaacttttctgagcctatccactcttgttttggtgaaacaaaggttgagtttgcccacgatggaacatgccatgggttcgctgtttggatcgactgggtacttgacaaggaaaattccatagtgataagcaccgggccagagagcagatactggaagcaaggggtgcagctgcttagcacgcctgtacaagtgaacccagcgaattcggtgatgcacgtggaggcgaatttcgatgctgacattggggagctcacgtttaaatccaccacgctctcatgatgccaactgtaatgtgtggacaaccaagcctcatgcgtgtgttgttcttaaaagttagcatttgtcgctgcgttttgttcgtcggagctcctgatgtgagtcaagcactcaagctcatgattacgtgtgtgttctgtcatgctagcacaagcaactgcctcctcggtggagctgttttttcatggtcttgtttgttagcccctcacgtcgtgaggaagatgctctagctgctgtcaagaatcccctaccaaaacagagcctgccagagcatgtctctggccagtctccctcgaccctctttccttattccgtgtgtatatcattttcccaggtcccctctccgcctcttcctcgtcatttttctcaggtccctcttagcacacaagttcaaggagagaatgcaggctccatccatgtcatgggtgctatttaagttaggtttggcctatttttaactaataaaataaaataaattttaaga

SEQ ID NO: 82679 - DNA, 2085 bp, Zea Mays
cctcttaattctgttgtacccaccgtattttgcctctgaattgagccatactatcgttctggcaaacagttccatatcgagctactacttatggagtgttggttgagagcacgtccttgtggaagatgcatgatctgcacagcaatgaagcaaatgctgaagatggtgtgaggcttattcccagtggaacacaaattgttctttctgtgaagtcacagcaacatgcgatgcaatgtgatgcgctggcagatgaaataagattgctgtcagaacccttcaaagtttttgaatttgacttttcggaacgtccagatagtcatcgtgaaacaaagattgagataaaagcaacagctgatgggcatgctcatgctattgtttcatggtgggtgcttcagttggattcttctggatcagtcttttactcaactgctcctagatgggtgagacaatccagtggtgtcgatttaccacaatatgccaatggcacgaaggattggtgtgatcattggaagcagtgtgtttggtttatacaagggacaggggctcctgcaaagaaagatcaaactctttctttgagcgctagccataatcaaactagcatctcatatcagttgaatataaatgatgaaggaagtagaagccccaaaagtaatcatctaacactgttaccagaaagggtagcactttatggtgataaagtttggagatcagcgttgataagtgtaatcaggaattatacgagcgaaagatcctctccgatctgcattgtggctgatgacagcgtgttcctagctctcattgtttcttttctgttaccatcttcaaaagtcctcgctatgtttccatgtcttagagacagtggcctcaactatcttcaagctgttgcagatgcaaataatttatccatggaccggattaaagtgattggtaaaaaggcatcgtcccttactacaaatgacttaaatcatgaaaaggttaatatgttagtgggggaacccttttatcatggaagtgaagggatgctgccatggcaaaatctgcgtttctggaatgaaaggactctgcttgatccgttgctctctgaggatgcattcatcatgccttgtaagggaatattaaggttctgtgccatgtcacttccggacttgtggagaagccgtcgtagccttaaagatgttgagggttttgaccactcagttgttaatgatactttaggggcctgtggtgacctgcctggagagcaacaaggcccttgcctaccttattatgtgtggcaatgcggttataccaagaaattaagtgaagtttactctctcatggatttgaacttttctgagcctatccactcttgttttggtgaaacaaaggttgagtttgcccacgatggaacatgccatgggttcgctgtttggatcgactgggtacttgacaaggaaaattccatagtgataagcaccgggccagagagcagatactggaagcaaggggtgcagctgcttagcacgcctgtacaagtgaacccagcgaattcggtgatgcacgtggaggcgaatttcgatgctgacattggggagctcacgtttaaatccaccacgctctcatgatgccaactgtaatgtgtggacaaccaagcctcatgcgtgtgttgttcttaaaagttagcatttgtcgctgcgttttgttcgtcggagctcctgatgtgagtcaagcactcaagctcatgattacgtgtgtgttctgtcatgctagcacaagcaactgcctcctcggtggagctgttttttcatggtcttgtttgttagcccctcacgtcgtgaggaagatgctctagctgctgtcaagaatcccctaccaaaacagagcctgccagagcatgtctctggccagtctccctcgaccctctttccttattccgtgtgtatatcattttcccaggtcccctctccgcctcttcctcgtcatttttctcaggtccctcttagcacacaagttcaaggagagaatgcaggctccatccatgtcatgggtgctatttaagttaggtttggcctatttttaactaataaaataaaataaattttaaga

SEQ ID NO: 82680 - DNA, 2903 bp, Zea Mays
cgccgtccgccgatgccgagctgcctcctccctggcatcgcgccacgcccaccgccggccgctctccgcagcctcctcctccgccgcagcagaatggcctcctccgggccggcacgcgccttccagctccgcctcaacccactcaccggcgactccgagtggctcgtcgtcgacgaggcggaaacggaagcggaggtggctgcgcctgcgccgacccaccataagcagctccttgccgccacctcctacctcgacatgctcaacgacgcctcccgcaaccgcgcgtaccgcctcgccattgacgccacggtaacggaccccacctctcgcgtcctcgacatcggagctgggaccgggttgctgtccatgatggcggcgcgagctttggcagctgctggaggtgaaggtaggggaagcgtgtcagcatgcgagtcctaccttccaatgggcaaactaacacggagggtactcagagccaatgggatggaaaataaggtcaaagtatttcacaagcgatcagatgagctcggagttggagtcgagcttgattctcgacctgatatattggtaagtgaaattcttgattctgagctgctgggtgagggtctcatacctactctacagcatgcgcatgacatgctattggtgaaaaatccaaagacagttccatatcgagctactacttatggagtgttggttgagagcacgtccttgtggaagatgcatgatctgcacagcaatgaagcaaatgctgaagatggtgtgaggcttattcccagtggaacacaaattgttctttctgtgaagtcacagcaacatgcgatgcaatgtgatgcgctggcagatgaaataagattgatagtcatcgtgaaacaaagattgagataaaagcaacagctgatgggcatgctcatgctattgtttcatggtgggtgcttcagttggattcttctggatcagtcttttactcaactgctcctagatgggcacgaaggattggtgtgatcattggaagcagtgtgtttggtttatacaagggacaggggctcctgcaaagaaagatcaaactctttctttgagcgctagccataatcaaactagcatctcatatcagttgaatataaatgatgaaggaagtagaagccccaaaagtaatcatctaacactgttaccagaaagggtagcactttatggtgataaagtttggagatcagcgttgataagtgtaatcaggaattatgtaagtaatccctctatgtacttggtatagtatgttcttatccaactagtattccatattatgattgctcaccgtaacttctgaagaattataataataataaataattaaacatcccaatattcaaaagcatgtaatctttcaatctgtgaataattaaaagcatgtaaataattaaacagactgtgacgcagtttcctcattttttagaaaacagaactgtattggtcaacactgatttgacactatttgtaggtgttctatactgtgcatcttgtcaccttaacttttcatgtttaacttttctctgcccagacgagcgaaagatcctctccgatctgcattgtggctgatgacagcgtgttcctagctctcattgtttcttttctgttaccatcttcaaaagtcctcgctatgtttccatgtcttagagacagtggcctcaactatcttcaagctgttgcagatgcaaataatttatccatggaccggattaaagtgattggtaaaaaggcatcgtcccttactacaaatgacttaaatcatgaaaaggttaatatgttagtgggggaacccttttatcatggaagtgaagggatgctgccatggcaaaatctgcgtttctggaatgaaaggactctgcttgatccgttgctctctgaggatgcattcatcatgccttgtaagggaatattaaggttctgtgccatgtcacttccggacttgtggagaagccgtcgtagccttaaagatgttgagggttttgaccactcagttgttaatgatactttaggggcctgtggtgacctgcctggagagcaacaaggcccttgcctaccttattatgtgtggcaatgcggttataccaagaaattaagtgaagtttactctctcatggatttgaacttttctgagcctatccactcttgttttggtgaaacaaaggttgagtttgcccacgatggaacatgccatgggttcgctgtttggatcgactgggtacttgacaaggaaaattccatagtgataagcaccgggccagagagcagatactggaagcaaggggtgcagctgcttagcacgcctgtacaagtgaacccagcgaattcggtgatgcacgtggaggcgaatttcgatgctgacattggggagctcacgtttaaatccaccacgctctcatgatgccaactgtaatgtgtggacaaccaagcctcatgcgtgtgttgttcttaaaagttagcatttgtcgctgcgttttgttcgtcggagctcctgatgtgagtcaagcactcaagctcatgattacgtgtgtgttctgtcatgctagcacaagcaactgcctcctcggtggagctgttttttcatggtcttgtttgttagcccctcacgtcgtgaggaagatgctctagctgctgtcaagaatcccctaccaaaacagagcctgccagagcatgtctctggccagtctccctcgaccctctttccttattccgtgtgtatatcattttcccaggtcccctctccgcctcttcctcgtcatttttctcaggtccctcttagcacacaagttcaaggagagaatgcaggctccatccatgtcatgggtgctatttaagttaggtttggcctatttttaactaataaaataaaataaattttaaga

SEQ ID NO: 82681 - DNA, 2664 bp, Zea Mays
cgccgtccgccgatgccgagctgcctcctccctggcatcgcgccacgcccaccgccggccgctctccgcagcctcctcctccgccgcagcagaatggcctcctccgggccggcacgcgccttccagctccgcctcaacccactcaccggcgactccgagtggctcgtcgtcgacgaggcggaaacggaagcggaggtggctgcgcctgcgccgacccaccataagcagctccttgccgccacctcctacctcgacatgctcaacgacgcctcccgcaaccgcgcgtaccgcctcgccattgacgccacggtaacggaccccacctctcgcgtcctcgacatcggagctgggaccgggttgctgtccatgatggcggcgcgagctttggcagctgctggaggtgaaggtaggggaagcgtgtcagcatgcgagtcctaccttccaatgggcaaactaacacggagggtactcagagccaatgggatggaaaataaggtcaaagtatttcacaagcgatcagatgagctcggagttggagtcgagcttgattctcgacctgatatattggtaagtgaaattcttgattctgagctgctgggtgagggtctcatacctactctacagcatgcgcatgacatgctattggtgaaaaatccaaagacagttccatatcgagctactacttatggagtgttggttgagagcacgtccttgtggaagatgcatgatctgcacagcaatgaagcaaatgctgaagatggtgtgaggcttattcccagtggaacacaaattgttctttctgtgaagtcacagcaacatgcgatgcaatgtgatgcgctggcagatgaaataagattgctgtcagaacccttcaaagtttttgaatttgacttttcggaacgtccagatagtcatcgtgaaacaaagattgagataaaagcaacagctgatgggcatgctcatgctattgtttcatggtgggtgcttcagttggattcttctggatcagtcttttactcaactgctcctagatgggtgagacaatccagtggtgtcgatttaccacaatatgccaatggcacgaaggattggtgtgatcattggaagcagtgtgtttggtttatacaagggacaggggctcctgcaaagaaagatcaaactctttctttgagcgctagccataatcaaactagcatctcatatcagttgaatataaatgatgaaggaagtagaagccccaaaagtaatcatctaacactgttaccagaaagggtagcactttatggtgataaagtttggagatcagcgttgataagtgtaatcaggaattatacgagcgaaagatcctctccgatctgcattgtggctgatgacagcgtgttcctagctctcattgtttcttttctgttaccatcttcaaaagtcctcgctatgtttccatgtcttagagacagtggcctcaactatcttcaagctgttgcagatgcaaataatttatccatggaccggattaaagtgattggtaaaaaggcatcgtcccttactacaaatgacttaaatcatgaaaaggttaatatgttagtgggggaacccttttatcatggaagtgaagggatgctgccatggcaaaatctgcgtttctggaatgaaaggactctgcttgatccgttgctctctgaggatgcattcatcatgccttgtaagggaatattaaggacttgtggagaagccgtcgtagccttaaagatgttgagggttttgaccactcagttgttaatgatactttaggggcctgtggtgacctgcctggagagcaacaaggcccttgcctaccttattatgtgtggcaatgcggttataccaagaaattaagtgaagtttactctctcatggatttgaacttttctgagcctatccactcttgttttggtgaaacaaaggttgagtttgcccacgatggaacatgccatgggttcgctgtttggatcgactgggtacttgacaaggaaaattccatagtgataagcaccgggccaggtaaagagagcagatactggaagcaaggggtgcagctgcttagcacgcctgtacaagtgaacccagcgaattcggtgatgcacgtggaggcgaatttcgatgctgacattggggagctcacgtttaaatccaccacgctctcatgatgccaactgtaatgtgtggacaaccaagcctcatgcgtgtgttgttcttaaaagttagcatttgtcgctgcgttttgttcgtcggagctcctgatgtgagtcaagcactcaagctcatgattacgtgtgtgttctgtcatgctagcacaagcaactgcctcctcggtggagctgttttttcatggtcttgtttgttagcccctcacgtcgtgaggaagatgctctagctgctgtcaagaatcccctaccaaaacagagcctgccagagcatgtctctggccagtctccctcgaccctctttccttattccgtgtgtatatcattttcccaggtcccctctccgcctcttcctcgtcatttttctcaggtccctcttagcacacaagttcaaggagagaatgcaggctccatccatgtcatgggtgctatttaagttaggtttggcctatttttaactaataaaataaaataaattttaaga

SEQ ID NO: 82682 - DNA, 2609 bp, Zea Mays
cgccgtccgccgatgccgagctgcctcctccctggcatcgcgccacgcccaccgccggccgctctccgcagcctcctcctccgccgcagcagaatggcctcctccgggccggcacgcgccttccagctccgcctcaacccactcaccggcgactccgagtggctcgtcgtcgacgaggcggaaacggaagcggaggtggctgcgcctgcgccgacccaccataagcagctccttgccgccacctcctacctcgacatgctcaacgacgcctcccgcaaccgcgcgtaccgcctcgccattgacgccacggtaacggaccccacctctcgcgtcctcgacatcggagctgggaccgggttgctgtccatgatggcggcgcgagctttggcagctgctggaggtgaaggtaggggaagcgtgtcagcatgcgagtcctaccttccaatgggcaaactaacacggagggtactcagagccaatgggatggaaaataaggtcaaagtatttcacaagcgatcagatgagctcggagttggagtcgagcttgattctcgacctgatatattggtaagtgaaattcttgattctgagctgctgggtgagggtctcatacctactctacagcatgcgcatgacatgctattggtgaaaaatccaaagacagttccatatcgagctactacttatggagtgttggttgagagcacgtccttgtggaagatgcatgatctgcacagcaatgaagcaaatgctgaagatggtgtgaggcttattcccagtggaacacaaattgttctttctgtgaagtcacagcaacatgcgatgcaatgtgatgcgctggcagatgaaataagattgatagtcatcgtgaaacaaagattgagataaaagcaacagctgatgggcatgctcatgctattgtttcatggtgggtgcttcagttggattcttctggatcagtcttttactcaactgctcctagatgggtgagacaatccagtggtgtcgatttaccacaatatgccaatggcacgaaggattggtgtgatcattggaagcagtgtgtttggtttatacaagggacaggggctcctgcaaagaaagatcaaactctttctttgagcgctagccataatcaaactagcatctcatatcagttgaatataaatgatgaaggaagtagaagccccaaaagtaatcatctaacactgttaccagaaagggtagcactttatggtgataaagtttggagatcagcgttgataagtgtaatcaggaattatacgagcgaaagatcctctccgatctgcattgtggctgatgacagcgtgttcctagctctcattgtttcttttctgttaccatcttcaaaagtcctcgctatgtttccatgtcttagagacagtggcctcaactatcttcaagctgttgcagatgcaaataatttatccatggaccggattaaagtgattggtaaaaaggcatcgtcccttactacaaatgacttaaatcatgaaaaggttaatatgttagtgggggaacccttttatcatggaagtgaagggatgctgccatggcaaaatctgcgtttctggaatgaaaggactctgcttgatccgttgctctctgaggatgcattcatcatgccttgtaagggaatattaaggacttgtggagaagccgtcgtagccttaaagatgttgagggttttgaccactcagttgttaatgatactttaggggcctgtggtgacctgcctggagagcaacaaggcccttgcctaccttattatgtgtggcaatgcggttataccaagaaattaagtgaagtttactctctcatggatttgaacttttctgagcctatccactcttgttttggtgaaacaaaggttgagtttgcccacgatggaacatgccatgggttcgctgtttggatcgactgggtacttgacaaggaaaattccatagtgataagcaccgggccagagagcagatactggaagcaaggggtgcagctgcttagcacgcctgtacaagtgaacccagcgaattcggtgatgcacgtggaggcgaatttcgatgctgacattggggagctcacgtttaaatccaccacgctctcatgatgccaactgtaatgtgtggacaaccaagcctcatgcgtgtgttgttcttaaaagttagcatttgtcgctgcgttttgttcgtcggagctcctgatgtgagtcaagcactcaagctcatgattacgtgtgtgttctgtcatgctagcacaagcaactgcctcctcggtggagctgttttttcatggtcttgtttgttagcccctcacgtcgtgaggaagatgctctagctgctgtcaagaatcccctaccaaaacagagcctgccagagcatgtctctggccagtctccctcgaccctctttccttattccgtgtgtatatcattttcccaggtcccctctccgcctcttcctcgtcatttttctcaggtccctcttagcacacaagttcaaggagagaatgcaggctccatccatgtcatgggtgctatttaagttaggtttggcctatttttaactaataaaataaaataaattttaaga

SEQ ID NO: 82683 - DNA, 2958 bp, Zea Mays
cgccgtccgccgatgccgagctgcctcctccctggcatcgcgccacgcccaccgccggccgctctccgcagcctcctcctccgccgcagcagaatggcctcctccgggccggcacgcgccttccagctccgcctcaacccactcaccggcgactccgagtggctcgtcgtcgacgaggcggaaacggaagcggaggtggctgcgcctgcgccgacccaccataagcagctccttgccgccacctcctacctcgacatgctcaacgacgcctcccgcaaccgcgcgtaccgcctcgccattgacgccacggtaacggaccccacctctcgcgtcctcgacatcggagctgggaccgggttgctgtccatgatggcggcgcgagctttggcagctgctggaggtgaaggtaggggaagcgtgtcagcatgcgagtcctaccttccaatgggcaaactaacacggagggtactcagagccaatgggatggaaaataaggtcaaagtatttcacaagcgatcagatgagctcggagttggagtcgagcttgattctcgacctgatatattggtaagtgaaattcttgattctgagctgctgggtgagggtctcatacctactctacagcatgcgcatgacatgctattggtgaaaaatccaaagacagttccatatcgagctactacttatggagtgttggttgagagcacgtccttgtggaagatgcatgatctgcacagcaatgaagcaaatgctgaagatggtgtgaggcttattcccagtggaacacaaattgttctttctgtgaagtcacagcaacatgcgatgcaatgtgatgcgctggcagatgaaataagattgctgtcagaacccttcaaagtttttgaatttgacttttcggaacgtccagatagtcatcgtgaaacaaagattgagataaaagcaacagctgatgggcatgctcatgctattgtttcatggtgggtgcttcagttggattcttctggatcagtcttttactcaactgctcctagatgggcacgaaggattggtgtgatcattggaagcagtgtgtttggtttatacaagggacaggggctcctgcaaagaaagatcaaactctttctttgagcgctagccataatcaaactagcatctcatatcagttgaatataaatgatgaaggaagtagaagccccaaaagtaatcatctaacactgttaccagaaagggtagcactttatggtgataaagtttggagatcagcgttgataagtgtaatcaggaattatgtaagtaatccctctatgtacttggtatagtatgttcttatccaactagtattccatattatgattgctcaccgtaacttctgaagaattataataataataaataattaaacatcccaatattcaaaagcatgtaatctttcaatctgtgaataattaaaagcatgtaaataattaaacagactgtgacgcagtttcctcattttttagaaaacagaactgtattggtcaacactgatttgacactatttgtaggtgttctatactgtgcatcttgtcaccttaacttttcatgtttaacttttctctgcccagacgagcgaaagatcctctccgatctgcattgtggctgatgacagcgtgttcctagctctcattgtttcttttctgttaccatcttcaaaagtcctcgctatgtttccatgtcttagagacagtggcctcaactatcttcaagctgttgcagatgcaaataatttatccatggaccggattaaagtgattggtaaaaaggcatcgtcccttactacaaatgacttaaatcatgaaaaggttaatatgttagtgggggaacccttttatcatggaagtgaagggatgctgccatggcaaaatctgcgtttctggaatgaaaggactctgcttgatccgttgctctctgaggatgcattcatcatgccttgtaagggaatattaaggttctgtgccatgtcacttccggacttgtggagaagccgtcgtagccttaaagatgttgagggttttgaccactcagttgttaatgatactttaggggcctgtggtgacctgcctggagagcaacaaggcccttgcctaccttattatgtgtggcaatgcggttataccaagaaattaagtgaagtttactctctcatggatttgaacttttctgagcctatccactcttgttttggtgaaacaaaggttgagtttgcccacgatggaacatgccatgggttcgctgtttggatcgactgggtacttgacaaggaaaattccatagtgataagcaccgggccaggtaaagagagcagatactggaagcaaggggtgcagctgcttagcacgcctgtacaagtgaacccagcgaattcggtgatgcacgtggaggcgaatttcgatgctgacattggggagctcacgtttaaatccaccacgctctcatgatgccaactgtaatgtgtggacaaccaagcctcatgcgtgtgttgttcttaaaagttagcatttgtcgctgcgttttgttcgtcggagctcctgatgtgagtcaagcactcaagctcatgattacgtgtgtgttctgtcatgctagcacaagcaactgcctcctcggtggagctgttttttcatggtcttgtttgttagcccctcacgtcgtgaggaagatgctctagctgctgtcaagaatcccctaccaaaacagagcctgccagagcatgtctctggccagtctccctcgaccctctttccttattccgtgtgtatatcattttcccaggtcccctctccgcctcttcctcgtcatttttctcaggtccctcttagcacacaagttcaaggagagaatgcaggctccatccatgtcatgggtgctatttaagttaggtttggcctatttttaactaataaaataaaataaattttaaga

SEQ ID NO: 82684 - DNA, 2658 bp, Zea Mays
cgccgtccgccgatgccgagctgcctcctccctggcatcgcgccacgcccaccgccggccgctctccgcagcctcctcctccgccgcagcagaatggcctcctccgggccggcacgcgccttccagctccgcctcaacccactcaccggcgactccgagtggctcgtcgtcgacgaggcggaaacggaagcggaggtggctgcgcctgcgccgacccaccataagcagctccttgccgccacctcctacctcgacatgctcaacgacgcctcccgcaaccgcgcgtaccgcctcgccattgacgccacggtaacggaccccacctctcgcgtcctcgacatcggagctgggaccgggttgctgtccatgatggcggcgcgagctttggcagctgctggaggtgaaggtaggggaagcgtgtcagcatgcgagtcctaccttccaatgggcaaactaacacggagggtactcagagccaatgggatggaaaataaggtcaaagtatttcacaagcgatcagatgagctcggagttggagtcgagcttgattctcgacctgatatattggtaagtgaaattcttgattctgagctgctgggtgagggtctcatacctactctacagcatgcgcatgacatgctattggtgaaaaatccaaagacagttccatatcgagctactacttatggagtgttggttgagagcacgtccttgtggaagatgcatgatctgcacagcaatgaagcaaatgctgaagatggtgtgaggcttattcccagtggaacacaaattgttctttctgtgaagtcacagcaacatgcgatgcaatgtgatgcgctggcagatgaaataagattgctgtcagaacccttcaaagtttttgaatttgacttttcggaacgtccagatagtcatcgtgaaacaaagattgagataaaagcaacagctgatgggcatgctcatgctattgtttcatggtgggtgcttcagttggattcttctggatcagtcttttactcaactgctcctagatgggtgagacaatccagtggtgtcgatttaccacaatatgccaatggcacgaaggattggtgtgatcattggaagcagtgtgtttggtttatacaagggacaggggctcctgcaaagaaagatcaaactctttctttgagcgctagccataatcaaactagcatctcatatcagttgaatataaatgatgaaggaagtagaagccccaaaagtaatcatctaacactgttaccagaaagggtagcactttatggtgataaagtttggagatcagcgttgataagtgtaatcaggaattatacgagcgaaagatcctctccgatctgcattgtggctgatgacagcgtgttcctagctctcattgtttcttttctgttaccatcttcaaaagtcctcgctatgtttccatgtcttagagacagtggcctcaactatcttcaagctgttgcagatgcaaataatttatccatggaccggattaaagtgattggtaaaaaggcatcgtcccttactacaaatgacttaaatcatgaaaaggttaatatgttagtgggggaacccttttatcatggaagtgaagggatgctgccatggcaaaatctgcgtttctggaatgaaaggactctgcttgatccgttgctctctgaggatgcattcatcatgccttgtaagggaatattaaggacttgtggagaagccgtcgtagccttaaagatgttgagggttttgaccactcagttgttaatgatactttaggggcctgtggtgacctgcctggagagcaacaaggcccttgcctaccttattatgtgtggcaatgcggttataccaagaaattaagtgaagtttactctctcatggatttgaacttttctgagcctatccactcttgttttggtgaaacaaaggttgagtttgcccacgatggaacatgccatgggttcgctgtttggatcgactgggtacttgacaaggaaaattccatagtgataagcaccgggccagagagcagatactggaagcaaggggtgcagctgcttagcacgcctgtacaagtgaacccagcgaattcggtgatgcacgtggaggcgaatttcgatgctgacattggggagctcacgtttaaatccaccacgctctcatgatgccaactgtaatgtgtggacaaccaagcctcatgcgtgtgttgttcttaaaagttagcatttgtcgctgcgttttgttcgtcggagctcctgatgtgagtcaagcactcaagctcatgattacgtgtgtgttctgtcatgctagcacaagcaactgcctcctcggtggagctgttttttcatggtcttgtttgttagcccctcacgtcgtgaggaagatgctctagctgctgtcaagaatcccctaccaaaacagagcctgccagagcatgtctctggccagtctccctcgaccctctttccttattccgtgtgtatatcattttcccaggtcccctctccgcctcttcctcgtcatttttctcaggtccctcttagcacacaagttcaaggagagaatgcaggctccatccatgtcatgggtgctatttaagttaggtttggcctatttttaactaataaaataaaataaattttaaga

SEQ ID NO: 82685 - DNA, 3165 bp, Zea Mays
cgccgtccgccgatgccgagctgcctcctccctggcatcgcgccacgcccaccgccggccgctctccgcagcctcctcctccgccgcagcagaatggcctcctccgggccggcacgcgccttccagctccgcctcaacccactcaccggcgactccgagtggctcgtcgtcgacgaggcggaaacggaagcggaggtggctgcgcctgcgccgacccaccataagcagctccttgccgccacctcctacctcgacatgctcaacgacgcctcccgcaaccgcgcgtaccgcctcgccattgacgccacggtaacggaccccacctctcgcgtcctcgacatcggagctgggaccgggttgctgtccatgatggcggcgcgagctttggcagctgctggaggtgaaggtaggggaagcgtgtcagcatgcgagtcctaccttccaatgggcaaactaacacggagggtactcagagccaatgggatggaaaataaggtcaaagtatttcacaagcgatcagatgagctcggagttggagtcgagcttgattctcgacctgatatattggtaagtgaaattcttgattctgagctgctgggtgagggtctcatacctactctacagcatgcgcatgacatgctattggtgaaaaatccaaagacagttccatatcgagctactacttatggagtgttggttgagagcacgtccttgtggaagatgcatgatctgcacagcaatgaagcaaatgctgaagatggtgtgaggcttattcccagtggaacacaaattgttctttctgtgaagtcacagcaacatgcgatgcaatgtgatgcgctggcagatgaaataagattgatagtcatcgtgaaacaaagattgagataaaagcaacagctgatgggcatgctcatgctattgtttcatggtgggtgcttcagttggattcttctggatcagtcttttactcaactgctcctagatgggcacgaaggattggtgtgatcattggaagcagtgtgtttggtttatacaagggacaggggctcctgcaaagaaagatcaaactctttctttgagcgctagccataatcaaactagcatctcatatcagttgaatataaatgatgaaggaagtagaagccccaaaagtaatcatctaacactgttaccagaaagggtagcactttatggtgataaagtttggagatcagcgttgataagtgtaatcaggaattatacgagcgaaagatcctctccgatctgcattgtggctgatgacagcgtgttcctagctctcattgtttcttttctgttaccatcttcaaaagtcctcgctatgtttccatgtcttagagacagtggcctcaactatcttcaagctgttgcagatgcaaataatttatccatggaccggattaaagtgattggtaaaaaggcatcgtcccttactacaaatgacttaaatcatgaaaaggttaatatgttagtgggggaacccttttatcatggaagtgaagggatgctgccatggcaaaatctgcgtttctggaatgaaaggactctgcttgatccgttgctctctgaggatgcattcatcatgccttgtaagggaatattaaggttctgtgccatgtcacttccggttagcctatcgaatatctacctttcctttatttctttgcttgggcataaagttattctttttgtgctgagaattacgatgatgcaggacttgtggagaagccgtcgtagccttaaagatgttgagggttttgaccactcagttgttaatgatactttaggggcctgtggtgacctgcctggagagcaacaaggcccttgcctaccttattatgtgtggcaatgcggttataccaagaaattaagtgaagtttactctctcatggatttgaacttttctgagcctatccactcttgttttggtgaaacaaaggtatcattttgattcttctggacaaagtatatcgctgttgacatttgtgtctctgctagtcacttcaaatatgcaagatattgagtactagcctaggtgaattctgacggaattgataaatattggaaaaagtctacataatgccctgaccttagtgatatcgaaccttaaaggttgcagcgttaccagtgaaagcaggccagattgattgtatatattgagcaaattttaatgacatcaaacctcaaagcagtatgactagtagaatagtgtccatgtccatgcgcaaatttgatacatgaatgatatttcttcacatgttcagcaagcatgcaagctattctgtcttagttctcccctcccttattactagataaccttactcttggatgcagctttgctctctcacctgaaatgtgcatgtagttttcttgctgttttctccccccagtctcctatgatcccctgtatcctaccatcttgcttgcaggttgagtttgcccacgatggaacatgccatgggttcgctgtttggatcgactgggtacttgacaaggaaaattccatagtgataagcaccgggccagagagcagatactggaagcaaggggtgcagctgcttagcacgcctgtacaagtgaacccagcgaattcggtgatgcacgtggaggcgaatttcgatgctgacattggggagctcacgtttaaatccaccacgctctcatgatgccaactgtaatgtgtggacaaccaagcctcatgcgtgtgttgttcttaaaagttagcatttgtcgctgcgttttgttcgtcggagctcctgatgtgagtcaagcactcaagctcatgattacgtgtgtgttctgtcatgctagcacaagcaactgcctcctcggtggagctgttttttcatggtcttgtttgttagcccctcacgtcgtgaggaagatgctctagctgctgtcaagaatcccctaccaaaacagagcctgccagagcatgtctctggccagtctccctcgaccctctttccttattccgtgtgtatatcattttcccaggtcccctctccgcctcttcctcgtcatttttctcaggtccctcttagcacacaagttcaaggagagaatgcaggctccatccatgtcatgggtgctatttaagttaggtttggcctatttttaactaataaaataaaataaattttaaga

SEQ ID NO: 82686 - DNA, 2686 bp, Zea Mays
cgccgtccgccgatgccgagctgcctcctccctggcatcgcgccacgcccaccgccggccgctctccgcagcctcctcctccgccgcagcagaatggcctcctccgggccggcacgcgccttccagctccgcctcaacccactcaccggcgactccgagtggctcgtcgtcgacgaggcggaaacggaagcggaggtggctgcgcctgcgccgacccaccataagcagctccttgccgccacctcctacctcgacatgctcaacgacgcctcccgcaaccgcgcgtaccgcctcgccattgacgccacggtaacggaccccacctctcgcgtcctcgacatcggagctgggaccgggttgctgtccatgatggcggcgcgagctttggcagctgctggaggtgaaggtaggggaagcgtgtcagcatgcgagtcctaccttccaatgggcaaactaacacggagggtactcagagccaatgggatggaaaataaggtcaaagtatttcacaagcgatcagatgagctcggagttggagtcgagcttgattctcgacctgatatattggtaagtgaaattcttgattctgagctgctgggtgagggtctcatacctactctacagcatgcgcatgacatgctattggtgaaaaatccaaagacagttccatatcgagctactacttatggagtgttggttgagagcacgtccttgtggaagatgcatgatctgcacagcaatgaagcaaatgctgaagatggtgtgaggcttattcccagtggaacacaaattgttctttctgtgaagtcacagcaacatgcgatgcaatgtgatgcgctggcagatgaaataagattgctgtcagaacccttcaaagtttttgaatttgacttttcggaacgtccagatagtcatcgtgaaacaaagattgagataaaagcaacagctgatgggcatgctcatgctattgtttcatggtgggtgcttcagttggattcttctggatcagtcttttactcaactgctcctagatgggtgagacaatccagtggtgtcgatttaccacaatatgccaatggcacgaaggattggtgtgatcattggaagcagtgtgtttggtttatacaagggacaggggctcctgcaaagaaagatcaaactctttctttgagcgctagccataatcaaactagcatctcatatcagttgaatataaatgatgaaggaagtagaagccccaaaagtaatcatctaacactgttaccagaaagggtagcactttatggtgataaagtttggagatcagcgttgataagtgtaatcaggaattatacgagcgaaagatcctctccgatctgcattgtggctgatgacagcgtgttcctagctctcattgtttcttttctgttaccatcttcaaaagtcctcgctatgtttccatgtcttagagacagtggcctcaactatcttcaagctgttgcagatgcaaataatttatccatggaccggattaaagtgattggtaaaaaggcatcgtcccttactacaaatgacttaaatcatgaaaaggttaatatgttagtgggggaacccttttatcatggaagtgaagggatgctgccatggcaaaatctgcgtttctggaatgaaaggactctgcttgatccgttgctctctgaggatgcattcatcatgccttgtaagggaatattaaggttctgtgccatgtcacttccggacttgtggagaagccgtcgtagccttaaagatgttgagggttttgaccactcagttgttaatgatactttaggggcctgtggtgacctgcctggagagcaacaaggcccttgcctaccttattatgtgtggcaatgcggttataccaagaaattaagtgaagtttactctctcatggatttgaacttttctgagcctatccactcttgttttggtgaaacaaaggttgagtttgcccacgatggaacatgccatgggttcgctgtttggatcgactgggtacttgacaaggaaaattccatagtgataagcaccgggccaggtaaagagagcagatactggaagcaaggggtgcagctgcttagcacgcctgtacaagtgaacccagcgaattcggtgatgcacgtggaggcgaatttcgatgctgacattggggagctcacgtttaaatccaccacgctctcatgatgccaactgtaatgtgtggacaaccaagcctcatgcgtgtgttgttcttaaaagttagcatttgtcgctgcgttttgttcgtcggagctcctgatgtgagtcaagcactcaagctcatgattacgtgtgtgttctgtcatgctagcacaagcaactgcctcctcggtggagctgttttttcatggtcttgtttgttagcccctcacgtcgtgaggaagatgctctagctgctgtcaagaatcccctaccaaaacagagcctgccagagcatgtctctggccagtctccctcgaccctctttccttattccgtgtgtatatcattttcccaggtcccctctccgcctcttcctcgtcatttttctcaggtccctcttagcacacaagttcaaggagagaatgcaggctccatccatgtcatgggtgctatttaagttaggtttggcctatttttaactaataaaataaaataaattttaaga

SEQ ID NO: 82687 - DNA, 2952 bp, Zea Mays
cgccgtccgccgatgccgagctgcctcctccctggcatcgcgccacgcccaccgccggccgctctccgcagcctcctcctccgccgcagcagaatggcctcctccgggccggcacgcgccttccagctccgcctcaacccactcaccggcgactccgagtggctcgtcgtcgacgaggcggaaacggaagcggaggtggctgcgcctgcgccgacccaccataagcagctccttgccgccacctcctacctcgacatgctcaacgacgcctcccgcaaccgcgcgtaccgcctcgccattgacgccacggtaacggaccccacctctcgcgtcctcgacatcggagctgggaccgggttgctgtccatgatggcggcgcgagctttggcagctgctggaggtgaaggtaggggaagcgtgtcagcatgcgagtcctaccttccaatgggcaaactaacacggagggtactcagagccaatgggatggaaaataaggtcaaagtatttcacaagcgatcagatgagctcggagttggagtcgagcttgattctcgacctgatatattggtaagtgaaattcttgattctgagctgctgggtgagggtctcatacctactctacagcatgcgcatgacatgctattggtgaaaaatccaaagacagttccatatcgagctactacttatggagtgttggttgagagcacgtccttgtggaagatgcatgatctgcacagcaatgaagcaaatgctgaagatggtgtgaggcttattcccagtggaacacaaattgttctttctgtgaagtcacagcaacatgcgatgcaatgtgatgcgctggcagatgaaataagattgctgtcagaacccttcaaagtttttgaatttgacttttcggaacgtccagatagtcatcgtgaaacaaagattgagataaaagcaacagctgatgggcatgctcatgctattgtttcatggtgggtgcttcagttggattcttctggatcagtcttttactcaactgctcctagatgggcacgaaggattggtgtgatcattggaagcagtgtgtttggtttatacaagggacaggggctcctgcaaagaaagatcaaactctttctttgagcgctagccataatcaaactagcatctcatatcagttgaatataaatgatgaaggaagtagaagccccaaaagtaatcatctaacactgttaccagaaagggtagcactttatggtgataaagtttggagatcagcgttgataagtgtaatcaggaattatgtaagtaatccctctatgtacttggtatagtatgttcttatccaactagtattccatattatgattgctcaccgtaacttctgaagaattataataataataaataattaaacatcccaatattcaaaagcatgtaatctttcaatctgtgaataattaaaagcatgtaaataattaaacagactgtgacgcagtttcctcattttttagaaaacagaactgtattggtcaacactgatttgacactatttgtaggtgttctatactgtgcatcttgtcaccttaacttttcatgtttaacttttctctgcccagacgagcgaaagatcctctccgatctgcattgtggctgatgacagcgtgttcctagctctcattgtttcttttctgttaccatcttcaaaagtcctcgctatgtttccatgtcttagagacagtggcctcaactatcttcaagctgttgcagatgcaaataatttatccatggaccggattaaagtgattggtaaaaaggcatcgtcccttactacaaatgacttaaatcatgaaaaggttaatatgttagtgggggaacccttttatcatggaagtgaagggatgctgccatggcaaaatctgcgtttctggaatgaaaggactctgcttgatccgttgctctctgaggatgcattcatcatgccttgtaagggaatattaaggttctgtgccatgtcacttccggacttgtggagaagccgtcgtagccttaaagatgttgagggttttgaccactcagttgttaatgatactttaggggcctgtggtgacctgcctggagagcaacaaggcccttgcctaccttattatgtgtggcaatgcggttataccaagaaattaagtgaagtttactctctcatggatttgaacttttctgagcctatccactcttgttttggtgaaacaaaggttgagtttgcccacgatggaacatgccatgggttcgctgtttggatcgactgggtacttgacaaggaaaattccatagtgataagcaccgggccagagagcagatactggaagcaaggggtgcagctgcttagcacgcctgtacaagtgaacccagcgaattcggtgatgcacgtggaggcgaatttcgatgctgacattggggagctcacgtttaaatccaccacgctctcatgatgccaactgtaatgtgtggacaaccaagcctcatgcgtgtgttgttcttaaaagttagcatttgtcgctgcgttttgttcgtcggagctcctgatgtgagtcaagcactcaagctcatgattacgtgtgtgttctgtcatgctagcacaagcaactgcctcctcggtggagctgttttttcatggtcttgtttgttagcccctcacgtcgtgaggaagatgctctagctgctgtcaagaatcccctaccaaaacagagcctgccagagcatgtctctggccagtctccctcgaccctctttccttattccgtgtgtatatcattttcccaggtcccctctccgcctcttcctcgtcatttttctcaggtccctcttagcacacaagttcaaggagagaatgcaggctccatccatgtcatgggtgctatttaagttaggtttggcctatttttaactaataaaataaaataaattttaaga

SEQ ID NO: 82688 - DNA, 3170 bp, Zea Mays
cgccgtccgccgatgccgagctgcctcctccctggcatcgcgccacgcccaccgccggccgctctccgcagcctcctcctccgccgcagcagaatggcctcctccgggccggcacgcgccttccagctccgcctcaacccactcaccggcgactccgagtggctcgtcgtcgacgaggcggaaacggaagcggaggtggctgcgcctgcgccgacccaccataagcagctccttgccgccacctcctacctcgacatgctcaacgacgcctcccgcaaccgcgcgtaccgcctcgccattgacgccacggtaacggaccccacctctcgcgtcctcgacatcggagctgggaccgggttgctgtccatgatggcggcgcgagctttggcagctgctggaggtgaaggtaggggaagcgtgtcagcatgcgagtcctaccttccaatgggcaaactaacacggagggtactcagagccaatgggatggaaaataaggtcaaagtatttcacaagcgatcagatgagctcggagttggagtcgagcttgattctcgacctgatatattggtaagtgaaattcttgattctgagctgctgggtgagggtctcatacctactctacagcatgcgcatgacatgctattggtgaaaaatccaaagacagttccatatcgagctactacttatggagtgttggttgagagcacgtccttgtggaagatgcatgatctgcacagcaatgaagcaaatgctgaagatggtgtgaggcttattcccagtggaacacaaattgttctttctgtgaagtcacagcaacatgcgatgcaatgtgatgcgctggcagatgaaataagattgctgtcagaacccttcaaagtttttgaatttgacttttcggaacgtccagatagtcatcgtgaaacaaagattgagataaaagcaacagctgatgggcatgctcatgctattgtttcatggtgggtgcttcagttggattcttctggatcagtcttttactcaactgctcctagatgggtgagacaatccagtggtgtcgatttaccacaatatgccaatggcacgaaggattggtgtgatcattggaagcagtgtgtttggtttatacaagggacaggggctcctgcaaagaaagatcaaactctttctttgagcgctagccataatcaaactagcatctcatatcagttgaatataaatgatgaaggaagtagaagccccaaaagtaatcatctaacactgttaccagaaagggtagcactttatggtgataaagtttggagatcagcgttgataagtgtaatcaggaattatacgagcgaaagatcctctccgatctgcattgtggctgatgacagcgtgttcctagctctcattgtttcttttctgttaccatcttcaaaagtcctcgctatgtttccatgtcttagagacagtggcctcaactatcttcaagctgttgcagatgcaaataatttatccatggaccggattaaagtgattggtaaaaaggcatcgtcccttactacaaatgacttaaatcatgaaaaggttaatatgttagtgggggaacccttttatcatggaagtgaagggatgctgccatggcaaaatctgcgtttctggaatgaaaggactctgcttgatccgttgctctctgaggatgcattcatcatgccttgtaagggaatattaaggttctgtgccatgtcacttccggacttgtggagaagccgtcgtagccttaaagatgttgagggttttgaccactcagttgttaatgatactttaggggcctgtggtgacctgcctggagagcaacaaggcccttgcctaccttattatgtgtggcaatgcggttataccaagaaattaagtgaagtttactctctcatggatttgaacttttctgagcctatccactcttgttttggtgaaacaaaggtatcattttgattcttctggacaaagtatatcgctgttgacatttgtgtctctgctagtcacttcaaatatgcaagatattgagtactagcctaggtgaattctgacggaattgataaatattggaaaaagtctacataatgccctgaccttagtgatatcgaaccttaaaggttgcagcgttaccagtgaaagcaggccagattgattgtatatattgagcaaattttaatgacatcaaacctcaaagcagtatgactagtagaatagtgtccatgtccatgcgcaaatttgatacatgaatgatatttcttcacatgttcagcaagcatgcaagctattctgtcttagttctcccctcccttattactagataaccttactcttggatgcagctttgctctctcacctgaaatgtgcatgtagttttcttgctgttttctccccccagtctcctatgatcccctgtatcctaccatcttgcttgcaggttgagtttgcccacgatggaacatgccatgggttcgctgtttggatcgactgggtacttgacaaggaaaattccatagtgataagcaccgggccagagagcagatactggaagcaaggggtgcagctgcttagcacgcctgtacaagtgaacccagcgaattcggtgatgcacgtggaggcgaatttcgatgctgacattggggagctcacgtttaaatccaccacgctctcatgatgccaactgtaatgtgtggacaaccaagcctcatgcgtgtgttgttcttaaaagttagcatttgtcgctgcgttttgttcgtcggagctcctgatgtgagtcaagcactcaagctcatgattacgtgtgtgttctgtcatgctagcacaagcaactgcctcctcggtggagctgttttttcatggtcttgtttgttagcccctcacgtcgtgaggaagatgctctagctgctgtcaagaatcccctaccaaaacagagcctgccagagcatgtctctggccagtctccctcgaccctctttccttattccgtgtgtatatcattttcccaggtcccctctccgcctcttcctcgtcatttttctcaggtccctcttagcacacaagttcaaggagagaatgcaggctccatccatgtcatgggtgctatttaagttaggtttggcctatttttaactaataaaataaaataaattttaaga

SEQ ID NO: 82689 - DNA, 2637 bp, Zea Mays
cgccgtccgccgatgccgagctgcctcctccctggcatcgcgccacgcccaccgccggccgctctccgcagcctcctcctccgccgcagcagaatggcctcctccgggccggcacgcgccttccagctccgcctcaacccactcaccggcgactccgagtggctcgtcgtcgacgaggcggaaacggaagcggaggtggctgcgcctgcgccgacccaccataagcagctccttgccgccacctcctacctcgacatgctcaacgacgcctcccgcaaccgcgcgtaccgcctcgccattgacgccacggtaacggaccccacctctcgcgtcctcgacatcggagctgggaccgggttgctgtccatgatggcggcgcgagctttggcagctgctggaggtgaaggtaggggaagcgtgtcagcatgcgagtcctaccttccaatgggcaaactaacacggagggtactcagagccaatgggatggaaaataaggtcaaagtatttcacaagcgatcagatgagctcggagttggagtcgagcttgattctcgacctgatatattggtaagtgaaattcttgattctgagctgctgggtgagggtctcatacctactctacagcatgcgcatgacatgctattggtgaaaaatccaaagacagttccatatcgagctactacttatggagtgttggttgagagcacgtccttgtggaagatgcatgatctgcacagcaatgaagcaaatgctgaagatggtgtgaggcttattcccagtggaacacaaattgttctttctgtgaagtcacagcaacatgcgatgcaatgtgatgcgctggcagatgaaataagattgctgtcagaacccttcaaagtttttgaatttgacttttcggaacgtccagatagtcatcgtgaaacaaagattgagataaaagcaacagctgatgggcatgctcatgctattgtttcatggtgggtgcttcagttggattcttctggatcagtcttttactcaactgctcctagatgggcacgaaggattggtgtgatcattggaagcagtgtgtttggtttatacaagggacaggggctcctgcaaagaaagatcaaactctttctttgagcgctagccataatcaaactagcatctcatatcagttgaatataaatgatgaaggaagtagaagccccaaaagtaatcatctaacactgttaccagaaagggtagcactttatggtgataaagtttggagatcagcgttgataagtgtaatcaggaattatacgagcgaaagatcctctccgatctgcattgtggctgatgacagcgtgttcctagctctcattgtttcttttctgttaccatcttcaaaagtcctcgctatgtttccatgtcttagagacagtggcctcaactatcttcaagctgttgcagatgcaaataatttatccatggaccggattaaagtgattggtaaaaaggcatcgtcccttactacaaatgacttaaatcatgaaaaggttaatatgttagtgggggaacccttttatcatggaagtgaagggatgctgccatggcaaaatctgcgtttctggaatgaaaggactctgcttgatccgttgctctctgaggatgcattcatcatgccttgtaagggaatattaaggttctgtgccatgtcacttccggacttgtggagaagccgtcgtagccttaaagatgttgagggttttgaccactcagttgttaatgatactttaggggcctgtggtgacctgcctggagagcaacaaggcccttgcctaccttattatgtgtggcaatgcggttataccaagaaattaagtgaagtttactctctcatggatttgaacttttctgagcctatccactcttgttttggtgaaacaaaggttgagtttgcccacgatggaacatgccatgggttcgctgtttggatcgactgggtacttgacaaggaaaattccatagtgataagcaccgggccagagagcagatactggaagcaaggggtgcagctgcttagcacgcctgtacaagtgaacccagcgaattcggtgatgcacgtggaggcgaatttcgatgctgacattggggagctcacgtttaaatccaccacgctctcatgatgccaactgtaatgtgtggacaaccaagcctcatgcgtgtgttgttcttaaaagttagcatttgtcgctgcgttttgttcgtcggagctcctgatgtgagtcaagcactcaagctcatgattacgtgtgtgttctgtcatgctagcacaagcaactgcctcctcggtggagctgttttttcatggtcttgtttgttagcccctcacgtcgtgaggaagatgctctagctgctgtcaagaatcccctaccaaaacagagcctgccagagcatgtctctggccagtctccctcgaccctctttccttattccgtgtgtatatcattttcccaggtcccctctccgcctcttcctcgtcatttttctcaggtccctcttagcacacaagttcaaggagagaatgcaggctccatccatgtcatgggtgctatttaagttaggtttggcctatttttaactaataaaataaaataaattttaaga

SEQ ID NO: 82690 - DNA, 2480 bp, Zea Mays
cgccgtccgccgatgccgagctgcctcctccctggcatcgcgccacgcccaccgccggccgctctccgcagcctcctcctccgccgcagcagaatggcctcctccgggccggcacgcgccttccagctccgcctcaacccactcaccggcgactccgagtggctcgtcgtcgacgaggcggaaacggaagcggaggtggctgcgcctgcgccgacccaccataagcagctccttgccgccacctcctacctcgacatgctcaacgacgcctcccgcaaccgcgcgtaccgcctcgccattgacgccacggtaacggaccccacctctcgcgtcctcgacatcggagctgggaccgggttgctgtccatgatggcggcgcgagctttggcagctgctggaggtgaaggtaggggaagcgtgtcagcatgcgagtcctaccttccaatgggcaaactaacacggagggtactcagagccaatgggatggaaaataaggtcaaagtatttcacaagcgatcagatgagctcggagttggagtcgagcttgattctcgacctgatatattggtaagtgaaattcttgattctgagctgctgggtgagggtctcatacctactctacagcatgcgcatgacatgctattggtgaaaaatccaaagacagttccatatcgagctactacttatggagtgttggttgagagcacgtccttgtggaagatgcatgatctgcacagcaatgaagcaaatgctgaagatggtgtgaggcttattcccagtggaacacaaattgttctttctgtgaagtcacagcaacatgcgatgcaatgtgatgcgctggcagatgaaataagattgatagtcatcgtgaaacaaagattgagataaaagcaacagctgatgggcatgctcatgctattgtttcatggtgggtgcttcagttggattcttctggatcagtcttttactcaactgctcctagatgggtgagacaatccagtggtgtcgatttaccacaatatgccaatggcacgaaggattggtgtgatcattggaagcagtgtgtttggtttatacaagggacaggggctcctgcaaagaaagatcaaactctttctttgagcgctagccataatcaaactagcatctcatatcagttgaatataaatgatgaaggaagtagaagccccaaaagtaatcatctaacactgttaccagaaagggtagcactttatggtgataaagtttggagatcagcgttgataagtgtaatcaggaattatatgcaaataatttatccatggaccggattaaagtgattggtaaaaaggcatcgtcccttactacaaatgacttaaatcatgaaaaggttaatatgttagtgggggaacccttttatcatggaagtgaagggatgctgccatggcaaaatctgcgtttctggaatgaaaggactctgcttgatccgttgctctctgaggatgcattcatcatgccttgtaagggaatattaaggttctgtgccatgtcacttccggacttgtggagaagccgtcgtagccttaaagatgttgagggttttgaccactcagttgttaatgatactttaggggcctgtggtgacctgcctggagagcaacaaggcccttgcctaccttattatgtgtggcaatgcggttataccaagaaattaagtgaagtttactctctcatggatttgaacttttctgagcctatccactcttgttttggtgaaacaaaggttgagtttgcccacgatggaacatgccatgggttcgctgtttggatcgactgggtacttgacaaggaaaattccatagtgataagcaccgggccagagagcagatactggaagcaaggggtgcagctgcttagcacgcctgtacaagtgaacccagcgaattcggtgatgcacgtggaggcgaatttcgatgctgacattggggagctcacgtttaaatccaccacgctctcatgatgccaactgtaatgtgtggacaaccaagcctcatgcgtgtgttgttcttaaaagttagcatttgtcgctgcgttttgttcgtcggagctcctgatgtgagtcaagcactcaagctcatgattacgtgtgtgttctgtcatgctagcacaagcaactgcctcctcggtggagctgttttttcatggtcttgtttgttagcccctcacgtcgtgaggaagatgctctagctgctgtcaagaatcccctaccaaaacagagcctgccagagcatgtctctggccagtctccctcgaccctctttccttattccgtgtgtatatcattttcccaggtcccctctccgcctcttcctcgtcatttttctcaggtccctcttagcacacaagttcaaggagagaatgcaggctccatccatgtcatgggtgctatttaagttaggtttggcctatttttaactaataaaataaaataaattttaaga

SEQ ID NO: 82691 - DNA, 2588 bp, Zea Mays
cgccgtccgccgatgccgagctgcctcctccctggcatcgcgccacgcccaccgccggccgctctccgcagcctcctcctccgccgcagcagaatggcctcctccgggccggcacgcgccttccagctccgcctcaacccactcaccggcgactccgagtggctcgtcgtcgacgaggcggaaacggaagcggaggtggctgcgcctgcgccgacccaccataagcagctccttgccgccacctcctacctcgacatgctcaacgacgcctcccgcaaccgcgcgtaccgcctcgccattgacgccacggtaacggaccccacctctcgcgtcctcgacatcggagctgggaccgggttgctgtccatgatggcggcgcgagctttggcagctgctggaggtgaaggtaggggaagcgtgtcagcatgcgagtcctaccttccaatgggcaaactaacacggagggtactcagagccaatgggatggaaaataaggtcaaagtatttcacaagcgatcagatgagctcggagttggagtcgagcttgattctcgacctgatatattggtaagtgaaattcttgattctgagctgctgggtgagggtctcatacctactctacagcatgcgcatgacatgctattggtgaaaaatccaaagacagttccatatcgagctactacttatggagtgttggttgagagcacgtccttgtggaagatgcatgatctgcacagcaatgaagcaaatgctgaagatggtgtgaggcttattcccagtggaacacaaattgttctttctgtgaagtcacagcaacatgcgatgcaatgtgatgcgctggcagatgaaataagattgatagtcatcgtgaaacaaagattgagataaaagcaacagctgatgggcatgctcatgctattgtttcatggtgggtgcttcagttggattcttctggatcagtcttttactcaactgctcctagatgggcacgaaggattggtgtgatcattggaagcagtgtgtttggtttatacaagggacaggggctcctgcaaagaaagatcaaactctttctttgagcgctagccataatcaaactagcatctcatatcagttgaatataaatgatgaaggaagtagaagccccaaaagtaatcatctaacactgttaccagaaagggtagcactttatggtgataaagtttggagatcagcgttgataagtgtaatcaggaattatacgagcgaaagatcctctccgatctgcattgtggctgatgacagcgtgttcctagctctcattgtttcttttctgttaccatcttcaaaagtcctcgctatgtttccatgtcttagagacagtggcctcaactatcttcaagctgttgcagatgcaaataatttatccatggaccggattaaagtgattggtaaaaaggcatcgtcccttactacaaatgacttaaatcatgaaaaggttaatatgttagtgggggaacccttttatcatggaagtgaagggatgctgccatggcaaaatctgcgtttctggaatgaaaggactctgcttgatccgttgctctctgaggatgcattcatcatgccttgtaagggaatattaaggttctgtgccatgtcacttccggacttgtggagaagccgtcgtagccttaaagatgttgagggttttgaccactcagttgttaatgatactttaggggcctgtggtgacctgcctggagagcaacaaggcccttgcctaccttattatgtgtggcaatgcggttataccaagaaattaagtgaagtttactctctcatggatttgaacttttctgagcctatccactcttgttttggtgaaacaaaggttgagtttgcccacgatggaacatgccatgggttcgctgtttggatcgactgggtacttgacaaggaaaattccatagtgataagcaccgggccagagagcagatactggaagcaaggggtgcagctgcttagcacgcctgtacaagtgaacccagcgaattcggtgatgcacgtggaggcgaatttcgatgctgacattggggagctcacgtttaaatccaccacgctctcatgatgccaactgtaatgtgtggacaaccaagcctcatgcgtgtgttgttcttaaaagttagcatttgtcgctgcgttttgttcgtcggagctcctgatgtgagtcaagcactcaagctcatgattacgtgtgtgttctgtcatgctagcacaagcaactgcctcctcggtggagctgttttttcatggtcttgtttgttagcccctcacgtcgtgaggaagatgctctagctgctgtcaagaatcccctaccaaaacagagcctgccagagcatgtctctggccagtctccctcgaccctctttccttattccgtgtgtatatcattttcccaggtcccctctccgcctcttcctcgtcatttttctcaggtccctcttagcacacaagttcaaggagagaatgcaggctccatccatgtcatgggtgctatttaagttaggtttggcctatttttaactaataaaataaaataaattttaaga

SEQ ID NO: 82692 - DNA, 3121 bp, Zea Mays
cgccgtccgccgatgccgagctgcctcctccctggcatcgcgccacgcccaccgccggccgctctccgcagcctcctcctccgccgcagcagaatggcctcctccgggccggcacgcgccttccagctccgcctcaacccactcaccggcgactccgagtggctcgtcgtcgacgaggcggaaacggaagcggaggtggctgcgcctgcgccgacccaccataagcagctccttgccgccacctcctacctcgacatgctcaacgacgcctcccgcaaccgcgcgtaccgcctcgccattgacgccacggtaacggaccccacctctcgcgtcctcgacatcggagctgggaccgggttgctgtccatgatggcggcgcgagctttggcagctgctggaggtgaaggtaggggaagcgtgtcagcatgcgagtcctaccttccaatgggcaaactaacacggagggtactcagagccaatgggatggaaaataaggtcaaagtatttcacaagcgatcagatgagctcggagttggagtcgagcttgattctcgacctgatatattggtaagtgaaattcttgattctgagctgctgggtgagggtctcatacctactctacagcatgcgcatgacatgctattggtgaaaaatccaaagacagttccatatcgagctactacttatggagtgttggttgagagcacgtccttgtggaagatgcatgatctgcacagcaatgaagcaaatgctgaagatggtgtgaggcttattcccagtggaacacaaattgttctttctgtgaagtcacagcaacatgcgatgcaatgtgatgcgctggcagatgaaataagattgatagtcatcgtgaaacaaagattgagataaaagcaacagctgatgggcatgctcatgctattgtttcatggtgggtgcttcagttggattcttctggatcagtcttttactcaactgctcctagatgggtgagacaatccagtggtgtcgatttaccacaatatgccaatggcacgaaggattggtgtgatcattggaagcagtgtgtttggtttatacaagggacaggggctcctgcaaagaaagatcaaactctttctttgagcgctagccataatcaaactagcatctcatatcagttgaatataaatgatgaaggaagtagaagccccaaaagtaatcatctaacactgttaccagaaagggtagcactttatggtgataaagtttggagatcagcgttgataagtgtaatcaggaattatacgagcgaaagatcctctccgatctgcattgtggctgatgacagcgtgttcctagctctcattgtttcttttctgttaccatcttcaaaagtcctcgctatgtttccatgtcttagagacagtggcctcaactatcttcaagctgttgcagatgcaaataatttatccatggaccggattaaagtgattggtaaaaaggcatcgtcccttactacaaatgacttaaatcatgaaaaggttaatatgttagtgggggaacccttttatcatggaagtgaagggatgctgccatggcaaaatctgcgtttctggaatgaaaggactctgcttgatccgttgctctctgaggatgcattcatcatgccttgtaagggaatattaaggttctgtgccatgtcacttccggacttgtggagaagccgtcgtagccttaaagatgttgagggttttgaccactcagttgttaatgatactttaggggcctgtggtgacctgcctggagagcaacaaggcccttgcctaccttattatgtgtggcaatgcggttataccaagaaattaagtgaagtttactctctcatggatttgaacttttctgagcctatccactcttgttttggtgaaacaaaggtatcattttgattcttctggacaaagtatatcgctgttgacatttgtgtctctgctagtcacttcaaatatgcaagatattgagtactagcctaggtgaattctgacggaattgataaatattggaaaaagtctacataatgccctgaccttagtgatatcgaaccttaaaggttgcagcgttaccagtgaaagcaggccagattgattgtatatattgagcaaattttaatgacatcaaacctcaaagcagtatgactagtagaatagtgtccatgtccatgcgcaaatttgatacatgaatgatatttcttcacatgttcagcaagcatgcaagctattctgtcttagttctcccctcccttattactagataaccttactcttggatgcagctttgctctctcacctgaaatgtgcatgtagttttcttgctgttttctccccccagtctcctatgatcccctgtatcctaccatcttgcttgcaggttgagtttgcccacgatggaacatgccatgggttcgctgtttggatcgactgggtacttgacaaggaaaattccatagtgataagcaccgggccagagagcagatactggaagcaaggggtgcagctgcttagcacgcctgtacaagtgaacccagcgaattcggtgatgcacgtggaggcgaatttcgatgctgacattggggagctcacgtttaaatccaccacgctctcatgatgccaactgtaatgtgtggacaaccaagcctcatgcgtgtgttgttcttaaaagttagcatttgtcgctgcgttttgttcgtcggagctcctgatgtgagtcaagcactcaagctcatgattacgtgtgtgttctgtcatgctagcacaagcaactgcctcctcggtggagctgttttttcatggtcttgtttgttagcccctcacgtcgtgaggaagatgctctagctgctgtcaagaatcccctaccaaaacagagcctgccagagcatgtctctggccagtctccctcgaccctctttccttattccgtgtgtatatcattttcccaggtcccctctccgcctcttcctcgtcatttttctcaggtccctcttagcacacaagttcaaggagagaatgcaggctccatccatgtcatgggtgctatttaagttaggtttggcctatttttaactaataaaataaaataaattttaaga

SEQ ID NO: 82693 - DNA, 2637 bp, Zea Mays
cgccgtccgccgatgccgagctgcctcctccctggcatcgcgccacgcccaccgccggccgctctccgcagcctcctcctccgccgcagcagaatggcctcctccgggccggcacgcgccttccagctccgcctcaacccactcaccggcgactccgagtggctcgtcgtcgacgaggcggaaacggaagcggaggtggctgcgcctgcgccgacccaccataagcagctccttgccgccacctcctacctcgacatgctcaacgacgcctcccgcaaccgcgcgtaccgcctcgccattgacgccacggtaacggaccccacctctcgcgtcctcgacatcggagctgggaccgggttgctgtccatgatggcggcgcgagctttggcagctgctggaggtgaaggtaggggaagcgtgtcagcatgcgagtcctaccttccaatgggcaaactaacacggagggtactcagagccaatgggatggaaaataaggtcaaagtatttcacaagcgatcagatgagctcggagttggagtcgagcttgattctcgacctgatatattggtaagtgaaattcttgattctgagctgctgggtgagggtctcatacctactctacagcatgcgcatgacatgctattggtgaaaaatccaaagacagttccatatcgagctactacttatggagtgttggttgagagcacgtccttgtggaagatgcatgatctgcacagcaatgaagcaaatgctgaagatggtgtgaggcttattcccagtggaacacaaattgttctttctgtgaagtcacagcaacatgcgatgcaatgtgatgcgctggcagatgaaataagattgatagtcatcgtgaaacaaagattgagataaaagcaacagctgatgggcatgctcatgctattgtttcatggtgggtgcttcagttggattcttctggatcagtcttttactcaactgctcctagatgggtgagacaatccagtggtgtcgatttaccacaatatgccaatggcacgaaggattggtgtgatcattggaagcagtgtgtttggtttatacaagggacaggggctcctgcaaagaaagatcaaactctttctttgagcgctagccataatcaaactagcatctcatatcagttgaatataaatgatgaaggaagtagaagccccaaaagtaatcatctaacactgttaccagaaagggtagcactttatggtgataaagtttggagatcagcgttgataagtgtaatcaggaattatacgagcgaaagatcctctccgatctgcattgtggctgatgacagcgtgttcctagctctcattgtttcttttctgttaccatcttcaaaagtcctcgctatgtttccatgtcttagagacagtggcctcaactatcttcaagctgttgcagatgcaaataatttatccatggaccggattaaagtgattggtaaaaaggcatcgtcccttactacaaatgacttaaatcatgaaaaggttaatatgttagtgggggaacccttttatcatggaagtgaagggatgctgccatggcaaaatctgcgtttctggaatgaaaggactctgcttgatccgttgctctctgaggatgcattcatcatgccttgtaagggaatattaaggttctgtgccatgtcacttccggacttgtggagaagccgtcgtagccttaaagatgttgagggttttgaccactcagttgttaatgatactttaggggcctgtggtgacctgcctggagagcaacaaggcccttgcctaccttattatgtgtggcaatgcggttataccaagaaattaagtgaagtttactctctcatggatttgaacttttctgagcctatccactcttgttttggtgaaacaaaggttgagtttgcccacgatggaacatgccatgggttcgctgtttggatcgactgggtacttgacaaggaaaattccatagtgataagcaccgggccaggtaaagagagcagatactggaagcaaggggtgcagctgcttagcacgcctgtacaagtgaacccagcgaattcggtgatgcacgtggaggcgaatttcgatgctgacattggggagctcacgtttaaatccaccacgctctcatgatgccaactgtaatgtgtggacaaccaagcctcatgcgtgtgttgttcttaaaagttagcatttgtcgctgcgttttgttcgtcggagctcctgatgtgagtcaagcactcaagctcatgattacgtgtgtgttctgtcatgctagcacaagcaactgcctcctcggtggagctgttttttcatggtcttgtttgttagcccctcacgtcgtgaggaagatgctctagctgctgtcaagaatcccctaccaaaacagagcctgccagagcatgtctctggccagtctccctcgaccctctttccttattccgtgtgtatatcattttcccaggtcccctctccgcctcttcctcgtcatttttctcaggtccctcttagcacacaagttcaaggagagaatgcaggctccatccatgtcatgggtgctatttaagttaggtttggcctatttttaactaataaaataaaataaattttaaga

SEQ ID NO: 82694 - DNA, 2607 bp, Zea Mays
aaggcagctgccgctgccgccgccgtccgccgatgccgagctgcctcctccctggcatcgcgccacgcccaccgccggccgctctccgcagcctcctcctccgccgcagcagaatggcctcctccgggccggcacgcgccttccagctccgcctcaacccactcaccggcgactccgagtggctcgtcgtcgacgaggcggaaacggaagcggaggtggctgcgcctgcgccgacccaccataagcagctccttgccgccacctcctacctcgacatgctcaacgacgcctcccgcaaccgcgcgtaccgcctcgccattgacgccacggtaacggaccccacctctcgcgtcctcgacatcggagctgggaccgggttgctgtccatgatggcggcgcgagctttggcagctgctggaggtgaaggtaggggaagcgtgtcagcatgcgagtcctaccttccaatgggcaaactaacacggagggtactcagagccaatgggatggaaaataaggtcaaagtatttcacaagcgatcagatgagctcggagttggagtcgagcttgattctcgacctgatatattgacagttccatatcgagctactacttatggagtgttggttgagagcacgtccttgtggaagatgcatgatctgcacagcaatgaagcaaatgctgaagatggtgtgaggcttattcccagtggaacacaaattgttctttctgtgaagtcacagcaacatgcgatgcaatgtgatgcgctggcagatgaaataagattgctgtcagaacccttcaaagtttttgaatttgacttttcggaacgtccagatagtcatcgtgaaacaaagattgagataaaagcaacagctgatgggcatgctcatgctattgtttcatggtgggtgcttcagttggattcttctggatcagtcttttactcaactgctcctagatgggtgagacaatccagtggtgtcgatttaccacaatatgccaatggcacgaaggattggtgtgatcattggaagcagtgtgtttggtttatacaagggacaggggctcctgcaaagaaagatcaaactctttctttgagcgctagccataatcaaactagcatctcatatcagttgaatataaatgatgaaggaagtagaagccccaaaagtaatcatctaacactgttaccagaaagggtagcactttatggtgataaagtttggagatcagcgttgataagtgtaatcaggaattatacgagcgaaagatcctctccgatctgcattgtggctgatgacagcgtgttcctagctctcattgtttcttttctgttaccatcttcaaaagtcctcgctatgtttccatgtcttagagacagtggcctcaactatcttcaagctgttgcagatgcaaataatttatccatggaccggattaaagtgattggtaaaaaggcatcgtcccttactacaaatgacttaaatcatgaaaaggttaatatgttagtgggggaacccttttatcatggaagtgaagggatgctgccatggcaaaatctgcgtttctggaatgaaaggactctgcttgatccgttgctctctgaggatgcattcatcatgccttgtaagggaatattaaggttctgtgccatgtcacttccggacttgtggagaagccgtcgtagccttaaagatgttgagggttttgaccactcagttgttaatgatactttaggggcctgtggtgacctgcctggagagcaacaaggcccttgcctaccttattatgtgtggcaatgcggttataccaagaaattaagtgaagtttactctctcatggatttgaacttttctgagcctatccactcttgttttggtgaaacaaaggttgagtttgcccacgatggaacatgccatgggttcgctgtttggatcgactgggtacttgacaaggaaaattccatagtgataagcaccgggccagagagcagatactggaagcaaggggtgcagctgcttagcacgcctgtacaagtgaacccagcgaattcggtgatgcacgtggaggcgaatttcgatgctgacattggggagctcacgtttaaatccaccacgctctcatgatgccaactgtaatgtgtggacaaccaagcctcatgcgtgtgttgttcttaaaagttagcatttgtcgctgcgttttgttcgtcggagctcctgatgtgagtcaagcactcaagctcatgattacgtgtgtgttctgtcatgctagcacaagcaactgcctcctcggtggagctgttttttcatggtcttgtttgttagcccctcacgtcgtgaggaagatgctctagctgctgtcaagaatcccctaccaaaacagagcctgccagagcatgtctctggccagtctccctcgaccctctttccttattccgtgtgtatatcattttcccaggtcccctctccgcctcttcctcgtcatttttctcaggtccctcttagcacacaagttcaaggagagaatgcaggctccatccatgtcatgggtgctatttaagttaggtttggcctatttttaactaataaaataaaataaattttaaga

SEQ ID NO: 82695 - DNA, 3056 bp, Zea Mays
ccccggcccatatgtcgtgtcactgaggccgccaggagaagaaggcagctgccgctgccgccgccgtccgccgatgccgagctgcctcctccctggcatcgcgccacgcccaccgccggccgctctccgcagcctcctcctccgccgcagcagaatggcctcctccgggccggcacgcgccttccagctccgcctcaacccactcaccggcgactccgagtggctcgtcgtcgacgaggcggaaacggaagcggaggtggctgcgcctgcgccgacccaccataagcagctccttgccgccacctcctacctcgacatgctcaacgacgcctcccgcaaccgcgcgtaccgcctcgccattgacgccacggtaacggaccccacctctcgcgtcctcgacatcggagctgggaccgggttgctgtccatgatggcggcgcgagctttggcagctgctggaggtgaaggtaggggaagcgtgtcagcatgcgagtcctaccttccaatgggcaaactaacacggagggtactcagagccaatgggatggaaaataaggtcaaagtatttcacaagcgatcagatgagctcggagttggagtcgagcttgattctcgacctgatatattggtaagtgaaattcttgattctgagctgctgggtgagggtctcatacctactctacagcatgcgcatgacatgctattggtgaaaaatccaaagacagttccatatcgagctactacttatggagtgttggttgagagcacgtccttgtggaagatgcatgatctgcacagcaatgaagcaaatgctgaagatggtgtgaggcttattcccagtggaacacaaattgttctttctgtgaagtcacagcaacatgcgatgcaatgtgatgcgctggcagatgaaataagattgctgtcagaacccttcaaagtttttgaatttgacttttcggaacgtccagatagtcatcgtgaaacaaagattgagataaaagcaacagctgatgggcatgctcatgctattgtttcatggtgggtgcttcagttggattcttctggatcagtcttttactcaactgctcctagatgggtgagacaatccagtggtgtcgatttaccacaatatgccaatggcacgaaggattggtgtgatcattggaagcagtgtgtttggtttatacaagggacaggggctcctgcaaagaaagatcaaactctttctttgagcgctagccataatcaaactagcatctcatatcagttgaatataaatgatgaaggaagtagaagccccaaaagtaatcatctaacactgttaccagaaagggtagcactttatggtgataaagtttggagatcagcgttgataagtgtaatcaggaattatgtaagtaatccctctatgtacttggtatagtatgttcttatccaactagtattccatattatgattgctcaccgtaacttctgaagaattataataataataaataattaaacatcccaatattcaaaagcatgtaatctttcaatctgtgaataattaaaagcatgtaaataattaaacagactgtgacgcagtttcctcattttttagaaaacagaactgtattggtcaacactgatttgacactatttgtaggtgttctatactgtgcatcttgtcaccttaacttttcatgtttaacttttctctgcccagacgagcgaaagatcctctccgatctgcattgtggctgatgacagcgtgttcctagctctcattgtttcttttctgttaccatcttcaaaagtcctcgctatgtttccatgtcttagagacagtggcctcaactatcttcaagctgttgcagatgcaaataatttatccatggaccggattaaagtgattggtaaaaaggcatcgtcccttactacaaatgacttaaatcatgaaaaggttaatatgttagtgggggaacccttttatcatggaagtgaagggatgctgccatggcaaaatctgcgtttctggaatgaaaggactctgcttgatccgttgctctctgaggatgcattcatcatgccttgtaagggaatattaaggttctgtgccatgtcacttccggacttgtggagaagccgtcgtagccttaaagatgttgagggttttgaccactcagttgttaatgatactttaggggcctgtggtgacctgcctggagagcaacaaggcccttgcctaccttattatgtgtggcaatgcggttataccaagaaattaagtgaagtttactctctcatggatttgaacttttctgagcctatccactcttgttttggtgaaacaaaggttgagtttgcccacgatggaacatgccatgggttcgctgtttggatcgactgggtacttgacaaggaaaattccatagtgataagcaccgggccagagagcagatactggaagcaaggggtgcagctgcttagcacgcctgtacaagtgaacccagcgaattcggtgatgcacgtggaggcgaatttcgatgctgacattggggagctcacgtttaaatccaccacgctctcatgatgccaactgtaatgtgtggacaaccaagcctcatgcgtgtgttgttcttaaaagttagcatttgtcgctgcgttttgttcgtcggagctcctgatgtgagtcaagcactcaagctcatgattacgtgtgtgttctgtcatgctagcacaagcaactgcctcctcggtggagctgttttttcatggtcttgtttgttagcccctcacgtcgtgaggaagatgctctagctgctgtcaagaatcccctaccaaaacagagcctgccagagcatgtctctggccagtctccctcgaccctctttccttattccgtgtgtatatcattttcccaggtcccctctccgcctcttcctcgtcatttttctcaggtccctcttagcacacaagttcaaggagagaatgcaggctccatccatgtcatgggtgctatttaagttaggtttggcctatttttaactaataaaataaaataaattttaaga

SEQ ID NO: 82696 - DNA, 3269 bp, Zea Mays
atggcctcctccgggccggcccgcgccttccagctccgcctcaacccactcaccggcgactccgagtggctcgtcgtcgacgaggcggaaacggaagcggaggtggctgcgcctgcgcctgcgccgacccaccataagcagctccttgccgccacctcctacctcgacatgctcgtggcgcaggcatacgcatacgtgaggccgttaatgggctgagtccatcagagctgggcttagttgggctctttctggaccaccccggcccatatgtcgtgtcactgaggccgccaggagaagaaggcagctgccgctgccgccgccgtccgccgatgccgagctgcctcctccctggcatcgcgccacgcccaccgccggccgctctccgcagcctcctcctccgccgcagcagaatggcctcctccgggccggcacgcgccttccagctccgcctcaacccactcaccggcgactccgagtggctcgtcgtcgacgaggcggaaacggaagcggaggtggctgcgcctgcgccgacccaccataagcagctccttgccgccacctcctacctcgacatgctcaacgacgcctcccgcaaccgcgcgtaccgcctcgccattgacgccacggtaacggaccccacctctcgcgtcctcgacatcggagctgggaccgggttgctgtccatgatggcggcgcgagctttggcagctgctggaggtgaaggtaggggaagcgtgtcagcatgcgagtcctaccttccaatgggcaaactaacacggagggtactcagagccaatgggatggaaaataaggtcaaagtatttcacaagcgatcagatgagctcggagttggagtcgagcttgattctcgacctgatatattggtaagtgaaattcttgattctgagctgctgggtgagggtctcatacctactctacagcatgcgcatgacatgctattggtgaaaaatccaaagacagttccatatcgagctactacttatggagtgttggttgagagcacgtccttgtggaagatgcatgatctgcacagcaatgaagcaaatgctgaagatggtgtgaggcttattcccagtggaacacaaattgttctttctgtgaagtcacagcaacatgcgatgcaatgtgatgcgctggcagatgaaataagattgatagtcatcgtgaaacaaagattgagataaaagcaacagctgatgggcatgctcatgctattgtttcatggtgggtgcttcagttggattcttctggatcagtcttttactcaactgctcctagatgggtgagacaatccagtggtgtcgatttaccacaatatgccaatggcacgaaggattggtgtgatcattggaagcagtgtgtttggtttatacaagggacaggggctcctgcaaagaaagatcaaactctttctttgagcgctagccataatcaaactagcatctcatatcagttgaatataaatgatgaaggaagtagaagccccaaaagtaatcatctaacactgttaccagaaagggtagcactttatggtgataaagtttggagatcagcgttgataagtgtaatcaggaattatgtaagtaatccctctatgtacttggtatagtatgttcttatccaactagtattccatattatgattgctcaccgtaacttctgaagaattataataataataaataattaaacatcccaatattcaaaagcatgtaatctttcaatctgtgaataattaaaagcatgtaaataattaaacagactgtgacgcagtttcctcattttttagaaaacagaactgtattggtcaacactgatttgacactatttgtaggtgttctatactgtgcatcttgtcaccttaacttttcatgtttaacttttctctgcccagacgagcgaaagatcctctccgatctgcattgtggctgatgacagcgtgttcctagctctcattgtttcttttctgttaccatcttcaaaagtcctcgctatgtttccatgtcttagagacagtggcctcaactatcttcaagctgttgcagatgcaaataatttatccatggaccggattaaagtgattggtaaaaaggcatcgtcccttactacaaatgacttaaatcatgaaaaggttaatatgttagtgggggaacccttttatcatggaagtgaagggatgctgccatggcaaaatctgcgtttctggaatgaaaggactctgcttgatccgttgctctctgaggatgcattcatcatgccttgtaagggaatattaaggttctgtgccatgtcacttccggacttgtggagaagccgtcgtagccttaaagatgttgagggttttgaccactcagttgttaatgatactttaggggcctgtggtgacctgcctggagagcaacaaggcccttgcctaccttattatgtgtggcaatgcggttataccaagaaattaagtgaagtttactctctcatggatttgaacttttctgagcctatccactcttgttttggtgaaacaaaggttgagtttgcccacgatggaacatgccatgggttcgctgtttggatcgactgggtacttgacaaggaaaattccatagtgataagcaccgggccaggtaaagagagcagatactggaagcaaggggtgcagctgcttagcacgcctgtacaagtgaacccagcgaattcggtgatgcacgtggaggcgaatttcgatgctgacattggggagctcacgtttaaatccaccacgctctcatgatgccaactgtaatgtgtggacaaccaagcctcatgcgtgtgttgttcttaaaagttagcatttgtcgctgcgttttgttcgtcggagctcctgatgtgagtcaagcactcaagctcatgattacgtgtgtgttctgtcatgctagcacaagcaactgcctcctcggtggagctgttttttcatggtcttgtttgttagcccctcacgtcgtgaggaagatgctctagctgctgtcaagaatcccctaccaaaacagagcctgccagagcatgtctctggccagtctccctcgaccctctttccttattccgtgtgtatatcattttcccaggtcccctctccgcctcttcctcgtcatttttctcaggtccctcttagcacacaagttcaaggagagaatgcaggctccatccatgtcatgggtgctatttaagttaggtttggcctatttttaactaataaaataaaataaattttaaga

SEQ ID NO: 82697 - DNA, 1053 bp, Zea Mays
ccctacttacatatataatccccgacctgctaaaaatgtatgttacgagtgatgatgttgtggaagttaagggcaaagtggcgtgtgagataagttcagctgatgagcttacattgacagagcttatgtttagtggtgctctgaaggatgctacagtagagcaggtggtggcactgctctcttgctttgtttggcaggagaagctccaggatgctccgaagccaagagaggagctcgatttgctcttctaccagctgcaggagacagcaagaagggttgctaaccttcagcttgaatgcaagatccagatcgatgtggaaagttttgtgaattctttccgacccgacataatggaagcggtgtattcatgggccagagggtcgaagttctaccaaatcatggagatgacccaagtgttcgaaggaagcctgatcagggccatcaggaggctggaggaggttctgcagcagctgattctggcatccaagtccattggggaaacggagttagaagcaaaactcgaggaggcggtcaacaagatcaagagggacatagtgtttgcagcatctttatacttgtagtgtcttggatgtctggttttatgtcaggggctaggtcaaaagctcatagggatttaaattaatcttaaattgctgttcatgttgagtgttgttggcatgatgaagctgtctgatttgctgttagcggtgacatggcagtgaaagttttgttaggtttcttcaccgtgtagggtctatttgacattcaagaattttgtaggaagcaatacaattctggcagacctcacattaacagccttagcatgtacgatagatagctatttatctcatctgtcaggaatagcccagagatactgcgtgtttgtggagtataagcagtgtaagttaagtgatcgtgcttgtgtttgtaagtgcagttcaaagcaagtcggccgatggagatgtccctggatgaaaacttgtagtatttgtcttgcactcttgcttgtttgaatgttattggccggctgatggtcacgtgcatgcatgcgtg

SEQ ID NO: 82698 - DNA, 1544 bp, Zea Mays
aggacctctattttatggagtggatgttatgcatctccaattgtcaaccacttgcaataagaggcctgaggattctgattacacggttgatgtccttaccagatgttctgtaactaaggacaacagtggtaagaaaacaatgaagattgatggactaagcagcatacggatgtacatacctaaggatcttatacctgtagaagttcgagaaaacaccttgaggaaagttgaagaagtccttttaaggtttgctaaagatggtgtgcctctattggatccagaagaagatatgaaagtacaatcgaaatcatttcggaaagctaccagacgaatagaagctcttgagagcttgtttgagaagcacgatatccgtaactctccacatatccagcaaaagctgaaagtctttcatgctaagcaagaactatcagccaaaataaagtccataaagaaaacaatgcggtcttccaccgctttagctttcaaggatgaactcaaggcccggaaacgtgttcttcgcaggctggggtatgttacgagtgatgatgttgtggaagttaagggcaaagtggcgtgtgagataagttcagctgatgagcttacattgacagagcttatgtttagtggtgctctgaaggatgctacagtagagcaggtggtggcactgctctcttgctttgtttggcaggagaagctccaggatgctccgaagccaagagaggagctcgatttgctcttctaccagctgcaggagacagcaagaagggttgctaaccttcagcttgaatgcaagatccagatcgatgtggaaagttttgtgaattctttccgacccgacataatggaagcggtgtattcatgggccagagggtcgaagttctaccaaatcatggagatgacccaagtgttcgaaggaagcctgatcagggccatcaggaggctggaggaggttctgcagcagctgattctggcatccaagtccattggggaaacggagttagaagcaaaactcgaggaggcggtcaacaagatcaagagggacatagtgtttgcagcatctttatacttgtagtgtcttggatgtctggttttatgtcaggggctaggtcaaaagctcatagggatttaaattaatcttaaattgctgttcatgttgagtgttgttggcatgatgaagctgtctgatttgctgttagcggtgacatggcagtgaaagttttgttaggtttcttcaccgtgtagggtctatttgacattcaagaattttgtaggaagcaatacaattctggcagacctcacattaacagccttagcatgtacgatagatagctatttatctcatctgtcaggaatagcccagagatactgcgtgtttgtggagtataagcagtgtaagttaagtgatcgtgcttgtgtttgtaagtgcagttcaaagcaagtcggccgatggagatgtccctggatgaaaacttgtagtatttgtcttgcactcttgcttgtttgaatgttattggccggctgatggtcacgtgcatgcatgcgtg

SEQ ID NO: 82699 - DNA, 1668 bp, Zea Mays
gtttgacactgtgcagagtgaagtttgagataggggatgagataggggagctgctggagacaaccttaggacctctattttatggagtggatgttatgcatctccaattgtcaaccacttgcaataagaggcctgaggattctgattacacggttgatgtccttaccagatgttctgtaactaaggacaacagtggtaagaaaacaatgaaggttgttcctctgaaagcgcgtggagaaccagttgtagtttcattgtcactttcacagattgatggactaagcagcatacggatgtacatacctaaggatcttatacctgtagaagttcgagaaaacaccttgaggaaagttgaagaagtccttttaaggtttgctaaagatggtgtgcctctattggatccagaagaagatatgaaagtacaatcgaaatcatttcggaaagctaccagacgaatagaagctcttgagagcttgtttgagaagcacgatatccgtaactctccacatatccagcaaaagctgaaagtctttcatgctaagcaagaactatcagccaaaataaagtccataaagaaaacaatgcggtcttccaccgctttagctttcaaggatgaactcaaggcccggaaacgtgttcttcgcaggctggggtatgttacgagtgatgatgttgtggaagttaagggcaaagtggcgtgtgagataagttcagctgatgagcttacattgacagagcttatgtttagtggtgctctgaaggatgctacagtagagcaggtggtggcactgctctcttgctttgtttggcaggagaagctccaggatgctccgaagccaagagaggagctcgatttgctcttctaccagctgcaggagacagcaagaagggttgctaaccttcagcttgaatgcaagatccagatcgatgtggaaagttttgtgaattctttccgacccgacataatggaagcggtgtattcatgggccagagggtcgaagttctaccaaatcatggagatgacccaagtgttcgaaggaagcctgatcagggccatcaggaggctggaggaggttctgcagcagctgattctggcatccaagtccattggggaaacggagttagaagcaaaactcgaggaggcggtcaacaagatcaagagggacatagtgtttgcagcatctttatacttgtagtgtcttggatgtctggttttatgtcaggggctaggtcaaaagctcatagggatttaaattaatcttaaattgctgttcatgttgagtgttgttggcatgatgaagctgtctgatttgctgttagcggtgacatggcagtgaaagttttgttaggtttcttcaccgtgtagggtctatttgacattcaagaattttgtaggaagcaatacaattctggcagacctcacattaacagccttagcatgtacgatagatagctatttatctcatctgtcaggaatagcccagagatactgcgtgtttgtggagtataagcagtgtaagttaagtgatcgtgcttgtgtttgtaagtgcagttcaaagcaagtcggccgatggagatgtccctggatgaaaacttgtagtatttgtcttgcactcttgcttgtttgaatgttattggccggctgatggtcacgtgcatgcatgcgtg

SEQ ID NO: 82700 - DNA, 3508 bp, Zea Mays
tcccggcccttcctttccttctcgcgcgcgaccaaataactcctcactaaaaccctagggctcccggccgccactgcctacgccgtcgccatggagaccctcaagcgcaaggccgtggacagccccggagacgcctaccaggcctcttctctcaagccgccgctcgccgccgccgccgtggagcctcgcgctccgaccaccctcgcggccgccgaaccagtcgcttgcgtgcacgacgtctcctaccccgagggctacgacccatccgcctctacgtcccgcgccattgccggcggagctgatgcctctgagccagcaaagaagtttcctttccagctcgaccccttccaggccgaggccatacgctgcctcgacaatggtgaatccgtcatggtttcagctcatacgtcagcgggaaagacagtagtcgcgttgtatgcaatagcgatgtctttgcgcaaccaacagcgggtcatttatacatctccaatcaaggcactgagcaaccaaaagtacagggagttcaaagaagagttctctgatgttggtctcatgactggggatgtcacaattgagccgaatgcctcctgtctggtcatgaccacagaaatttggcggagcatgcaatacaagggatctgaggtcatgagggaagttgcctgggttatatttgatgaggtgcattacatgcgggatagagagagaggagtggtttgggaggagagtatagtgatggctcccaagaattcacgctttgtcttcctctcggcaactgtacctaatgccaaggagttcgctgattgggtagctaaggtacataagcaaccctgtcatatagtatacaccgactatagacctacacctcttcagcactatgtatttccttctggaggggacggattataccttgtagtggatgagaagggcaagttcagagaggacagttttcagaaagcattgaacgcccttgtccctgctagcgacagtgccaagaagaaggaaaatgggaagcggcagaaatttaccatggcaggtacatctagtgaggaaagtgacatattcaagatggtgaagatgataattcagcgccaatatgatcctgtaatactttttagctttagcaaaagggaatgcgaatttcttgctatgcagatggctaagatggacttgaatgaggatgatgagaaggcaaacatcgaaacaattttttggagtgctatggatatgctttctgatgatgacaaaaagcttcctcaggtttcaaacatgctccccttactgaaacgcggcattggcgtgcatcattctggtctgttgcctattttaaaggaagtcattgagatactctttcaggagggcctcatcaagtgtttgtttgccacagaaacattcagtattggtttgaacatgcctgcaaagactgttgtgtttaccaatgtgcgaaaatttgacggagaccgattcagatggttgtcgagtggagagtacatccaaatgagtggccgtgctggtcgtcgaggtattgatctgcgtggtatctgtatactgatggtagacgagaaaatggaaccttcaactgccaaaatgatgctgaaaggaagtgcagatagtttgaacagtgcctttcatctgagctacaatatgctgttaaatcaaatgcgatctgaggatggggatccagaaaagctcctccggcattcattttatcaatttcaggctgaccgttctcttcctgatcttgagaagcaaatcaaggaactggaatcagagagaaattccatggtaattgaggaagcggagagcttgaaggattattacgatctcttacagcagcacaggagtttaaagaaggatgtccatgatattgttctctctcccaaacatgtgctgcctttcttgcaacctggaaggcttgtccgcattgaatatagtacagatgagccagctaacttttccattgatgaaaatgtcacatggggaattataattaacttcgaaaaagtgaagtcacatggtgaagataagaggcctgaggattctgattacacggttgatgtccttaccagatgttctgtaactaaggacaacagtggtaagaaaacaatgaagattgatggactaagcagcatacggatgtacatacctaaggatcttatacctgtagaagttcgagaaaacaccttgaggaaagttgaagaagtccttttaaggtttgctaaagatggtgtgcctctattggatccagaagaagatatgaaagtacaatcgaaatcatttcggaaagctaccagacgaatagaagctcttgagagcttgtttgagaagcacgatatccgtaactctccacatatccagcaaaagctgaaagtctttcatgctaagcaagaactatcagccaaaataaagtccataaagaaaacaatgcggtcttccaccgctttagctttcaaggatgaactcaaggcccggaaacgtgttcttcgcaggctggggtatgttacgagtgatgatgttgtggaagttaagggcaaagtggcgtgtgagataagttcagctgatgagcttacattgacagagcttatgtttagtggtgctctgaaggatgctacagtagagcaggtggtggcactgctctcttgctttgtttggcaggagaagctccaggatgctccgaagccaagagaggagctcgatttgctcttctaccagctgcaggagacagcaagaagggttgctaaccttcagcttgaatgcaagatccagatcgatgtggaaagttttgtgaattctttccgacccgacataatggaagcggtgtattcatgggccagagggtcgaagttctaccaaatcatggagatgacccaagtgttcgaaggaagcctgatcagggccatcaggaggctggaggaggttctgcagcagctgattctggcatccaagtccattggggaaacggagttagaagcaaaactcgaggaggcggtcaacaagatcaagagggacatagtgtttgcagcatctttatacttgtagtgtcttggatgtctggttttatgtcaggggctaggtcaaaagctcatagggatttaaattaatcttaaattgctgttcatgttgagtgttgttggcatgatgaagctgtctgatttgctgttagcggtgacatggcagtgaaagttttgttaggtttcttcaccgtgtagggtctatttgacattcaagaattttgtaggaagcaatacaattctggcagacctcacattaacagccttagcatgtacgatagatagctatttatctcatctgtcaggaatagcccagagatactgcgtgtttgtggagtataagcagtgtaagttaagtgatcgtgcttgtgtttgtaagtgcagttcaaagcaagtcggccgatggagatgtccctggatgaaaacttgtagtatttgtcttgcactcttgcttgtttgaatgttattggccggctgatggtcacgtgcatgcatgcgtg

SEQ ID NO: 82701 - DNA, 3549 bp, Zea Mays
tcccggcccttcctttccttctcgcgcgcgaccaaataactcctcactaaaaccctagggctcccggccgccactgcctacgccgtcgccatggagaccctcaagcgcaaggccgtggacagccccggagacgcctaccaggcctcttctctcaagccgccgctcgccgccgccgccgtggagcctcgcgctccgaccaccctcgcggccgccgaaccagtcgcttgcgtgcacgacgtctcctaccccgagggctacgacccatccgcctctacgtcccgcgccattgccggcggagctgatgcctctgagccagcaaagaagtttcctttccagctcgaccccttccaggccgaggccatacgctgcctcgacaatggtgaatccgtcatggtttcagctcatacgtcagcgggaaagacagtagtcgcgttgtatgcaatagcgatgtctttgcgcaaccaacagcgggtcatttatacatctccaatcaaggcactgagcaaccaaaagtacagggagttcaaagaagagttctctgatgttggtctcatgactggggatgtcacaattgagccgaatgcctcctgtctggtcatgaccacagaaatttggcggagcatgcaatacaagggatctgaggtcatgagggaagttgcctgggttatatttgatgaggtgcattacatgcgggatagagagagaggagtggtttgggaggagagtatagtgatggctcccaagaattcacgctttgtcttcctctcggcaactgtacctaatgccaaggagttcgctgattgggtagctaaggtacataagcaaccctgtcatatagtatacaccgactatagacctacacctcttcagcactatgtatttccttctggaggggacggattataccttgtagtggatgagaagggcaagttcagagaggacagttttcagaaagcattgaacgcccttgtccctgctagcgacagtgccaagaagaaggaaaatgggaagcggcagaaatttaccatggcaggtacatctagtgaggaaagtgacatattcaagatggtgaagatgataattcagcgccaatatgatcctgtaatactttttagctttagcaaaagggaatgcgaatttcttgctatgcagatggctaagatggacttgaatgaggatgatgagaaggcaaacatcgaaacaattttttggagtgctatggatatgctttctgatgatgacaaaaagcttcctcaggtttcaaacatgctccccttactgaaacgcggcattggcgtgcatcattctggtctgttgcctattttaaaggaagtcattgagatactctttcaggagggcctcatcaagaaacattcagtattggtttgaacatgcctgcaaagactgttgtgtttaccaatgtgcgaaaatttgacggagaccgattcagatggttgtcgagtggagagtacatccaaatgagtggccgtgctggtcgtcgaggtattgatctgcgtggtatctgtatactgatggtagacgagaaaatggaaccttcaactgccaaaatgatgctgaaaggaagtgcagatagtttgaacagtgcctttcatctgagctacaatatgctgttaaatcaaatgcgatctgaggatggggatccagaaaagctcctccggcattcattttatcaatttcaggctgaccgttctcttcctgatcttgagaagcaaatcaaggaactggaatcagagagaaattccatggtaattgaggaagcggagagcttgaaggattattacgatctcttacagcagcacaggagtttaaagaaggatgtccatgatattgttctctctcccaaacatgtgctgcctttcttgcaacctggaaggcttgtccgcattgaatatagtacagatgagccagctaacttttccattgatgaaaatgtcacatggggaattataattaacttcgaaaaagtgaagtcacatggtgaagataagaggcctgaggattctgattacacggttgatgtccttaccagatgttctgtaactaaggacaacagtggtaagaaaacaatgaaggttgttcctctgaaagcgcgtggagaaccagttgtagtttcattgtcactttcacagattgatggactaagcagcatacggatgtacatacctaaggatcttatacctgtagaagttcgagaaaacaccttgaggaaagttgaagaagtccttttaaggtttgctaaagatggtgtgcctctattggatccagaagaagatatgaaagtacaatcgaaatcatttcggaaagctaccagacgaatagaagctcttgagagcttgtttgagaagcacgatatccgtaactctccacatatccagcaaaagctgaaagtctttcatgctaagcaagaactatcagccaaaataaagtccataaagaaaacaatgcggtcttccaccgctttagctttcaaggatgaactcaaggcccggaaacgtgttcttcgcaggctggggtatgttacgagtgatgatgttgtggaagttaagggcaaagtggcgtgtgagataagttcagctgatgagcttacattgacagagcttatgtttagtggtgctctgaaggatgctacagtagagcaggtggtggcactgctctcttgctttgtttggcaggagaagctccaggatgctccgaagccaagagaggagctcgatttgctcttctaccagctgcaggagacagcaagaagggttgctaaccttcagcttgaatgcaagatccagatcgatgtggaaagttttgtgaattctttccgacccgacataatggaagcggtgtattcatgggccagagggtcgaagttctaccaaatcatggagatgacccaagtgttcgaaggaagcctgatcagggccatcaggaggctggaggaggttctgcagcagctgattctggcatccaagtccattggggaaacggagttagaagcaaaactcgaggaggcggtcaacaagatcaagagggacatagtgtttgcagcatctttatacttgtagtgtcttggatgtctggttttatgtcaggggctaggtcaaaagctcatagggatttaaattaatcttaaattgctgttcatgttgagtgttgttggcatgatgaagctgtctgatttgctgttagcggtgacatggcagtgaaagttttgttaggtttcttcaccgtgtagggtctatttgacattcaagaattttgtaggaagcaatacaattctggcagacctcacattaacagccttagcatgtacgatagatagctatttatctcatctgtcaggaatagcccagagatactgcgtgtttgtggagtataagcagtgtaagttaagtgatcgtgcttgtgtttgtaagtgcagttcaaagcaagtcggccgatggagatgtccctggatgaaaacttgtagtatttgtcttgcactcttgcttgtttgaatgttattggccggctgatggtcacgtgcatgcatgcgtg

SEQ ID NO: 82702 - DNA, 3212 bp, Zea Mays
taagcagattcgatctcctcccatcacctccatcgcaacctctcgacggcagactaggtttcatccccatctcaaccggcggcagcctagggcttcatcccccacccccaaatccatgccgctcaggttggagatcaatgtgtgcctgctcgacctcactggatctcagtccccatgtcgtccttctacttctcgcgtcactttgattttgctctctagtttgattttgtttccattgtggtgattagtggaaattttctcaatggtcagagagggtcaagttggtggacttgcaccccacggaggcatggatgttgagcctgtactcgaggagtgcctgcatccgggattatcacacacagtcaatttgtaggagaggggacgccatacatcaaagatgactaaagaagaggaagatgaagaatacctcgaagaggaagaagatgcccttgctggtgcaggggggaacacatttagtttcacaaccttcatgctcttaacccctctgatcctggtgcgtggcagattagactccgatggggaagtcactagcgaggtggatcaagttcgtgctcttcaggaagaagtcgtcatccaggtccagctccaccaaggccaagaatttatcgataagaatgctgttacgatttcaagtgtggctctacatatgcatctccagctatggagtagggatttgttctagccactattgcccttatttttcaatgtgtagaaaggtgtgagtaacaaaggggaaactgctgccaggaaggagcccacgttctctgagagctctccagtgatctcagagcttgtgcttgttagcgcccataacaacgagatcatgcgggaggtggcaaagggtgaaaattctagcgtgcaagaagtgctagtgactgatgtcagtcaagacttggagaagcaggtagtgtggggctgatacgtccaataatgcgctagtgactgatgtcagtcaagacttggagaagcaggcagtgtggggctgatacatccaatgatgctgagagggtgagtgaacagcgagcggtcatgatggcacaagctaccttcccttattatctgatgattttggattcaagctgaaagaagaggctatgctgaataaagtactaaaggagacagtcttgtcaaaggtagttgccattgataaattgcaatctggtctggcatcttcacttcgcatccaagatgttatgagaaatgagatccaaagagtccaggatgaactttcttgcataacccacaaagctaagcagttggagcttcaggtatcatgtgtaccttgcatatttcatatctattttccctaataaactagcagttcatagtttttatctaatcaaaataggattttggtaacagtttctctttcataatgaattaatcttagtttgtctagtgttagccaattgtagtggtcaagttgcagtatgtctcaaaatacttataagtaggtagacctttttgctgaatgagctggttacctaacgggtatttcgaggccaactgatgccactcatctctttgatctataaaagtattagaaatgcattttaatgattgaatcaagttatttgttgcttgtttgtctttagcaaatcattattttgtatttttttgcatattgccaatattttaggataatttttcccaagtgcagattaggtctactatgtgagtgttcagttagatagtcctttgaatgtttctagaaccagttctaaagttgagataatgtgaggtagcatacaaaacaacgtattgttagagatgcatactgtcaacaaacattcattccaggggtcatcttgatggtcatataagaaacactaggagaaaatgacataaattagtattacactgtcatgtttttgtatataaagtaggccatacaacttcactagaagtctagtctagagacagcagtgggctatcagtgaatgctatgttgttttaaagaccaacccataatgctgcgattgttacggtaccagcccaaatggcatgcttcttcaggacgacagatgatattcatatatgctagaatataagctctgtttgcggtattttcctccagtgctcctgctgtgtttgctgcacttaacaggtatccaagatggatgagtcaatcgatgagatccaataggatttctaggaatctacgaaggagctggctgctcttcgtggaacactgaaaacggtgattgaagacagggacctgtcgtggcaggaggtgaagtagctgagaagaaacatcagcatcatgctagaacgaggttgtgtcgctgaagaagatcgaagccttggacaaagacatacttgtcaaggagggagagatcacgatattgcaggacaacatcgacaagccgttcaatatcatctgcagcccaagttcgatgcaggagttcggcatggggtgaagatggctgctattttgtaagtgagttggtggatgaaaattcaagttattgtagaagacaacacatttctttgcatattacatcctgctatgatgttctgaactatgatgggttcaacgggtgccatttttctcttagagctattgttgacatggaagaaatggtggcagcaccagcttagtatggacaacaactgaaatctcctacagaagttgtttctaatgtgctattgagctccattgtgttttggcctacgcaatcttgttctccagtctgcctccaagaaaagctctatagtcccatagtttctgctaaggttcaacaacttcaggatcaattataggctgagaagcaagaaaaaatggacttcgtgatgaagcggaaaccattgatagtatgaagaggttgatggaagaaaataacaaccttcttcgtcaactataaagcttcaattgaagaaaagtgcctccatcttaagtttggttgactactataggacatgcagccttgtggtagctatagtagtagtagatatttatagttgctctagatttgaagttataggattatttttaattatgtttaatgtttaataatttgagttgaagttataagatttgctttgaattttaagttaaaggatttgagatatatggtttggagttatatgattatttgatggatggaatatttgtgtacaacaaattcatgtgatattttggctatgatgtgtaatattctatgacgatatcaattcatatgatgtgttcc

SEQ ID NO: 82703 - DNA, 387 bp, Zea Mays
atggacaaagagaccaccggaggaggacgcatccctaggagccaccgagcgtccgaggccaagccaggagtccaagtctccactctccaggaccggccgcggcatccccactccggcactccccaggaccaccggagtccgactgcagcggcgcagcctgctcccaccacgtacgaggttcctatccttgcaggtgagagtctgatgtctgaccaaggtgcttcgaggccgagcaggagcagtcgtcaagttcccacaaagagcagtgctgtggttgcaggaggttcctcaagtgcagctacaccgacgagtggtgctgcaaatgaaatgccatcttcaagtgttcaagctccaccatcagaagggatcaagtaccccactttgaga

SEQ ID NO: 82704 - DNA, 888 bp, Zea Mays
cttggcggggtgatatcgagcaatcaaggaagcagacggcacaggattcgccttcttcgacagacaagccaggtcacgaggcggtcgggggcagcagccagagggctcctcaaagaaggcaatcgattgccagggagggccaagatgggtggtcgtcatcatcctctaattcgaagtggaatcttgctcagaaacaatattcaaatagcccattgataagagggcttcatggatccagcagactagaggatttcggtggaagcataccaccagcagcgtcatcggcattagtcaagctgacaaaccggctcaacttcctgaaagaacggagggcgctgctggcaagcgagatgcagagcttggatctgggtcggcccccagcagcagctgctgctccatcagccaagtccccaacaccaaaaggccatgaaaggaagaagagtcgagactgaggaagatgttgtgctcttctgaatgctagttagccttatgattaccagcagtgtagtttgtgtgcatcccattcccttccatagtgctgtctgtctgtacatgtttccacaaattctactgcggatacataatatagatacggctggacaggctgctttgttattgttcaaattgttgctgaattgattcgtcgctcaaagcactttgctgacacatttctgatgttaaaaaaaactcgacctgctgagggtaagacagcctttggagttttgtttaaaaagacctcacacaggtcgagaaaacctctaaaccctacccaactcatacgcagcagcatcaaaacccatatgagaatgaccgcgactgagactaagctttagacctgtactttggcgtgggacaaacgatgggatatttttttaaccacagtctgac

SEQ ID NO: 82705 - DNA, 2264 bp, Zea Mays
attcttgatgggggcttctcatcccttgatatcattataatcagtttgactgagttacattatcctgtagaaccataacaacattattccaacaaatgggctccagactaatcagcttgcatggcaccacttcttctccgacctcttcttcttggagaatgtgacatagacaatgaatttagtatgggaggggacagttcatttcagctacttcaagctgctgcggctgcgaatcatgcacaagctattgttattattatgatggaggaatttgatcagatatttgatgacttggaagaaggttcctgttcttcagatgcttataccgagtctgaggatgatgatgttgataaggaatattccacagataatgacattaatgatgatgatgacggttcttatgattctggtgaagatgacattgaagaagacttggactactctgatgacagtgaacatgacagtaagatcaacactaatgtcaaggatggcaaggttaaaaacaatatctcagaaactgcaggtaatgacaataaccagtatcttcagcctcctataagagcaacaagaatagaaaatggtgcatcaagggaaggcactgatcagaattcttcacttaattttttccatagaagttgcacaggcaaagggtgcttctcatatggagaccaatagtcaatccaaccagaaacaagaatcatgtggaccaaatggatccaaagatcgtatactaagatcaacttctcgttcatcatcctccagagaaaaatctatggagaaatcatgcagttcggcacacaggggaaaaagaaccttatggggccgtacttcagcaagaaaagacctgtcaacagaggagattgaatgctgcagtgatgatgagtcccttattgagaaacttgagagcaacaaggttgatctccaatcgaaaattgcaaaggaggccaaagaaaatgctattctacagtcaagtctagaaaagcggaaagaagaactacatgagcgccgtttagcacttgaaaaggaagttgaaaatttgagggagcagctgcagaaggagagaagtttgaggacatccttggagtccggggtgatgaatttgcgaagagggcaggtgtccttgccgtcaacaacagacagcaagactaaggctgatcttgaggaggttgcaactgctgaatctgatattataaacttgaagcaagaggtttctgatcttcgtgggcaggtcagtggccagcagctgtgctgtgaatcatgcaacaaaaggctcctaaacacagacaggcttggcggacctgaaagctcatcagtggcagcgtcaccgaccattgggagtgactctgcatctggcatggttaaaaaagaacagaaaacatttcagggtgatatcgagcaatcaaggaagcagacggcacaggattcgccttcttcgacagacaagccaggtcacgaggcggtcgggggcagcagccagagggctcctcaaagaaggcaatcgattgccagggagggccaagatgggtggtcgtcatcatcctctaattcgaagtggaatcttgctcagaaacaatattcaaatagcccattgataagagggcttcatggatccagcagactagaggatttcggtggaagcataccaccagcagcgtcatcggcattagtcaagctgacaaaccggctcaacttcctgaaagaacggagggcgctgctggcaagcgagatgcagagcttggatctgggtcggcccccagcagcagctgctgctccatcagccaagtccccaacaccaaaaggccatgaaaggaagaagagtcgagactgaggaagatgttgtgctcttctgaatgctagttagccttatgattaccagcagtgtagtttgtgtgcatcccattcccttccatagtgctgtctgtctgtacatgtttccacaaattctactgcggatacataatatagatacggctggacaggctgctttgttattgttcaaattgttgctgaattgattcgtcgctcaaagcactttgctgacacatttctgatgttaaaaaaaactcgacctgctgagggtaagacagcctttggagttttgtttaaaaagacctcacacaggtcgagaaaacctctaaaccctacccaactcatacgcagcagcatcaaaacccatatgagaatgaccgcgactgagactaagctttagacctgtactttggcgtgggacaaacgatgggatatttttttaaccacagtctgac

SEQ ID NO: 82706 - DNA, 3709 bp, Zea Mays
ctcaggagctgctgctgtgttccggagtccggacttccgattccggcggcgctcacggatgagacgagacgatggctggccactgttcccccaactccgcagcggagagagggagaggaacgccgggcgcgggggcggcgcaatgacgtggcgtcgtccctccatctggaccgcatgccatgtctccaatcgctgctccgatgctgcccgctccattgccaagaatagaacgtactccaatcgtatccatagggagctcaaccaaccaaccatccatccatggattggtgccacaaacaacaagaccggccaagagggaagagcggaggagaggcggctcttgcagctgtcgggccggggaacaacatcggaggggctagtcatggtcttggctaggggatttctgatcgcctcctctcctctcctgccccgccgtgccgcaagccgcaatgcaactatgaaatctgagctcgccgcttccctccgccattcacgtcggtgacatttattcatttccttcattcaggatcgtctctgtctgaaagcacagcaagttggtatttggatcaggactcgtagggagcaaaaacggcagcgcattgccaggacagaggtcatcctgaagttctccttaagtcggacacttagaccaggctgacgatgtcagcttccgagttcagaattccataccagcaagtttcttcttcacagcctgttgagaatgtgaatcagtttaagacctgtcgatgtggggagggagacccaaactccacatctgaaactggtgacagcccgccggcctcttgtcctaattgtcaggtccttaagagtggacatttactactttcatctaaaggaattggatggacatcatggaaaaagcgctggtttattcttacaagggcatccctagttttcttcagaagtgaccctaatgtacctccacccagaggagctgaaccgattgttacacttggtggaatcgacttgaatagctctggaagcgttgccgtcaaagaagaaaggaaacttttgacagtgttctttcctgatggtcgtgatggacgaactttcactctgaaggcagaaactacagaagacctaaatgagtggagaaatgcactggagagtgctttagcacaggcacccagcgtagcaaatacaatggggcaaaatccaatattcagcactgatgtagcagcagaacctgctgaagctccagctgaacagtcggaggacagttctgttattggcagacctgcagaatttgcacttgtagatgctgatggtagtccatcatttctggagaaggccctgaagttcattgaagatcatggggtaaaggtagagggcatcctgcgtcagtctgctgatgttgaagaagtcaaacgcagaattcaggattatgaaaaggggaaaaacgagttctctccagaagaggatgctcatgttattggtgactgtattaagtatgttcttagagagatgccatcatctccagttcctgcatcatgttgcactgccctggttaaagcataccgaagtgacaaggcaagaagacttgatgagataagtagggtgatatatgaagttttccctgaaccaaatcgacaattgttgcagaggactcttaagatgatgcaaattgttgagtcacacaaagctgtgaataggatgtctcaatctgctttggcagcttgcatggcaccacttcttctccgacctcttcttcttggagaatgtgacatagacaatgaatttagtatgggaggggacagttcatttcagctacttcaagctgctgcggctgcgaatcatgcacaagctattgttattattatgatggaggaatttgatcagatatttgatgacttggaagaaggttcctgttcttcagatgcttataccgagtctgaggatgatgatgttgataaggaatattccacagataatgacattaatgatgatgatgacggttcttatgattctggtgaagatgacattgaagaagacttggactactctgatgacagtgaacatgacagtaagatcaacactaatgtcaaggatggcaaggttaaaaacaatatctcagaaactgcagaagttgcacaggcaaagggtgcttctcatatggagaccaatagtcaatccaaccagaaacaagaatcatgtggaccaaatggatccaaagatcgtatactaagatcaacttctcgttcatcatcctccagagaaaaatctatggagaaatcatgcagttcggcacacaggggaaaaagaaccttatggggccgtacttcagcaagaaaagacctgtcaacagaggagattgaatgctgcagtgatgatgagtcccttattgagaaacttgagagcaacaaggttgatctccaatcgaaaattgcaaaggaggccaaagaaaatgctattctacagtcaagtctagaaaagcggaaagaagaactacatgagcgccgtttagcacttgaaaaggaagttgaaaatttgagggagcagctgcagaaggagagaagtttgaggacatccttggagtccggggtgatgaatttgcgaagagggcaggtgtccttgccgtcaacaacagacagcaagactaaggctgatcttgaggaggttgcaactgctgaatctgatattataaacttgaagcaagaggtttctgatcttcgtgggcaggtcagtggccagcagctgtgctgtgaatcatgcaacaaaaggctcctaaacacagacaggcttggcggacctgaaagctcatcagtggcagcgtcaccgaccattgggagtgactctgcatctggcatgggtgatatcgagcaatcaaggaagcagacggcacaggattcgccttcttcgacagacaagccaggtcacgaggcggtcgggggcagcagccagagggctcctcaaagaaggcaatcgattgccagggagggccaagatgggtggtcgtcatcatcctctaattcgaagtggaatcttgctcagaaacaatattcaaatagcccattgataagagggcttcatggatccagcagactagaggatttcggtggaagcataccaccagcagcgtcatcggcattagtcaagctgacaaaccggctcaacttcctgaaagaacggagggcgctgctggcaagcgagatgcagagcttggatctgggtcggcccccagcagcagctgctgctccatcagccaagtccccaacaccaaaaggccatgaaaggaagaagagtcgagactgaggaagatgttgtgctcttctgaatgctagttagccttatgattaccagcagtgtagtttgtgtgcatcccattcccttccatagtgctgtctgtctgtacatgtttccacaaattctactgcggatacataatatagatacggctggacaggctgctttgttattgttcaaattgttgctgaattgattcgtcgctcaaagcactttgctgacacatttctgatgttaaaaaaaactcgacctgctgagggtaagacagcctttggagttttgtttaaaaagacctcacacaggtcgagaaaacctctaaaccctacccaactcatacgcagcagcatcaaaacccatatgagaatgaccgcgactgagactaagctttagacctgtactttggcgtgggacaaacgatgggatatttttttaaccacagtctgac

SEQ ID NO: 82707 - DNA, 3505 bp, Zea Mays
ctcaggagctgctgctgtgttccggagtccggacttccgattccggcggcgctcacggatgagacgagacgatggctggccactgttcccccaactccgcagcggagagagggagaggaacgccgggcgcgggggcggcgcaatgacgtggcgtcgtccctccatctggaccgcatgccatgtctccaatcgctgctccgatgctgcccgctccattgccaagaatagaacgtactccaatcgtatccatagggagctcaaccaaccaaccatccatccatggattggtgccacaaacaacaagaccggccaagagggaagagcggaggagaggcggctcttgcagctgtcgggccggggaacaacatcggaggggctagtcatggtcttggctaggggatttctgatcgcctcctctcctctcctgccccgccgtgccgcaagccgcaatgcaactatgaaatctgagctcgccgcttccctccgccattcacgtcggtgacatttattcatttccttcattcaggtaacatcctcgacgccccaacatctatatgtttcgaaaatgcacactgccagtcagtctatagctgattgcgatatggatcatggatcgacagtccatgcccttcacacaatcaaaatcgaatcttggttgcacaactggaataacgcacatcgttttcccccctcaacataggatcgtctctgtctgaaagcacagcaagttggtatttggatcaggactcggtaacacgtgtgcctgtttttttcactttttttttttaatttttggtgtggagcataaagccgatgaccttacaggcactaacattgtaccctgcatctctcagtagggagcaaaaacggcagcgcattgccaggacagaggtttcttcttcacagcctgttgagaatgtgaatcagtttaagacctgtcgatgtggggagggagacccaaactccacatctgaaactggtgacagcccgccggcctcttgtcctaattgtcaggtccttaagagtggacatttactactttcatctaaaggaattggatggacatcatggaaaaagcgctggtttattcttacaagggcatccctagttttcttcagaagtgaccctaatgtacctccacccagaggagctgaaccgattgttacacttggtggaatcgacttgaatagctctggaagcgttgccgtcaaagaagaaaggaaacttttgacagtgttctttcctgatggtcgtgatggacgaactttcactctgaaggcagaaactacagaagacctaaatgagtggagaaatgcactggagagtgctttagcacaggcacccagcgtagcaaatacaatggggcaaaatccaatattcagcactgatgtagcagcagaacctgctgaagctccagctgaacagtcggaggacagttctgttattggcagacctgcagaatttgcacttgtagatgctgatggtagtccatcatttctggagaaggccctgaagttcattgaagatcatggggtaaaggtagagggcatcctgcgtcagtctgctgatgttgaagaagtcaaacgcagaattcaggattatgaaaaggggaaaaacgagttctctccagaagaggatgctcatgttattggtgactgtattaaggacttggaagaaggttcctgttcttcagatgcttataccgagtctgaggatgatgatgttgataaggaatattccacagataatgacattaatgatgatgatgacggttcttatgattctggtgaagatgacattgaagaagacttggactactctgatgacagtgaacatgacagtaagatcaacactaatgtcaaggatggcaaggttaaaaacaatatctcagaaactgcagaagttgcacaggcaaagggtgcttctcatatggagaccaatagtcaatccaaccagaaacaagaatcatgtggaccaaatggatccaaagatcgtatactaagatcaacttctcgttcatcatcctccagagaaaaatctatggagaaatcatgcagttcggcacacaggggaaaaagaaccttatggggccgtacttcagcaagaaaagacctgtcaacagaggagattgaatgctgcagtgatgatgagtcccttattgagaaacttgagagcaacaaggttgatctccaatcgaaaattgcaaaggaggccaaagaaaatgctattctacagtcaagtctagaaaagcggaaagaagaactacatgagcgccgtttagcacttgaaaaggaagttgaaaatttgagggagcagctgcagaaggagagaagtttgaggacatccttggagtccggggtgatgaatttgcgaagagggcaggtgtccttgccgtcaacaacagacagcaagactaaggctgatcttgaggaggttgcaactgctgaatctgatattataaacttgaagcaagaggtttctgatcttcgtgggcaggtcagtggccagcagctgtgctgtgaatcatgcaacaaaaggctcctaaacacagacaggcttggcggacctgaaagctcatcagtggcagcgtcaccgaccattgggagtgactctgcatctggcatgggtgatatcgagcaatcaaggaagcagacggcacaggattcgccttcttcgacagacaagccaggtcacgaggcggtcgggggcagcagccagagggctcctcaaagaaggcaatcgattgccagggagggccaagatgggtggtcgtcatcatcctctaattcgaagtggaatcttgctcagaaacaatattcaaatagcccattgataagagggcttcatggatccagcagactagaggatttcggtggaagcataccaccagcagcgtcatcggcattagtcaagctgacaaaccggctcaacttcctgaaagaacggagggcgctgctggcaagcgagatgcagagcttggatctgggtcggcccccagcagcagctgctgctccatcagccaagtccccaacaccaaaaggccatgaaaggaagaagagtcgagactgaggaagatgttgtgctcttctgaatgctagttagccttatgattaccagcagtgtagtttgtgtgcatcccattcccttccatagtgctgtctgtctgtacatgtttccacaaattctactgcggatacataatatagatacggctggacaggctgctttgttattgttcaaattgttgctgaattgattcgtcgctcaaagcactttgctgacacatttctgatgttaaaaaaaactcgacctgctgagggtaagacagcctttggagttttgtttaaaaagacctcacacaggtcgagaaaacctctaaaccctacccaactcatacgcagcagcatcaaaacccatatgagaatgaccgcgactgagactaagctttagacctgtactttggcgtgggacaaacgatgggatatttttttaaccacagtctgac

SEQ ID NO: 82708 - DNA, 3260 bp, Zea Mays
ctcaggagctgctgctgtgttccggagtccggacttccgattccggcggcgctcacggatgagacgagacgatggctggccactgttcccccaactccgcagcggagagagggagaggaacgccgggcgcgggggcggcgcaatgacgtggcgtcgtccctccatctggaccgcatgccatgtctccaatcgctgctccgatgctgcccgctccattgccaagaatagaacgtactccaatcgtatccatagggagctcaaccaaccaaccatccatccatggattggtgccacaaacaacaagaccggccaagagggaagagcggaggagaggcggctcttgcagctgtcgggccggggaacaacatcggaggggctagtcatggtcttggctaggggatttctgatcgcctcctctcctctcctgccccgccgtgccgcaagccgcaatgcaactatgaaatctgagctcgccgcttccctccgccattcacgtcggtgacatttattcatttccttcattcagtagggagcaaaaacggcagcgcattgccaggacagaggtcatcctgaagttctccttaagtcggacacttagaccaggctgacgatgtcagcttccgagttcagaattccataccagcaagtttcttcttcacagcctgttgagaatgtgaatcagtttaagacctgtcgatgtggggagggagacccaaactccacatctgaaactggtgacagcccgccggcctcttgtcctaattgtcaggtccttaagagtggacatttactactttcatctaaaggaattggatggacatcatggaaaaagcgctggtttattcttacaagggcatccctagttttcttcagaagtgaccctaatgtacctccacccagaggagctgaaccgattgttacacttggtggaatcgacttgaatagctctggaagcgttgccgtcaaagaagaaaggaaacttttgacagtgttctttcctgatggtcgtgatggacgaactttcactctgaaggcagaaactacagaagacctaaatgagtggagaaatgcactggagagtgctttagcacaggcacccagcgtagcaaatacaatggggcaaaatccaatattcagcactgatgtagcagcagaacctgctgaagctccagctgaacagtcggaggacagttctgttattggcagacctgcagaatttgcacttgtagatgctgatggtagtccatcatttctggagaaggccctgaagttcattgaagatcatggggtaaaggtagagggcatcctgcgtcagtctgctgatgttgaagaagtcaaacgcagaattcaggattatgaaaaggggaaaaacgagttctctccagaagaggatgctcatgttattggtgactgtattaaggacttggaagaaggttcctgttcttcagatgcttataccgagtctgaggatgatgatgttgataaggaatattccacagataatgacattaatgatgatgatgacggttcttatgattctggtgaagatgacattgaagaagacttggactactctgatgacagtgaacatgacagtaagatcaacactaatgtcaaggatggcaaggttaaaaacaatatctcagaaactgcagaagttgcacaggcaaagggtgcttctcatatggagaccaatagtcaatccaaccagaaacaagaatcatgtggaccaaatggatccaaagatcgtatactaagatcaacttctcgttcatcatcctccagagaaaaatctatggagaaatcatgcagttcggcacacaggggaaaaagaaccttatggggccgtacttcagcaagaaaagacctgtcaacagaggagattgaatgctgcagtgatgatgagtcccttattgagaaacttgagagcaacaaggttgatctccaatcgaaaattgcaaaggaggccaaagaaaatgctattctacagtcaagtctagaaaagcggaaagaagaactacatgagcgccgtttagcacttgaaaaggaagttgaaaatttgagggagcagctgcagaaggagagaagtttgaggacatccttggagtccggggtgatgaatttgcgaagagggcaggtgtccttgccgtcaacaacagacagcaagactaaggctgatcttgaggaggttgcaactgctgaatctgatattataaacttgaagcaagaggtttctgatcttcgtgggcaggtcagtggccagcagctgtgctgtgaatcatgcaacaaaaggctcctaaacacagacaggcttggcggacctgaaagctcatcagtggcagcgtcaccgaccattgggagtgactctgcatctggcatgggtgatatcgagcaatcaaggaagcagacggcacaggattcgccttcttcgacagacaagccaggtcacgaggcggtcgggggcagcagccagagggctcctcaaagaaggcaatcgattgccagggagggccaagatgggtggtcgtcatcatcctctaattcgaagtggaatcttgctcagaaacaatattcaaatagcccattgataagagggcttcatggatccagcagactagaggatttcggtggaagcataccaccagcagcgtcatcggcattagtcaagctgacaaaccggctcaacttcctgaaagaacggagggcgctgctggcaagcgagatgcagagcttggatctgggtcggcccccagcagcagctgctgctccatcagccaagtccccaacaccaaaaggccatgaaaggaagaagagtcgagactgaggaagatgttgtgctcttctgaatgctagttagccttatgattaccagcagtgtagtttgtgtgcatcccattcccttccatagtgctgtctgtctgtacatgtttccacaaattctactgcggatacataatatagatacggctggacaggctgctttgttattgttcaaattgttgctgaattgattcgtcgctcaaagcactttgctgacacatttctgatgttaaaaaaaactcgacctgctgagggtaagacagcctttggagttttgtttaaaaagacctcacacaggtcgagaaaacctctaaaccctacccaactcatacgcagcagcatcaaaacccatatgagaatgaccgcgactgagactaagctttagacctgtactttggcgtgggacaaacgatgggatatttttttaaccacagtctgac

SEQ ID NO: 82709 - DNA, 3586 bp, Zea Mays
ggccattggagctcaggagctgctgctgtgttccggagtccggacttccgattccggcggcgctcacggatgagacgagacgatggctggccactgttcccccaactccgcagcggagagagggagaggaacgccgggcgcgggggcggcgcaatgacgtggcgtcgtccctccatctggaccgcatgccatgtctccaatcgctgctccgatgctgcccgctccattgccaagaatagaacgtactccaatcgtatccatagggagctcaaccaaccaaccatccatccatggattggtgccacaaacaacaagaccggccaagagggaagagcggaggagaggcggctcttgcagctgtcgggccggggaacaacatcggaggggctagtcatggtcttggctaggggatttctgatcgcctcctctcctctcctgccccgccgtgccgcaagccgcaatgcaactatgaaatctgagctcgccgcttccctccgccattcacgtcggtgacatttattcatttccttcattcagtagggagcaaaaacggcagcgcattgccaggacagaggtcatcctgaagttctccttaagtcggacacttagaccaggctgacgatgtcagcttccgagttcagaattccataccagcaagtttcttcttcacagcctgttgagaatgtgaatcagtttaagacctgtcgatgtggggagggagacccaaactccacatctgaaactggtgacagcccgccggcctcttgtcctaattgtcaggtccttaagagtggacatttactactttcatctaaaggaattggatggacatcatggaaaaagcgctggtttattcttacaagggcatccctagttttcttcagaagtgaccctaatgtacctccacccagaggagctgaaccgattgttacacttggtggaatcgacttgaatagctctggaagcgttgccgtcaaagaagaaaggaaacttttgacagtgttctttcctgatggtcgtgatggacgaactttcactctgaaggcagaaactacagaagacctaaatgagtggagaaatgcactggagagtgctttagcacaggcacccagcgtagcaaatacaatggggcaaaatccaatattcagcactgatgtagcagcagaacctgctgaagctccagctgaacagtcggaggacagttctgttattggcagacctgcagaatttgcacttgtagatgctgatggtagtccatcatttctggagaaggccctgaagttcattgaagatcatggggtaaaggtagagggcatcctgcgtcagtctgctgatgttgaagaagtcaaacgcagaattcaggattatgaaaaggggaaaaacgagttctctccagaagaggatgctcatgttattggtgactgtattaagtatgttcttagagagatgccatcatctccagttcctgcatcatgttgcactgccctggttaaagcataccgaagtgacaaggcaagaagacttgatgagataagtagggtgatatatgaagttttccctgaaccaaatcgacaattgttgcagaggactcttaagatgatgcaaattgttgagtcacacaaagctgtgaataggatgtctcaatctgctttggcagcttgcatggcaccacttcttctccgacctcttcttcttggagaatgtgacatagacaatgaatttagtatgggaggggacagttcatttcagctacttcaagctgctgcggctgcgaatcatgcacaagctattgttattattatgatggaggaatttgatcagatatttgatgacttggaagaaggttcctgttcttcagatgcttataccgagtctgaggatgatgatgttgataaggaatattccacagataatgacattaatgatgatgatgacggttcttatgattctggtgaagatgacattgaagaagacttggactactctgatgacagtgaacatgacagtaagatcaacactaatgtcaaggatggcaaggttaaaaacaatatctcagaaactgcagaagttgcacaggcaaagggtgcttctcatatggagaccaatagtcaatccaaccagaaacaagaatcatgtggaccaaatggatccaaagatcgtatactaagatcaacttctcgttcatcatcctccagagaaaaatctatggagaaatcatgcagttcggcacacaggggaaaaagaaccttatggggccgtacttcagcaagaaaagacctgtcaacagaggagattgaatgctgcagtgatgatgagtcccttattgagaaacttgagagcaacaaggttgatctccaatcgaaaattgcaaaggaggccaaagaaaatgctattctacagtcaagtctagaaaagcggaaagaagaactacatgagcgccgtttagcacttgaaaaggaagttgaaaatttgagggagcagctgcagaaggagagaagtttgaggacatccttggagtccggggtgatgaatttgcgaagagggcaggtgtccttgccgtcaacaacagacagcaaggtcagtggccagcagctgtgctgtgaatcatgcaacaaaaggctcctaaacacagacaggcttggcggacctgaaagctcatcagtggcagcgtcaccgaccattgggagtgactctgcatctggcatgggtgatatcgagcaatcaaggaagcagacggcacaggattcgccttcttcgacagacaagccaggtcacgaggcggtcgggggcagcagccagagggctcctcaaagaaggcaatcgattgccagggagggccaagatgggtggtcgtcatcatcctctaattcgaagtggaatcttgctcagaaacaatattcaaatagcccattgataagagggcttcatggatccagcagactagaggatttcggtggaagcataccaccagcagcgtcatcggcattagtcaagctgacaaaccggctcaacttcctgaaagaacggagggcgctgctggcaagcgagatgcagagcttggatctgggtcggcccccagcagcagctgctgctccatcagccaagtccccaacaccaaaaggccatgaaaggaagaagagtcgagactgaggaagatgttgtgctcttctgaatgctagttagccttatgattaccagcagtgtagtttgtgtgcatcccattcccttccatagtgctgtctgtctgtacatgtttccacaaattctactgcggatacataatatagatacggctggacaggctgctttgttattgttcaaattgttgctgaattgattcgtcgctcaaagcactttgctgacacatttctgatgttaaaaaaaactcgacctgctgagggtaagacagcctttggagttttgtttaaaaagacctcacacaggtcgagaaaacctctaaaccctacccaactcatacgcagcagcatcaaaacccatatgagaatgaccgcgactgagactaagctttagacctgtactttggcgtgggacaaacgatgggatatttttttaaccacagtctgac

SEQ ID NO: 82710 - DNA, 3573 bp, Zea Mays
caaaagtgtccggtcactagttaccaatataatcaaataagatggtaccactaccacgggccattggagctcaggagctgctgctgtgttccggagtccggacttccgattccggcggcgctcacggatgagacgagacgatggctggccactgttcccccaactccgcagcggagagagggagaggaacgccgggcgcgggggcggcgcaatgacgtggcgtcgtccctccatctggaccgcatgccatgtctccaatcgctgctccgatgctgcccgctccattgccaagaatagaacgtactccaatcgtatccatagggagctcaaccaaccaaccatccatccatggattggtgccacaaacaacaagaccggccaagagggaagagcggaggagaggcggctcttgcagctgtcgggccggggaacaacatcggaggggctagtcatggtcttggctaggggatttctgatcgcctcctctcctctcctgccccgccgtgccgcaagccgcaatgcaactatgaaatctgagctcgccgcttccctccgccattcacgtcggtgacatttattcatttccttcattcaggtaacatcctcgacgccccaacatctatatgtttcgaaaatgcacactgccagtcagtctatagctgattgcgatatggatcatggatcgacagtccatgcccttcacacaatcaaaatcgaatcttggttgcacaactggaataacgcacatcgttttcccccctcaacataggatcgtctctgtctgaaagcacagcaagttggtatttggatcaggactcggtaacacgtgtgcctgtttttttcactttttttttttaatttttggtgtggagcataaagccgatgaccttacaggcactaacattgtaccctgcatctctcagtagggagcaaaaacggcagcgcattgccaggacagaggtcatcctgaagttctccttaagtcggacacttagaccaggctgacgatgtcagcttccgagttcagaattccataccagcaagtttcttcttcacagcctgttgagaatgtgaatcagtttaagacctgtcgatgtggggagggagacccaaactccacatctgaaactggtgacagcccgccggcctcttgtcctaattgtcaggtccttaagagtggacatttactactttcatctaaaggaattggatggacatcatggaaaaagcgctggtttattcttacaagggcatccctagttttcttcagaagtgaccctaatgtacctccacccagaggagctgaaccgattgttacacttggtggaatcgacttgaatagctctggaagcgttgccgtcaaagaagaaaggaaacttttgacagtgttctttcctgatggtcgtgatggacgaactttcactctgaaggcagaaactacagaagacctaaatgagtggagaaatgcactggagagtgctttagcacaggcacccagcgtagcaaatacaatggggcaaaatccaatattcagcactgatgtagcagcagaacctgctgaagctccagctgaacagtcggaggacagttctgttattggcagacctgcagaatttgcacttgtagatgctgatggtagtccatcatttctggagaaggccctgaagttcattgaagatcatggggtaaaggtagagggcatcctgcgtcagtctgctgatgttgaagaagtcaaacgcagaattcaggattatgaaaaggggaaaaacgagttctctccagaagaggatgctcatgttattggtgactgtattaaggacttggaagaaggttcctgttcttcagatgcttataccgagtctgaggatgatgatgttgataaggaatattccacagataatgacattaatgatgatgatgacggttcttatgattctggtgaagatgacattgaagaagacttggactactctgatgacagtgaacatgacagtaagatcaacactaatgtcaaggatggcaaggttaaaaacaatatctcagaaactgcagaagttgcacaggcaaagggtgcttctcatatggagaccaatagtcaatccaaccagaaacaagaatcatgtggaccaaatggatccaaagatcgtatactaagatcaacttctcgttcatcatcctccagagaaaaatctatggagaaatcatgcagttcggcacacaggggaaaaagaaccttatggggccgtacttcagcaagaaaagacctgtcaacagaggagattgaatgctgcagtgatgatgagtcccttattgagaaacttgagagcaacaaggttgatctccaatcgaaaattgcaaaggaggccaaagaaaatgctattctacagtcaagtctagaaaagcggaaagaagaactacatgagcgccgtttagcacttgaaaaggaagttgaaaatttgagggagcagctgcagaaggagagaagtttgaggacatccttggagtccggggtgatgaatttgcgaagagggcaggtgtccttgccgtcaacaacagacagcaaggtcagtggccagcagctgtgctgtgaatcatgcaacaaaaggctcctaaacacagacaggcttggcggacctgaaagctcatcagtggcagcgtcaccgaccattgggagtgactctgcatctggcatgggtgatatcgagcaatcaaggaagcagacggcacaggattcgccttcttcgacagacaagccaggtcacgaggcggtcgggggcagcagccagagggctcctcaaagaaggcaatcgattgccagggagggccaagatgggtggtcgtcatcatcctctaattcgaagtggaatcttgctcagaaacaatattcaaatagcccattgataagagggcttcatggatccagcagactagaggatttcggtggaagcataccaccagcagcgtcatcggcattagtcaagctgacaaaccggctcaacttcctgaaagaacggagggcgctgctggcaagcgagatgcagagcttggatctgggtcggcccccagcagcagctgctgctccatcagccaagtccccaacaccaaaaggccatgaaaggaagaagagtcgagactgaggaagatgttgtgctcttctgaatgctagttagccttatgattaccagcagtgtagtttgtgtgcatcccattcccttccatagtgctgtctgtctgtacatgtttccacaaattctactgcggatacataatatagatacggctggacaggctgctttgttattgttcaaattgttgctgaattgattcgtcgctcaaagcactttgctgacacatttctgatgttaaaaaaaactcgacctgctgagggtaagacagcctttggagttttgtttaaaaagacctcacacaggtcgagaaaacctctaaaccctacccaactcatacgcagcagcatcaaaacccatatgagaatgaccgcgactgagactaagctttagacctgtactttggcgtgggacaaacgatgggatatttttttaaccacagtctgac

SEQ ID NO: 82711 - DNA, 3318 bp, Zea Mays
atttgatagggcaaaagtgtccggtcactagttaccaatataatcaaataagatggtaccactaccacgggccattggagctcaggagctgctgctgtgttccggagtccggacttccgattccggcggcgctcacggatgagacgagacgatggctggccactgttcccccaactccgcagcggagagagggagaggaacgccgggcgcgggggcggcgcaatgacgtggcgtcgtccctccatctggaccgcatgccatgtctccaatcgctgctccgatgctgcccgctccattgccaagaatagaacgtactccaatcgtatccatagggagctcaaccaaccaaccatccatccatggattggtgccacaaacaacaagaccggccaagagggaagagcggaggagaggcggctcttgcagctgtcgggccggggaacaacatcggaggggctagtcatggtcttggctaggggatttctgatcgcctcctctcctctcctgccccgccgtgccgcaagccgcaatgcaactatgaaatctgagctcgccgcttccctccgccattcacgtcggtgacatttattcatttccttcattcaggatcgtctctgtctgaaagcacagcaagttggtatttggatcaggactcgtagggagcaaaaacggcagcgcattgccaggacagaggtcatcctgaagttctccttaagtcggacacttagaccaggctgacgatgtcagcttccgagttcagaattccataccagcaagtttcttcttcacagcctgttgagaatgtgaatcagtttaagacctgtcgatgtggggagggagacccaaactccacatctgaaactggtgacagcccgccggcctcttgtcctaattgtcaggtccttaagagtggacatttactactttcatctaaaggaattggatggacatcatggaaaaagcgctggtttattcttacaagggcatccctagttttcttcagaagtgaccctaatgtacctccacccagaggagctgaaccgattgttacacttggtggaatcgacttgaatagctctggaagcgttgccgtcaaagaagaaaggaaacttttgacagtgttctttcctgatggtcgtgatggacgaactttcactctgaaggcagaaactacagaagacctaaatgagtggagaaatgcactggagagtgctttagcacaggcacccagcgtagcaaatacaatggggcaaaatccaatattcagcactgatgtagcagcagaacctgctgaagctccagctgaacagtcggaggacagttctgttattggcagacctgcagaatttgcacttgtagatgctgatggtagtccatcatttctggagaaggccctgaagttcattgaagatcatggggtaaaggtagagggcatcctgcgtcagtctgctgatgttgaagaagtcaaacgcagaattcaggattatgaaaaggggaaaaacgagttctctccagaagaggatgctcatgttattggtgactgtattaaggacttggaagaaggttcctgttcttcagatgcttataccgagtctgaggatgatgatgttgataaggaatattccacagataatgacattaatgatgatgatgacggttcttatgattctggtgaagatgacattgaagaagacttggactactctgatgacagtgaacatgacagtaagatcaacactaatgtcaaggatggcaaggttaaaaacaatatctcagaaactgcagaagttgcacaggcaaagggtgcttctcatatggagaccaatagtcaatccaaccagaaacaagaatcatgtggaccaaatggatccaaagatcgtatactaagatcaacttctcgttcatcatcctccagagaaaaatctatggagaaatcatgcagttcggcacacaggggaaaaagaaccttatggggccgtacttcagcaagaaaagacctgtcaacagaggagattgaatgctgcagtgatgatgagtcccttattgagaaacttgagagcaacaaggttgatctccaatcgaaaattgcaaaggaggccaaagaaaatgctattctacagtcaagtctagaaaagcggaaagaagaactacatgagcgccgtttagcacttgaaaaggaagttgaaaatttgagggagcagctgcagaaggagagaagtttgaggacatccttggagtccggggtgatgaatttgcgaagagggcaggtgtccttgccgtcaacaacagacagcaaggtcagtggccagcagctgtgctgtgaatcatgcaacaaaaggctcctaaacacagacaggcttggcggacctgaaagctcatcagtggcagcgtcaccgaccattgggagtgactctgcatctggcatgaaaacatttcagggtgatatcgagcaatcaaggaagcagacggcacaggattcgccttcttcgacagacaagccaggtcacgaggcggtcgggggcagcagccagagggctcctcaaagaaggcaatcgattgccagggagggccaagatgggtggtcgtcatcatcctctaattcgaagtggaatcttgctcagaaacaatattcaaatagcccattgataagagggcttcatggatccagcagactagaggatttcggtggaagcataccaccagcagcgtcatcggcattagtcaagctgacaaaccggctcaacttcctgaaagaacggagggcgctgctggcaagcgagatgcagagcttggatctgggtcggcccccagcagcagctgctgctccatcagccaagtccccaacaccaaaaggccatgaaaggaagaagagtcgagactgaggaagatgttgtgctcttctgaatgctagttagccttatgattaccagcagtgtagtttgtgtgcatcccattcccttccatagtgctgtctgtctgtacatgtttccacaaattctactgcggatacataatatagatacggctggacaggctgctttgttattgttcaaattgttgctgaattgattcgtcgctcaaagcactttgctgacacatttctgatgttaaaaaaaactcgacctgctgagggtaagacagcctttggagttttgtttaaaaagacctcacacaggtcgagaaaacctctaaaccctacccaactcatacgcagcagcatcaaaacccatatgagaatgaccgcgactgagactaagctttagacctgtactttggcgtgggacaaacgatgggatatttttttaaccacagtctgac

SEQ ID NO: 82712 - DNA, 4085 bp, Zea Mays
gttttgatccagagcttagcggcggcagagctggaggagggagaacgatggtaccactaccacgggccattggagctcaggagctgctgctgtgttccggagtccggacttccgattccggcggcgctcacggatgagacgagacgatggctggccactgttcccccaactccgcagcggagagagggagaggaacgccgggcgcgggggcggcgcaatgacgtggcgtcgtccctccatctggaccgcatgccatgtctccaatcgctgctccgatgctgcccgctccattgccaagaatagaacgtactccaatcgtatccatagggagctcaaccaaccaaccatccatccatggattggtgccacaaacaacaagaccggccaagagggaagagcggaggagaggcggctcttgcagctgtcgggccggggaacaacatcggaggggctagtcatggtcttggctaggggatttctgatcgcctcctctcctctcctgccccgccgtgccgcaagccgcaatgcaactatgaaatctgagctcgccgcttccctccgccattcacgtcggtgacatttattcatttccttcattcaggtaacatcctcgacgccccaacatctatatgtttcgaaaatgcacactgccagtcagtctatagctgattgcgatatggatcatggatcgacagtccatgcccttcacacaatcaaaatcgaatcttggttgcacaactggaataacgcacatcgttttcccccctcaacataggatcgtctctgtctgaaagcacagcaagttggtatttggatcaggactcggtaacacgtgtgcctgtttttttcactttttttttttaatttttggtgtggagcataaagccgatgaccttacaggcactaacattgtaccctgcatctctcagtagggagcaaaaacggcagcgcattgccaggacagaggtttcttcttcacagcctgttgagaatgtgaatcagtttaagacctgtcgatgtggggagggagacccaaactccacatctgaaactggtgacagcccgccggcctcttgtcctaattgtcaggtccttaagagtggacatttactactttcatctaaaggaattggatggacatcatggaaaaagcgctggtttattcttacaagggcatccctagttttcttcagaagtgaccctaatgtacctccacccagaggagctgaaccgattgttacacttggtggaatcgacttgaatagctctggaagcgttgccgtcaaagaagaaaggaaacttttgacagtgttctttcctgatggtcgtgatggacgaactttcactctgaaggcagaaactacagaagacctaaatgagtggagaaatgcactggagagtgctttagcacaggcacccagcgtagcaaatacaatggggcaaaatccaatattcagcactgatgtagcagcagaacctgctgaagctccagctgaacagtcggaggacagttctgttattggcagacctgcagaatttgcacttgtagatgctgatggtagtccatcatttctggagaaggccctgaagttcattgaagatcatggggtaaaggtagagggcatcctgcgtcagtctgctgatgttgaagaagtcaaacgcagaattcaggattatgaaaaggggaaaaacgagttctctccagaagaggatgctcatgttattggtgactgtattaagtatgttcttagagagatgccatcatctccagttcctgcatcatgttgcactgccctggttaaagcataccgaagtgacaaggcaagaagacttgatgagataagtagggtgatatatgaagttttccctgaaccaaatcgacaattgttgcagaggactcttaagatgatgcaaattgttgagtcacacaaagctgtgaataggatgtctcaatctgctttggcagcttgcatggcaccacttcttctccgacctcttcttcttggagaatgtgacatagacaatgaatttagtatgggaggggacagttcatttcagctacttcaagctgctgcggctgcgaatcatgcacaagctattgttattattatgatggaggaatttgatcagatatttgatgtatcctctttttacttgatccacttgaagtacttcacgtagttgttcatgagatataattcaactgattatcatacaggacttggaagaaggttcctgttcttcagatgcttataccgagtctgaggatgatgatgttgataaggaatattccacagataatgacattaatgatgatgatgacggttcttatgattctggtgaagatgacattgaagaagacttggactactctgatgacagtgaacatgacagtaagatcaacactaatgtcaaggatggcaaggttaaaaacaatatctcagaaactgcagaagttgcacaggcaaagggtgcttctcatatggagaccaatagtcaatccaaccagaaacaagaatcatgtggaccaaatggatccaaagatcgtatactaagatcaacttctcgttcatcatcctccagagaaaaatctatggagaaatcatgcagttcggcacacaggggaaaaagaaccttatggggccgtacttcagcaagaaaagacctgtcaacagaggagattgaatgctgcagtgatgatgagtcccttattgagaaacttgagagcaacaaggttgatctccaatcgaaaattgcaaaggaggccaaagaaaatgctattctacagtcaagtctagaaaagcggaaagaagaactacatgagcgccgtttagcacttgaaaaggaagttgaaaatttgagggagcagctgcagaaggagagaagtttgaggacatccttggagtccggggtgatgaatttgcgaagagggcaggtgtccttgccgtcaacaacagacagcaagactaaggctgatcttgaggaggttgcaactgctgaatctgatattataaacttgaagcaagaggtttctgatcttcgtgggcaggtcagtggccagcagctgtgctgtgaatcatgcaacaaaaggctcctaaacacagacaggcttggcggacctgaaagctcatcagtggcagcgtcaccgaccattgggagtgactctgcatctggcatggttaaaaaagaacagaaaacatttcagggtgatatcgagcaatcaaggaagcagacggcacaggattcgccttcttcgacagacaagccaggtcacgaggcggtcgggggcagcagccagagggctcctcaaagaaggcaatcgattgccagggagggccaagatgggtggtcgtcatcatcctctaattcgaagtggaatcttgctcagaaacaatattcaaatagcccattgataagagggcttcatggatccagcagactagaggatttcggtggaagcataccaccagcagcgtcatcggcattagtcaagctgacaaaccggctcaacttcctgaaagaacggagggcgctgctggcaagcgagatgcagagcttggatctgggtcggcccccagcagcagctgctgctccatcagccaagtccccaacaccaaaaggccatgaaaggaagaagagtcgagactgaggaagatgttgtgctcttctgaatgctagttagccttatgattaccagcagtgtagtttgtgtgcatcccattcccttccatagtgctgtctgtctgtacatgtttccacaaattctactgcggatacataatatagatacggctggacaggctgctttgttattgttcaaattgttgctgaattgattcgtcgctcaaagcactttgctgacacatttctgatgttaaaaaaaactcgacctgctgagggtaagacagcctttggagttttgtttaaaaagacctcacacaggtcgagaaaacctctaaaccctacccaactcatacgcagcagcatcaaaacccatatgagaatgaccgcgactgagactaagctttagacctgtactttggcgtgggacaaacgatgggatatttttttaaccacagtctgac

SEQ ID NO: 82713 - DNA, 4294 bp, Zea Mays
cttctctatcctctgtgtcccctccaccaaaaccgacggcgacgtcgctctcctccaccggtgctcggcgctctcccccgacggccctctcttctctatcatctttgtcccctccaccaaaaccgacggcgacgtcgctctccaccggtgctagactgtcctgtgaacggcagagctgagcagttttgatccagagcttagcggcggcagagctggaggagggagaacggtgaacatatttgatagggcaaaagtgtccggtcactagttaccaatataatcaaataaggtttagttttaaataatattctaaatggtatttttttacaagataatgtttgataatggttttttacgaagtgtgttactataatgtcattcgagcgaatctaagtttcataatgccataaattcaattttctcctcagatggtaccactaccacgggccattggagctcaggagctgctgctgtgttccggagtccggacttccgattccggcggcgctcacggatgagacgagacgatggctggccactgttcccccaactccgcagcggagagagggagaggaacgccgggcgcgggggcggcgcaatgacgtggcgtcgtccctccatctggaccgcatgccatgtctccaatcgctgctccgatgctgcccgctccattgccaagaatagaacgtactccaatcgtatccatagggagctcaaccaaccaaccatccatccatggattggtgccacaaacaacaagaccggccaagagggaagagcggaggagaggcggctcttgcagctgtcgggccggggaacaacatcggaggggctagtcatggtcttggctaggggatttctgatcgcctcctctcctctcctgccccgccgtgccgcaagccgcaatgcaactatgaaatctgagctcgccgcttccctccgccattcacgtcggtgacatttattcatttccttcattcaggatcgtctctgtctgaaagcacagcaagttggtatttggatcaggactcggtaacacgtgtgcctgtttttttcactttttttttttaatttttggtgtggagcataaagccgatgaccttacaggcactaacattgtaccctgcatctctcagtagggagcaaaaacggcagcgcattgccaggacagaggtcatcctgaagttctccttaagtcggacacttagaccaggctgacgatgtcagcttccgagttcagaattccataccagcaagtttcttcttcacagcctgttgagaatgtgaatcagtttaagacctgtcgatgtggggagggagacccaaactccacatctgaaactggtgacagcccgccggcctcttgtcctaattgtcaggtccttaagagtggacatttactactttcatctaaaggaattggatggacatcatggaaaaagcgctggtttattcttacaagggcatccctagttttcttcagaagtgaccctaatgtacctccacccagaggagctgaaccgattgttacacttggtggaatcgacttgaatagctctggaagcgttgccgtcaaagaagaaaggaaacttttgacagtgttctttcctgatggtcgtgatggacgaactttcactctgaaggcagaaactacagaagacctaaatgagtggagaaatgcactggagagtgctttagcacaggcacccagcgtagcaaatacaatggggcaaaatccaatattcagcactgatgtagcagcagaacctgctgaagctccagctgaacagtcggaggacagttctgttattggcagacctgcagaatttgcacttgtagatgctgatggtagtccatcatttctggagaaggccctgaagttcattgaagatcatggggtaaaggtagagggcatcctgcgtcagtctgctgatgttgaagaagtcaaacgcagaattcaggattatgaaaaggggaaaaacgagttctctccagaagaggatgctcatgttattggtgactgtattaagtatgttcttagagagatgccatcatctccagttcctgcatcatgttgcactgccctggttaaagcataccgaagtgacaaggcaagaagacttgatgagataagtagggtgatatatgaagttttccctgaaccaaatcgacaattgttgcagaggactcttaagatgatgcaaattgttgagtcacacaaagctgtgaataggatgtctcaatctgctttggcagcttgcatggcaccacttcttctccgacctcttcttcttggagaatgtgacatagacaatgaatttagtatgggaggggacagttcatttcagctacttcaagctgctgcggctgcgaatcatgcacaagctattgttattattatgatggaggaatttgatcagatatttgatgacttggaagaaggttcctgttcttcagatgcttataccgagtctgaggatgatgatgttgataaggaatattccacagataatgacattaatgatgatgatgacggttcttatgattctggtgaagatgacattgaagaagacttggactactctgatgacagtgaacatgacagtaagatcaacactaatgtcaaggatggcaaggttaaaaacaatatctcagaaactgcaggtaatgacaataaccagtatcttcagcctcctataagagcaacaagaatagaaaatggtgcatcaagggaaggcactgatcagaattcttcacttaattttttccatagaagttgcacaggcaaagggtgcttctcatatggagaccaatagtcaatccaaccagaaacaagaatcatgtggaccaaatggatccaaagatcgtatactaagatcaacttctcgttcatcatcctccagagaaaaatctatggagaaatcatgcagttcggcacacaggggaaaaagaaccttatggggccgtacttcagcaagaaaagacctgtcaacagaggagattgaatgctgcagtgatgatgagtcccttattgagaaacttgagagcaacaaggttgatctccaatcgaaaattgcaaaggaggccaaagaaaatgctattctacagtcaagtctagaaaagcggaaagaagaactacatgagcgccgtttagcacttgaaaaggaagttgaaaatttgagggagcagctgcagaaggagagaagtttgaggacatccttggagtccggggtgatgaatttgcgaagagggcaggtgtccttgccgtcaacaacagacagcaaggtcagtggccagcagctgtgctgtgaatcatgcaacaaaaggctcctaaacacagacaggcttggcggacctgaaagctcatcagtggcagcgtcaccgaccattgggagtgactctgcatctggcatgggtgatatcgagcaatcaaggaagcagacggcacaggattcgccttcttcgacagacaagccaggtcacgaggcggtcgggggcagcagccagagggctcctcaaagaaggcaatcgattgccagggagggccaagatgggtggtcgtcatcatcctctaattcgaagtggaatcttgctcagaaacaatattcaaatagcccattgataagagggcttcatggatccagcagactagaggatttcggtggaagcataccaccagcagcgtcatcggcattagtcaagctgacaaaccggctcaacttcctgaaagaacggagggcgctgctggcaagcgagatgcagagcttggatctgggtcggcccccagcagcagctgctgctccatcagccaagtccccaacaccaaaaggccatgaaaggaagaagagtcgagactgaggaagatgttgtgctcttctgaatgctagttagccttatgattaccagcagtgtagtttgtgtgcatcccattcccttccatagtgctgtctgtctgtacatgtttccacaaattctactgcggatacataatatagatacggctggacaggctgctttgttattgttcaaattgttgctgaattgattcgtcgctcaaagcactttgctgacacatttctgatgttaaaaaaaactcgacctgctgagggtaagacagcctttggagttttgtttaaaaagacctcacacaggtcgagaaaacctctaaaccctacccaactcatacgcagcagcatcaaaacccatatgagaatgaccgcgactgagactaagctttagacctgtactttggcgtgggacaaacgatgggatatttttttaaccacagtctgac

SEQ ID NO: 82714 - DNA, 2906 bp, Zea Mays
cagcaatagaggtattaacatccatgaacatgacatccgcttcgttgaagacaactgggagagtccggttcttggtgcttggggactgggctgggaggtttggatggatggcatggaaatcacacagttcacatattttcagcagtcaggaagccttccattgcagccggtttctgttgaaataacatatggacttgaacgtatcctcatgtcactccagatgctgtgacaggaagttgatcacttcaagaatatactatacaccgaaggaatcacatatggagagctgttccttgagaacgagaaggagatgagtgcatattatttagaacatgcggatgtcagtcacattcaaaagcactttgacaattttgaagaagaggctcgatctttattatcactggggctgccaattccagcgtatgatcaggttctgaaggcctctcatgctttcaatatattagattctagaggttttgttggtgtaactgagcgtgcaagatattttggtcgcatgcgaagccttgctcgtcaatgtgctcagctttgggtggaaactcgagaaaaccttggacatcctttgggtgcttatgaagaggataaccttatctatcctcatgtctccaaaaaaactcatagagaggaagtgctggtacaaccacgtgcatttgttcttgaaataggaacagaagagttgccaccccgtgacgtcgtagaagcaactgaacagcttgagaaatctctagttaatacattggagaaacgtagattgacccatgggaaagtgcacacttacgggacaccaaggagattggcgattgttgttgaaaatcttagtatgaagcaaacagaggtagaggtggaactacgtggcccaccagttgcgaaggcatttgacgaagaaggaaaccccactaaggccgctgagggattttgtcgaaagaataatgtctctgtcgatcacctatatagaagaatagatggtaaaacagaatatatctacgctagagtcagagagtctgctcgttttgctgatgaggtcctaactgaagatttacctactattgtttctggtatttcatttcccaagtcgatgcgctggaactccaatattgtttttagtcgtccaatacgctggatcctggcacttcatggcgattttgttgtgccattttattttgctggcatctcaagtgggaatcagtcatgtggccttcgtaactcttctttggctaattttaaggtggaaactgcagaatcatatttaggtactgtggaaaaagctgggatcttgattaatatgcaggagcggaaggaaaaagtcttacatgcctctactgtattggctcaaggtgttggtggcgatttcattgcgcctgatagcttgctgcaggaggttgtcaatcttgtggaggcacctgtgcccatccttggtcgatatgatgattccttcttagaacttcctaaagatgtactgattacggttatgcagaaacatcagaagtattttgctgtaatctccaagtccactggcgatctgctaccttattttattgctgttgccaatggtgcaattagcaaggaagttgttcgcaaagggaatgaagctgttctcagggcaaggtatgaggatgccaaattcttttataagatggatacacaaaagaaattttctgaattccgaggccagcttagtggcattctttttcatgaaaaacttgggacaatgctcgataaaatgacacgtgtcgagaataccgttgctgaattggcccttattcttggaataaatgagagaacggtcccaattatcaaagatgcggctgcattggctatgtcagatcttgccacttctattgtcacagaatttacttcacttgctggaattatggcacgccattatgctttgagagacagcatccctgaagagattgcagaagcactatttgagataacactccctcggtcttcgggtgatgtgtttccaagaacagatgctggtatagttcttgcggttgctgatagattggatagcctagttggattgtttggagctggatgccagccaagttctaccaatgatccatttggacttcgaagggtctcttatggattggtccaaatattagttgagaacaaaaagagctttgacctcagacgagctctcaccttattggcaggggtgcaacccatagcaatagagagtgatgttatagatgaggcagtacagttcgtcacaaggagactggaacagcttctggtggatgagggaattaactgcgagatagtccgatcagtgcttatggagcgtgcaaactgcccttatctagcagcacaaacagcgaccgaaatggaagcattttcgagaacagaaacatttcaaaaaatcgttgaagcgtattcaaggccaacaaggatcatccgtggaaaagaaattgagtctgctttggaggttgacccacacgtatttgagaaagatgaagagaaagttttgtggagcgcctacttggaggttgctgataagatccatcctggtgttgatattaagacctttgtggatgcttctcttatcctgatacaacccctagaagatttcttcaatagtgtcttcgtgatggcgacgagagagttcgcaacaaccggctaacgttgctgaggaagattgagagtttgcccaaggggattgcggacctgtcagttttacctgggttttaagctgcctattccagccagggggtgtgagcaatagccgtagcggagagatgattttgattttacaagtatttctgattaaaggaaaaaaaaacgtcgtcgcagtagggcacggcaatcccagtaaacgctgtacttgtaattctgattaatacagtcaacaaacggaatcatatctcaaatcttgtgtcgac

SEQ ID NO: 82715 - DNA, 3304 bp, Zea Mays
ccacctcctccaccgtgtccgctgccaaccaacggggctcttccgcttcctccgtcctcaccttccagcaggccatccagcgcctccaggagtactgggcctccgtaggatgcgccgtcatgcagtgtagcaacaccgaggttggagcgggcacaatgaatcctctcacatttcttagggtcttaggtcctgagccatggaatgtcgcttacgtggagccaagtataagaccagacgacagtcgctatggggacaatcccaataggcttcagcgccatactcagtttcaggtaattctgaagcctgatcctggaaattcgcaagatctctttctgcacagcctttcagcaataggtattaacatccatgaacatgacatccgcttcgttgaagacaactgggagagtccggttcttggtgcttggggactgggctgggaggtttggatggatggcatggaaatcacacagttcacatattttcagcagtcaggaagccttccattgcagccggtttctgttgaaataacatatggacttgaacgtatcctcatgtcactccagatgctgtgacaggaagttgatcacttcaagaatatactatacaccgaaggaatcacatatggagagctgttccttgagaacgagaaggagatgagtgcatattatttagaacatgcggatgtcagtcacattcaaaagcactttgacaattttgaagaagaggctcgatctttattatcactggggctgccaattccagcgtatgatcaggttctgaaggcctctcatgctttcaatatattagattctagaggttttgttggtgtaactgagcgtgcaagatattttggtcgcatgcgaagccttgctcgtcaatgtgctcagctttgggtggaaactcgagaaaaccttggacatcctttgggtgcttatgaagaggataaccttatctatcctcatgtctccaaaaaaactcatagagaggaagtgctggtacaaccacgtgcatttgttcttgaaataggaacagaagagttgccaccccgtgacgtcgtagaagcaactgaacagcttgagaaatctctagttaatacattggagaaacgtagattgacccatgggaaagtgcacacttacgggacaccaaggagattggcgattgttgttgaaaatcttagtatgaagcaaacagaggtagaggtggaactacgtggcccaccagttgcgaaggcatttgacgaagaaggaaaccccactaaggccgctgagggattttgtcgaaagaataatgtctctgtcgatcacctatatagaagaatagatggtaaaacagaatatatctacgctagagtcagagagtctgctcgttttgctgatgaggtcctaactgaagatttacctactattgtttctggtatttcatttcccaagtcgatgcgctggaactccaatattgtttttagtcgtccaatacgctggatcctggcacttcatggcgattttgttgtgccattttattttgctggcatctcaagtgggaatcagtcatgtggccttcgtaactcttctttggctaattttaaggtggaaactgcagaatcatatttaggtactgtggaaaaagctgggatcttgattaatatgcaggagcggaaggaaaaagtcttacatgcctctactgtattggctcaaggtgttggtggcgatttcattgcgcctgatagcttgctgcaggaggttgtcaatcttgtggaggcacctgtgcccatccttggtcgatatgatgattccttcttagaacttcctaaagatgtactgattacggttatgcagaaacatcagaagtattttgctgtaatctccaagtccactggcgatctgctaccttattttattgctgttgccaatggtgcaattagcaaggaagttgttcgcaaagggaatgaagctgttctcagggcaaggtatgaggatgccaaattcttttataagatggatacacaaaagaaattttctgaattccgaggccagcttagtggcattctttttcatgaaaaacttgggacaatgctcgataaaatgacacgtgtcgagaataccgttgctgaattggcccttattcttggaataaatgagagaacggtcccaattatcaaagatgcggctgcattggctatgtcagatcttgccacttctattgtcacagaatttacttcacttgctggaattatggcacgccattatgctttgagagacagcatccctgaagagattgcagaagcactatttgagataacactccctcggtcttcgggtgatgtgtttccaagaacagatgctgattggatagcctagttggattgtttggagctggatgccagccaagttctaccaatgatccatttggacttcgaagggtctcttatggattggtccaaatattagttgagaacaaaaagagctttgacctcagacgagctctcaccttattggcaggggtgcaacccatagcaatagagagtgatgttatagatgaggcagtacagttcgtcacaaggagactggaacagcttctggtggatgagggaattaactgcgagatagtccgatcagtgcttatggagcgtgcaaactgcccttatctagcagcacaaacagcgaccgaaatggaagcattttcgagaacagaaacatttcaaaaaatcgttgaagcgtattcaaggccaacaaggatcatccgtggaaaagaaattgagtctgctttggaggttgacccacacgtatttgagaaagatgaagagaaagttttgtggagcgcctacttggaggttgctgataagatccatcctggtgttgatattaagacctttgtggatgcttctcttatcctgatacaacccctagaagatttcttcaatagtgtcttcgtgatggcggtgagttttgtgaggcccttgaaaaacttaacttgtgctgatgagtgagagtgatgatggtgtatattatgcgcaggaagacgagagagttcgcaacaaccggctaacgttgctgaggaagattgagagtttgcccaaggggattgcggacctgtcagttttacctgggttttaagctgcctattccagccagggggtgtgagcaatagccgtagcggagagatgattttgattttacaagtatttctgattaaaggaaaaaaaaacgtcgtcgcagtagggcacggcaatcccagtaaacgctgtacttgtaattctgattaatacagtcaacaaacggaatcatatctcaaatcttgtgtcgac

SEQ ID NO: 82716 - DNA, 3197 bp, Zea Mays
ccacctcctccaccgtgtccgctgccaaccaacggggctcttccgcttcctccgtcctcaccttccagcaggccatccagcgcctccaggagtactgggcctccgtaggatgcgccgtcatgcagtgtagcaacaccgaggttggagcgggcacaatgaatcctctcacatttcttagggtcttaggtcctgagccatggaatgtcgcttacgtggagccaagtataagaccagacgacagtcgctatggggacaatcccaataggcttcagcgccatactcagtttcaggtaattctgaagcctgatcctggaaattcgcaagatctctttctgcacagcctttcagcaataggtattaacatccatgaacatgacatccgcttcgttgaagacaactgggagagtccggttcttggtgcttggggactgggctgggaggtttggatggatggcatggaaatcacacagttcacatattttcagcagtcaggaagccttccattgcagccggtttctgttgaaataacatatggacttgaacgtatcctcatgtcactccagatgctgtgacaggaagttgatcacttcaagaatatactatacaccgaaggaatcacatatggagagctgttccttgagaacgagaaggagatgagtgcatattatttagaacatgcggatgtcagtcacattcaaaagcactttgacaattttgaagaagaggctcgatctttattatcactggggctgccaattccagcgtatgatcaggttctgaaggcctctcatgctttcaatatattagattctagaggttttgttggtgtaactgagcgtgcaagatattttggtcgcatgcgaagccttgctcgtcaatgtgctcagctttgggtggaaactcgagaaaaccttggacatcctttgggtgcttatgaagaggataaccttatctatcctcatgtctccaaaaaaactcatagagaggaagtgctggtacaaccacgtgcatttgttcttgaaataggaacagaagagttgccaccccgtgacgtcgtagaagcaactgaacagcttgagaaatctctagttaatacattggagaaacgtagattgacccatgggaaagtgcacacttacgggacaccaaggagattggcgattgttgttgaaaatcttagtatgaagcaaacagaggtagaggtggaactacgtggcccaccagttgcgaaggcatttgacgaagaaggaaaccccactaaggccgctgagggattttgtcgaaagaataatgtctctgtcgatcacctatatagaagaatagatggtcctaactgaagatttacctactattgtttctggtatttcatttcccaagtcgatgcgctggaactccaatattgtttttagtcgtccaatacgctggatcctggcacttcatggcgattttgttgtgccattttattttgctggcatctcaagtgggaatcagtcatgtggccttcgtaactcttctttggctaattttaaggtggaaactgcagaatcatatttaggtactgtggaaaaagctgggatcttgattaatatgcaggagcggaaggaaaaagtcttacatgcctctactgtattggctcaaggtgttggtggcgatttcattgcgcctgatagcttgctgcaggaggttgtcaatcttgtggaggcacctgtgcccatccttggtcgatatgatgattccttcttagaacttcctaaagatgtactgattacggttatgcagaaacatcagaagtattttgctgtaatctccaagtccactggcgatctgctaccttattttattgctgttgccaatggtgcaattagcaaggaagttgttcgcaaagggaatgaagctgttctcagggcaaggtatgaggatgccaaattcttttataagatggatacacaaaagaaattttctgaattccgaggccagcttagtggcattctttttcatgaaaaacttgggacaatgctcgataaaatgacacgtgtcgagaataccgttgctgaattggcccttattcttggaataaatgagagaacggtcccaattatcaaagatgcggctgcattggctatgtcagatcttgccacttctattgtcacagaatttacttcacttgctggaattatggcacgccattatgctttgagagacagcatccctgaagagattgcagaagcactatttgagataacactccctcggtcttcgggtgatgtgtttccaagaacagatgctggtatagttcttgcggttgctgatagattggatagcctagttggattgtttggagctggatgccagccaagttctaccaatgatccatttggacttcgaagggtctcttatggattggtccaaatattagttgagaacaaaaagagctttgacctcagacgagctctcaccttattggcaggggtgcaacccatagcaatagagagtgatgttatagatgaggcagtacagttcgtcacaaggagactggaacagcttctggtggatgagggaattaactgcgagatagtccgatcagtgcttatggagcgtgcaaactgcccttatctagcagcacaaacagcgaccgaaatggaagcattttcgagaacagaaacatttcaaaaaatcgttgaagcgtattcaaggccaacaaggatcatccgtggaaaagaaattgagtctgctttggaggttgacccacacgtatttgagaaagatgaagagaaagttttgtggagcgcctacttggaggttgctgataagatccatcctggtgttgatattaagacctttgtggatgcttctcttatcctgatacaacccctagaagatttcttcaatagtgtcttcgtgatggcggaagacgagagagttcgcaacaaccggctaacgttgctgaggaagattgagagtttgcccaaggggattgcggacctgtcagttttacctgggttttaagctgcctattccagccagggggtgtgagcaatagccgtagcggagagatgattttgattttacaagtatttctgattaaaggaaaaaaaaacgtcgtcgcagtagggcacggcaatcccagtaaacgctgtacttgtaattctgattaatacagtcaacaaacggaatcatatctcaaatcttgtgtcgac

SEQ ID NO: 82717 - DNA, 3184 bp, Zea Mays
ccacctcctccaccgtgtccgctgccaaccaacggggctcttccgcttcctccgtcctcaccttccagcaggccatccagcgcctccaggagtactgggcctccgtaggatgcgccgtcatgcagtgtagcaacaccgaggttggagcgggcacaatgaatcctctcacatttcttagggtcttaggtcctgagccatggaatgtcgcttacgtggagccaagtataagaccagacgacagtcgctatggggacaatcccaataggcttcagcgccatactcagtttcaggtaattctgaagcctgatcctggaaattcgcaagatctctttctgcacagcctttcagcaataggttcttggtgcttggggactgggctgggaggtttggatggatggcatggaaatcacacagttcacatattttcagcagtcaggaagccttccattgcagccggtttctgttgaaataacatatggacttgaacgtatcctcatgtcactccagatgctgtgacaggaagttgatcacttcaagaatatactatacaccgaaggaatcacatatggagagctgttccttgagaacgagaaggagatgagtgcatattatttagaacatgcggatgtcagtcacattcaaaagcactttgacaattttgaagaagaggctcgatctttattatcactggggctgccaattccagcgtatgatcaggttctgaaggcctctcatgctttcaatatattagattctagaggttttgttggtgtaactgagcgtgcaagatattttggtcgcatgcgaagccttgctcgtcaatgtgctcagctttgggtggaaactcgagaaaaccttggacatcctttgggtgcttatgaagaggataaccttatctatcctcatgtctccaaaaaaactcatagagaggaacagaagagttgccaccccgtgacgtcgtagaagcaactgaacagcttgagaaatctctagttaatacattggagaaacgtagattgacccatgggaaagtgcacacttacgggacaccaaggagattggcggtatcatcctgacgattttcatctcacatttactttcctgaccagcctttatattgttgttgaaaatcttagtatgaagcaaacagaggtagaggtggaactacgtggcccaccagttgcgaaggcatttgacgaagaaggaaaccccactaaggccgctgagggattttgtcgaaagaataatgtctctgtcgatcacctatatagaagaatagatggtaaaacagaatatatctacgctagagtcagagagtctgctcgttttgctgatgaggtcctaactgaagatttacctactattgtttctggtatttcatttcccaagtcgatgcgctggaactccaatattgtttttagtcgtccaatacgctggatcctggcacttcatggcgattttgttgtgccattttattttgctggcatctcaagtgggaatcagtcatgtggccttcgtaactcttctttggctaattttaaggtggaaactgcagaatcatatttaggtactgtggaaaaagctgggatcttgattaatatgcaggagcggaaggaaaaagtcttacatgcctctactgtattggctcaaggtgttggtggcgatttcattgcgcctgatagcttgctgcaggaggttgtcaatcttgtggaggcacctgtgcccatccttggtcgatatgatgattccttcttagaacttcctaaagatgtactgattacggttatgcagaaacatcagaagtattttgctgtaatctccaagtccactggcgatctgctaccttattttattgctgttgccaatggtgcaattagcaaggaagttgttcgcaaagggaatgaagctgttctcagggcaaggtatgaggatgccaaattcttttataagatggatacacaaaagaaattttctgaattccgaggccagcttagtggcattctttttcatgaaaaacttgggacaatgctcgataaaatgacacgtgtcgagaataccgttgctgaattggcccttattcttggaataaatgagagaacggtcccaattatcaaagatgcggctgcattggctatgtcagatcttgccacttctattgtcacagaatttacttcacttgctggaattatggcacgccattatgctttgagagacagcatccctgaagagattgcagaagcactatttgagataacactccctcggtcttcgggtgatgtgtttccaagaacagatgctgattggatagcctagttggattgtttggagctggatgccagccaagttctaccaatgatccatttggacttcgaagggtctcttatggattggtccaaatattagttgagaacaaaaagagctttgacctcagacgagctctcaccttattggcaggggtgcaacccatagcaatagagagtgatgttatagatgaggcagtacagttcgtcacaaggagactggaacagcttctggtggatgagggaattaactgcgagatagtccgatcagtgcttatggagcgtgcaaactgcccttatctagcagcacaaacagcgaccgaaatggaagcattttcgagaacagaaacatttcaaaaaatcgttgaagcgtattcaaggccaacaaggatcatccgtggaaaagaaattgagtctgctttggaggttgacccacacgtatttgagaaagatgaagagaaagttttgtggagcgcctacttggaggttgctgataagatccatcctggtgttgatattaagacctttgtggatgcttctcttatcctgatacaacccctagaagatttcttcaatagtgtcttcgtgatggcggaagacgagagagttcgcaacaaccggctaacgttgctgaggaagattgagagtttgcccaaggggattgcggacctgtcagttttacctgggttttaagctgcctattccagccagggggtgtgagcaatagccgtagcggagagatgattttgattttacaagtatttctgattaaaggaaaaaaaaacgtcgtcgcagtagggcacggcaatcccagtaaacgctgtacttgtaattctgattaatacagtcaacaaacggaatcatatctcaaatcttgtgtcgac

SEQ ID NO: 82718 - DNA, 3185 bp, Zea Mays
ccacctcctccaccgtgtccgctgccaaccaacggggctcttccgcttcctccgtcctcaccttccagcaggccatccagcgcctccaggagtactgggcctccgtaggatgcgccgtcatgcagtgtagcaacaccgaggttggagcgggcacaatgaatcctctcacatttcttagggtcttaggtcctgagccatggaatgtcgcttacgtggagccaagtataagaccagacgacagtcgctatggggacaatcccaataggcttcagcgccatactcagtttcaggtaattctgaagcctgatcctggaaattcgcaagatctctttctgcacagcctttcagcaataggttcttggtgcttggggactgggctgggaggtttggatggatggcatggaaatcacacagttcacatattttcagcagtcaggaagccttccattgcagccggtttctgttgaaataacatatggacttgaacgtatcctcatgtcactccaggaagttgatcacttcaagaatatactatacaccgaaggaatcacatatggagagctgttccttgagaacgagaaggagatgagtgcatattatttagaacatgcggatgtcagtcacattcaaaagcactttgacaattttgaagaagaggctcgatctttattatcactggggctgccaattccagcgtatgatcaggttctgaaggcctctcatgctttcaatatattagattctagaggttttgttggtgtaactgagcgtgcaagatattttggtcgcatgcgaagccttgctcgtcaatgtgctcagctttgggtggaaactcgagaaaaccttggacatcctttgggtgcttatgaagaggataaccttatctatcctcatgtctccaaaaaaactcatagagaggaagtgctggtacaaccacgtgcatttgttcttgaaataggaacagaagagttgccaccccgtgacgtcgtagaagcaactgaacagcttgagaaatctctagttaatacattggagaaacgtagattgacccatgggaaagtgcacacttacgggacaccaaggagattggcgattgttgttgaaaatcttagtatgaagcaaacagaggtagaggtggaactacgtggcccaccagttgcgaaggcatttgacgaagaaggaaaccccactaaggccgctgagggattttgtcgaaagaataatgtctctgtcgatcacctatatagaagaatagatggtaaaacagaatatatctacgctagagtcagagagtctgctcgttttgctgatgaggtcctaactgaagatttacctactattgtttctggtatttcatttcccaagtcgatgcgctggaactccaatattgtttttagtcgtccaatacgctggatcctggcacttcatggcgattttgttgtgccattttattttgctggcatctcaagtgggaatcagtcatgtggccttcgtaactcttctttggctaattttaaggtggaaactgcagaatcatatttaggtactgtggaaaaagctgggatcttgattaatatgcaggagcggaaggaaaaagtcttacatgcctctactgtattggctcaaggtgttggtggcgatttcattgcgcctgatagcttgctgcaggaggttgtcaatcttgtggaggcacctgtgcccatccttggtcgatatgatgattccttcttagaacttcctaaagatgtactgattacggttatgcagaaacatcagaagtattttgctgtaatctccaagtccactggcgatctgctaccttattttattgctgttgccaatggtgcaattagcaaggaagttgttcgcaaagggaatgaagctgttctcagggcaaggtatgaggatgccaaattcttttataagatggatacacaaaagaaattttctgaattccgaggccagcttagtggcattctttttcatgaaaaacttgggacaatgctcgataaaatgacacgtgtcgagaataccgttgctgaattggcccttattcttggaataaatgagagaacggtcccaattatcaaagatgcggctgcattggctatgtcagatcttgccacttctattgtcacagaatttacttcacttgctggaattatggcacgccattatgctttgagagacagcatccctgaagagattgcagaagcactatttgagataacactccctcggtcttcgggtgatgtgtttccaagaacagatgctggtatagttcttgcggttgctgatagattggatagcctagttggattgtttggagctggatgccagccaagttctaccaatgatccatttggacttcgaagggtctcttatggattggtccaaatattagttgagaacaaaaagagctttgacctcagacgagctctcaccttattggcaggggtgcaacccatagcaatagagagtgatgttatagatgaggcagtacagttcgtcacaaggagactggaacagcttctggtggatgagggaattaactgcgagatagtccgatcagtgcttatggagcgtgcaaactgcccttatctagcagcacaaacagcgaccgaaatggaagcattttcgagaacagaaacatttcaaaaaatcgttgaagcgtattcaaggccaacaaggatcatccgtggaaaagaaattgagtctgctttggaggttgacccacacgtatttgagaaagatgaagagaaagttttgtggagcgcctacttggaggttgctgataagatccatcctggtgttgatattaagacctttgtggatgcttctcttatcctgatacaacccctagaagatttcttcaatagtgtcttcgtgatggcggaagacgagagagttcgcaacaaccggctaacgttgctgaggaagattgagagtttgcccaaggggattgcggacctgtcagttttacctgggttttaagctgcctattccagccagggggtgtgagcaatagccgtagcggagagatgattttgattttacaagtatttctgattaaaggaaaaaaaaacgtcgtcgcagtagggcacggcaatcccagtaaacgctgtacttgtaattctgattaatacagtcaacaaacggaatcatatctcaaatcttgtgtcgac

SEQ ID NO: 82719 - DNA, 3225 bp, Zea Mays
ccacctcctccaccgtgtccgctgccaaccaacggggctcttccgcttcctccgtcctcaccttccagcaggccatccagcgcctccaggagtactgggcctccgtaggatgcgccgtcatgcagtgtagcaacaccgaggttggagcgggcacaatgaatcctctcacatttcttagggtcttaggtcctgagccatggaatgtcgcttacgtggagccaagtataagaccagacgacagtcgctatggggacaatcccaataggcttcagcgccatactcagtttcaggtaattctgaagcctgatcctggaaattcgcaagatctctttctgcacagcctttcagcaataggtattaacatccatgaacatgacatccgcttcgttgaagacaactgggagagtccggttcttggtgcttggggactgggctgggaggtttggatggatggcatggaaatcacacagttcacatattttcagcagtcaggaagccttccattgcagccggtttctgttgaaataacatatggacttgaacgtatcctcatgtcactccagcacggcagctgtgatacaaacttctccattgagatcatttctaccatactatgctggggcctttgaaaaagctgaccttacttcaatttagatgctgtgacaggaagttgatcacttcaagaatatactatacaccgaaggaatcacatatggagagctgttccttgagaacgagaaggagatgagtgcatattatttagaacatgcggatgtcagtcacattcaaaagcactttgacaattttgaagaagaggctcgatctttattatcactggggctgccaattccagcgtatgatcaggttctgaaggcctctcatgctttcaatatattagattctagaggttttgttggtgtaactgagcgtgcaagatattttggtcgcatgcgaagccttgctcgtcaatgtgctcagctttgggtggaaactcgagaaaaccttggacatcctttgggtgcttatgaagaggataaccttatctatcctcatgtctccaaaaaaactcatagagaggaagtgctggtacaaccacgtgcatttgttcttgaaataggaacagaagagttgccaccccgtgacgtcgtagaagcaactgaacagcttgagaaatctctagttaatacattggagaaacgtagattgacccatgggaaagtgcacacttacgggacaccaaggagattggcgattgttgttgaaaatcttagtatgaagcaaacagaggtagaggtggaactacgtggcccaccagttgcgaaggcatttgacgaagaaggaaaccccactaaggccgctgagggattttgtcgaaagaataatgtctctgtcgatcacctatatagaagaatagatggtaaaacagaatatatctacgctagagtcagagagtctgctcgttttgctgatgaggtcctaactgaagatttacctactattgtttctggtatttcatttcccaagtcgatgcgctggaactccaatattgtttttagtcgtccaatacgctggatcctggcacttcatggcgattttgttgtgccattttattttgctggcatctcaaggtttgcattggcagtgggaatcagtcatgtggccttcgtaactcttctttggctaattttaaggtggaaactgcagaatcatatttaggagcggaaggaaaaagtcttacatgcctctactgtattggctcaaggtgttggtggcgatttcattgcgcctgatagcttgctgcaggaggttgtcaatcttgtggaggcacctgtgcccatccttggtcgatatgatgattccttcttagaacttcctaaagatgtactgattacggttatgcagaaacatcagaagtattttgctgtaatctccaagtccactggcgatctgctaccttattttattgctgttgccaatggtgcaattagcaaggaagttgttcgcaaagggaatgaagctgttctcagggcaaggtatgaggatgccaaattcttttataagatggatacacaaaagaaattttctgaattccgaggccagcttagtggcattctttttcatgaaaaacttgggacaatgctcgataaaatgacacgtgtcgagaataccgttgctgaattggcccttattcttggaataaatgagagaacggtcccaattatcaaagatgcggctgcattggctatgtcagatcttgccacttctattgtcacagaatttacttcacttgctggaattatggcacgccattatgctttgagagacagcatccctgaagagattggatagcctagttggattgtttggagctggatgccagccaagttctaccaatgatccatttggacttcgaagggtctcttatggattggtccaaatattagttgagaacaaaaagagctttgacctcagacgagctctcaccttattggcaggggtgcaacccatagcaatagagagtgatgttatagatgaggcagtacagttcgtcacaaggagactggaacagcttctggtggatgagggaattaactgcgagatagtccgatcagtgcttatggagcgtgcaaactgcccttatctagcagcacaaacagcgaccgaaatggaagcattttcgagaacagaaacatttcaaaaaatcgttgaagcgtattcaaggccaacaaggatcatccgtggaaaagaaattgagtctgctttggaggttgacccacacgtatttgagaaagatgaagagaaagttttgtggagcgcctacttggaggttgctgataagatccatcctggtgttgatattaagacctttgtggatgcttctcttatcctgatacaacccctagaagatttcttcaatagtgtcttcgtgatggcggaagacgagagagttcgcaacaaccggctaacgttgctgaggaagattgagagtttgcccaaggggattgcggacctgtcagttttacctgggttttaagctgcctattccagccagggggtgtgagcaatagccgtagcggagagatgattttgattttacaagtatttctgattaaaggaaaaaaaaacgtcgtcgcagtagggcacggcaatcccagtaaacgctgtacttgtaattctgattaatacagtcaacaaacggaatcatatctcaaatcttgtgtcgac

SEQ ID NO: 82720 - DNA, 3348 bp, Zea Mays
cgacgcctccacctcctccaccgtgtccgctgccaaccaacggggctcttccgcttcctccgtcctcaccttccagcaggccatccagcgcctccaggagtactgggcctccgtaggatgcgccgtcatgcagtgtagcaacaccgaggttggagcgggcacaatgaatcctctcacatttcttagggtcttaggtcctgagccatggaatgtcgcttacgtggagccaagtataagaccagacgacagtcgctatggggacaatcccaataggcttcagcgccatactcagtttcaggtaattctgaagcctgatcctggaaattcgcaagatctctttctgcacagcctttcagcaataggtattaacatccatgaacatgacatccgcttcgttgaagacaactgggagagtccggttcttggtgcttggggactgggctgggaggtttggatggatggcatggaaatcacacagttcacatattttcagcagtcaggaagccttccattgcagccggtttctgttgaaataacatatggacttgaaccacggcagctgtgatacaaacttctccattgagatcatttctaccatactatgctggggcctttgaaaaagctgaccttacttcaatttagatgctgtgacaggaagttgatcacttcaagaatatactatacaccgaaggaatcacatatggagagctgttccttgagaacgagaaggagatgagtgcatattatttagaacatgcggatgtcagtcacattcaaaagcactttgacaattttgaagaagaggctcgatctttattatcactggggctgccaattccagcgtatgatcaggttctgaaggcctctcatgctttcaatatattagattctagaggttttgttggtgtaactgagcgtgcaagatattttggtcgcatgcgaagccttgctcgtcaatgtgctcagctttgggtggaaactcgagaaaaccttggacatcctttgggtgcttatgaagaggataaccttatctatcctcatgtctccaaaaaaactcatagagaggaagtgctggtacaaccacgtgcatttgttcttgaaataggaacagaagagttgccaccccgtgacgtcgtagaagcaactgaacagcttgagaaatctctagttaatacattggagaaacgtagattgacccatgggaaagtgcacacttacgggacaccaaggagattggcgattgttgttgaaaatcttagtatgaagcaaacagaggtagaggtggaactacgtggcccaccagttgcgaaggcatttgacgaagaaggaaaccccactaaggccgctgagggattttgtcgaaagaataatgtctctgtcgatcacctatatagaagaatagatgggtaaaacagaatatatctacgctagagtcagagagtctgctcgttttgctgatgaggtcctaactgaagatttacctactattgtttctggtatttcatttcccaagtcgatgcgctggaactccaatattgtttttagtcgtccaatacgctggatcctggcacttcatggcgattttgttgtgccattttattttgctggcatctcaaggtttgcattggcagtgggaatcagtcatgtggccttcgtaactcttctttggctaattttaaggtggaaactgcagaatcatatttaggtactgtggaaaaagctgggatcttgattaatatgcaggagcggaaggaaaaagtcttacatgcctctactgtattggctcaaggtgttggtggcgatttcattgcgcctgatagcttgctgcaggaggttgtcaatcttgtggaggcacctgtgcccatccttggtcgatatgatgattccttcttagaacttcctaaagatgtactgattacggttatgcagaaacatcagaagtattttgctgtaatctccaagtccactggcgatctgctaccttattttattgctgttgccaatggtgcaattagcaaggaagttgttcgcaaagggaatgaagctgttctcagggcaaggtatgaggatgccaaattcttttataagatggatacacaaaagaaattttctgaattccgaggccagcttagtggcattctttttcatggaaaaacttgggacaatgctcgataaaatgacacgtgtcgagaataccgttgctgaattggcccttattcttggaataaatgagagaacggtcccaattatcaaagatgcggctgcattggctatgtcagatcttgccacttctattgtcacagaatttacttcacttgctggaattatggcacgccattatgctttgagagacagcatccctgaagagattgcagaagcactatttgagataacactccctcggtcttcgggtgatgtgtttccaagaacagatgctggtatagttcttgcggttgctgatagattggatagcctagttggattgtttggagctggatgccagccaagttctaccaatgatccatttggacttcgaagggtctcttatggattggtccaaatattagttgagaacaaaaagagctttgacctcagacgagctctcaccttattggcaggggtgcaacccatagcaatagagagtgatgttatagatgaggcagtacagttcgtcacaaggagactggaacagcttctggtggatgagggaattaactgcgagatagtccgatcagtgcttatggagcgtgcaaactgcccttatctagcagcacaaacagcgaccgaaatggaagcattttcgagaacagaaacatttcaaaaaatcgttgaagcgtattcaaggccaacaaggatcatccgtggaaaagaaattgagtctgctttggaggttgacccacacgtatttgagaaagatgaagagaaagttttgtggagcgcctacttggaggttgctgataagatccatcctggtgttgatattaagacctttgtggatgcttctcttatcctgatacaacccctagaagatttcttcaatagtgtcttcgtgatggcggaagacgagagagttcgcaacaaccggctaacgttgctgaggaagattgagagtttgcccaaggggattgcggacctgtcagttttacctgggttttaagctgcctattccagccagggggtgtgagcaatagccgtagcggagagatgattttgattttacaagtatttctgattaaaggaaaaaaaaacgtcgtcgcagtagggcacggcaatcccagtaaacgctgtacttgtaattctgattaatacagtcaacaaacggaatcatatctcaaatcttgtgtcgac

SEQ ID NO: 82721 - DNA, 3273 bp, Zea Mays
ccgcagacggcgacgcctccacctcctccaccgtgtccgctgccaaccaacggggctcttccgcttcctccgtcctcaccttccagcaggccatccagcgcctccaggagtactgggcctccgtaggatgcgccgtcatgcagtgtagcaacaccgaggttggagcgggcacaatgaatcctctcacatttcttagggtcttaggtcctgagccatggaatgtcgcttacgtggagccaagtataagaccagacgacagtcgctatggggacaatcccaataggcttcagcgccatactcagtttcaggtaattctgaagcctgatcctggaaattcgcaagatctctttctgcacagcctttcagcaataggtattaacatccatgaacatgacatccgcttcgttgaagacaactgggagagtccggttcttggtgcttggggactgggctgggaggtttggatggatggcatggaaatcacacagttcacatattttcagcagtcaggaagccttccattgcagccggtttctgttgaaataacatatggacttgaacgtatcctcatgtcactccaggaagttgatcacttcaagaatatactatacaccgaaggaatcacatatggagagctgttccttgagaacgagaaggagatgagtgcatattatttagaacatgcggatgtcagtcacattcaaaagcactttgacaattttgaagaagaggctcgatctttattatcactggggctgccaattccagcgtatgatcaggttctgaaggcctctcatgctttcaatatattagattctagaggttttgttggtgtaactgagcgtgcaagatattttggtcgcatgcgaagccttgctcgtcaatgtgctcagctttgggtggaaactcgagaaaaccttggacatcctttgggtgcttatgaagaggataaccttatctatcctcatgtctccaaaaaaactcatagagaggaagtgctggtacaaccacgtgcatttgttcttgaaataggaacagaagagttgccaccccgtgacgtcgtagaagcaactgaacagcttgagaaatctctagttaatacattggagaaacgtagattgacccatgggaaagtgcacacttacgggacaccaaggagattggcgattgttgttgaaaatcttagtatgaagcaaacagaggtagaggtggaactacgtggcccaccagttgcgaaggcatttgacgaagaaggaaaccccactaaggccgctgagggattttgtcgaaagaataatgtctctgtcgatcacctatatagaagaatagatggtaaaacagaatatatctacgctagagtcagagagtctgctcgttttgctgatgaggtcctaactgaagatttacctactattgtttctggtatttcatttcccaagtcgatgcgctggaactccaatattgtttttagtcgtccaatacgctggatcctggcacttcatggcgattttgttgtgccattttattttgctggcatctcaaggtttgcattggcagtgggaatcagtcatgtggccttcgtaactcttctttggctaattttaaggtggaaactgcagaatcatatttaggtactgtggaaaaagctgggatcttgattaatatgcaggagcggaaggaaaaagtcttacatgcctctactgtattggctcaaggtgttggtggcgatttcattgcgcctgatagcttgctgcaggaggttgtcaatcttgtggaggcacctgtgcccatccttggtcgatatgatgattccttcttagaacttcctaaagatgtactgattacggttatgcagaaacatcagaagtattttgctgtaatctccaagtccactggcgatctgctaccttattttattgctgttgccaatggtgcaattagcaaggaagttgttcgcaaagggaatgaagctgttctcagggcaaggtatgaggatgccaaattcttttataagatggatacacaaaagaaattttctgaattccgaggccagcttagtggcattctttttcatgaaaaacttgggacaatgctcgataaaatgacacgtgtcgagaataccgttgctgaattggcccttattcttggaataaatgagagaacggtcccaattatcaaagatgcggctgcattggctatgtcagatcttgccacttctattgtcacagaatttacttcacttgctggaattatggcacgccattatgctttgagagacagcatccctgaagagattgcagaagcactatttgagataacactccctcggtcttcgggtgatgtgtttccaagaacagatgctggtatagttcttgcggttgctgatagattggatagcctagttggattgtttggagctggatgccagccaagttctaccaatgatccatttggacttcgaagggtctcttatggattggtccaaatattagttgagaacaaaaagagctttgacctcagacgagctctcaccttattggcaggggtgcaacccatagcaatagagagtgatgttatagatgaggcagtacagttcgtcacaaggagactggaacagcttctggtggatgagggaattaactgcgagatagtccgatcagtgcttatggagcgtgcaaactgcccttatctagcagcacaaacagcgaccgaaatggaagcattttcgagaacagaaacatttcaaaaaatcgttgaagcgtattcaaggccaacaaggatcatccgtggaaaagaaattgagtctgctttggaggttgacccacacgtatttgagaaagatgaagagaaagttttgtggagcgcctacttggaggttgctgataagatccatcctggtgttgatattaagacctttgtggatgcttctcttatcctgatacaacccctagaagatttcttcaatagtgtcttcgtgatggcggaagacgagagagttcgcaacaaccggctaacgttgctgaggaagattgagagtttgcccaaggggattgcggacctgtcagttttacctgggttttaagctgcctattccagccagggggtgtgagcaatagccgtagcggagagatgattttgattttacaagtatttctgattaaaggaaaaaaaaacgtcgtcgcagtagggcacggcaatcccagtaaacgctgtacttgtaattctgattaatacagtcaacaaacggaatcatatctcaaatcttgtgtcgac

SEQ ID NO: 82722 - DNA, 3350 bp, Zea Mays
ccgcagacggcgacgcctccacctcctccaccgtgtccgctgccaaccaacggggctcttccgcttcctccgtcctcaccttccagcaggccatccagcgcctccaggagtactgggcctccgtaggatgcgccgtcatgcagtgtagcaacaccgaggttggagcgggcacaatgaatcctctcacatttcttagggtcttaggtcctgagccatggaatgtcgcttacgtggagccaagtataagaccagacgacagtcgctatggggacaatcccaataggcttcagcgccatactcagtttcaggtaattctgaagcctgatcctggaaattcgcaagatctctttctgcacagcctttcagcaataggtattaacatccatgaacatgacatccgcttcgttgaagacaactgggagagtccggttcttggtgcttggggactgggctgggaggtttggatggatggcatggaaatcacacagttcacatattttcagcagtcaggaagccttccattgcagccggtttctgttgaaataacatatggacttgaacgtatcctcatgtcactccaggaagttgatcacttcaagaatatactatacaccgaaggaatcacatatggagagctgttccttgagaacgagaaggagatgagtgcatattatttagaacatgcggatgtcagtcacattcaaaagcactttgacaattttgaagaagaggctcgatctttattatcactggggctgccaattccagcgtatgatcaggttctgaaggcctctcatgctttcaatatattagattctagaggttttgttggtgtaactgagcgtgcaagatattttggtcgcatgcgaagccttgctcgtcaatgtgctcagctttgggtggaaactcgagaaaaccttggacatcctttgggtgcttatgaagaggataaccttatctatcctcatgtctccaaaaaaactcatagagaggaagtgctggtacaaccacgtgcatttgttcttgaaataggaacagaagagttgccaccccgtgacgtcgtagaagcaactgaacagcttgagaaatctctagttaatacattggagaaacgtagattgacccatgggaaagtgcacacttacgggacaccaaggagattggcgattgttgttgaaaatcttagtatgaagcaaacagaggtagaggtggaactacgtggcccaccagttgcgaaggcatttgacgaagaaggaaaccccactaaggccgctgagggattttgtcgaaagaataatgtctctgtcgatcacctatatagaagaatagatggtaaaacagaatatatctacgctagagtcagagagtctgctcgttttgctgatgaggtcctaactgaagatttacctactattgtttctggtatttcatttcccaagtcgatgcgctggaactccaatattgtttttagtcgtccaatacgctggatcctggcacttcatggcgattttgttgtgccattttattttgctggcatctcaaggtactacattctgtattagttctcgatcttattttgacataaattttgagtattatcgtttctatcaattatcaaaaaaaggtttgcattggcagtgggaatcagtcatgtggccttcgtaactcttctttggctaattttaaggtggaaactgcagaatcatatttaggtactgtggaaaaagctgggatcttgattaatatgcaggagcggaaggaaaaagtcttacatgcctctactgtattggctcaaggtgttggtggcgatttcattgcgcctgatagcttgctgcaggaggttgtcaatcttgtggaggcacctgtgcccatccttggtcgatatgatgattccttcttagaacttcctaaagatgtactgattacggttatgcagaaacatcagaagtattttgctgtaatctccaagtccactggcgatctgctaccttattttattgctgttgccaatggtgcaattagcaaggaagttgttcgcaaagggaatgaagctgttctcagggcaaggtatgaggatgccaaattcttttataagatggatacacaaaagaaattttctgaattccgaggccagcttagtggcattctttttcatgaaaaacttgggacaatgctcgataaaatgacacgtgtcgagaataccgttgctgaattggcccttattcttggaataaatgagagaacggtcccaattatcaaagatgcggctgcattggctatgtcagatcttgccacttctattgtcacagaatttacttcacttgctggaattatggcacgccattatgctttgagagacagcatccctgaagagattgcagaagcactatttgagataacactccctcggtcttcgggtgatgtgtttccaagaacagatgctggtatagttcttgcggttgctgatagattggatagcctagttggattgtttggagctggatgccagccaagttctaccaatgatccatttggacttcgaagggtctcttatggattggtccaaatattagttgagaacaaaaagagctttgacctcagacgagctctcaccttattggcaggggtgcaacccatagcaatagagagtgatgttatagatgagtacagttcgtcacaaggagactggaacagcttctggtggatgagggaattaactgcgagatagtccgatcagtgcttatggagcgtgcaaactgcccttatctagcagcacaaacagcgaccgaaatggaagcattttcgagaacagaaacatttcaaaaaatcgttgaagcgtattcaaggccaacaaggatcatccgtggaaaagaaattgagtctgctttggaggttgacccacacgtatttgagaaagatgaagagaaagttttgtggagcgcctacttggaggttgctgataagatccatcctggtgttgatattaagacctttgtggatgcttctcttatcctgatacaacccctagaagatttcttcaatagtgtcttcgtgatggcggaagacgagagagttcgcaacaaccggctaacgttgctgaggaagattgagagtttgcccaaggggattgcggacctgtcagttttacctgggttttaagctgcctattccagccagggggtgtgagcaatagccgtagcggagagatgattttgattttacaagtatttctgattaaaggaaaaaaaaacgtcgtcgcagtagggcacggcaatcccagtaaacgctgtacttgtaattctgattaatacagtcaacaaacggaatcatatctcaaatcttgtgtcgac

SEQ ID NO: 82723 - DNA, 3126 bp, Zea Mays
ccgcagacggcgacgcctccacctcctccaccgtgtccgctgccaaccaacggggctcttccgcttcctccgtcctcaccttccagcaggccatccagcgcctccaggagtactgggcctccgtaggatgcgccgtcatgcagtgtagcaacaccgaggttggagcgggcacaatgaatcctctcacatttcttagggtcttaggtcctgagccatggaatgtcgcttacgtggagccaagtataagaccagacgacagtcgctatggggacaatcccaataggcttcagcgccatactcagtttcaggtaattctgaagcctgatcctggaaattcgcaagatctctttctgcacagcctttcagcaataggtattaacatccatgaacatgacatccgcttcgttgaagacaactgggagagtccggttcttggtgcttggggactgggctgggaggtttggatggatggcatggaaatcacacagttcacatattttcagcagtcaggaagccttccattgcagccggtttctgttgaaataacatatggacttgaacgtatcctcatgtcactccaggaagttgatcacttcaagaatatactatacaccgaaggaatcacatatggagagctgttccttgagaacgagaaggagatgagtgcatattatttagaacatgcggatgtcagtcacattcaaaagcactttgacaattttgaagaagaggctcgatctttattatcactggggctgccaattccagcgtatgatcaggttctgaaggcctctcatgctttcaatatattagattctagaggttttgttggtgtaactgagcgtgcaagatattttggtcgcatgcgaagccttgctcgtcaatgtgctcagctttgggtggaaactcgagaaaaccttggacatcctttgggtgcttatgaagaggataaccttatctatcctcatgtctccaaaaaaactcatagagaggaacagaagagttgccaccccgtgacgtcgtagaagcaactgaacagcttgagaaatctctagttaatacattggagaaacgtagattgacccatgggaaagtgcacacttacgggacaccaaggagattggcgattgttgttgaaaatcttagtatgaagcaaacagaggtagaggtggaactacgtggcccaccagttgcgaaggcatttgacgaagaaggaaaccccactaaggccgctgagggattttgtcgaaagaataatgtctctgtcgatcacctatatagaagaatagatggtaaaacagaatatatctacgctagagtcagagagtctgctcgttttgctgatgaggtgtcctaactgaagatttacctactattgtttctggtatttcatttcccaagtcgatgcgctggaactccaatattgtttttagtcgtccaatacgctggatcctggcacttcatggcgattttgttgtgccattttattttgctggcatctcaagtgggaatcagtcatgtggccttcgtaactcttctttggctaattttaaggtggaaactgcagaatcatatttaggtactgtggaaaaagctgggatcttgattaatatgcaggagcggaaggaaaaagtcttacatgcctctactgtattggctcaaggtgttggtggcgatttcattgcgcctgatagcttgctgcaggaggttgtcaatcttgtggaggcacctgtgcccatccttggtcgatatgatgattccttcttagaacttcctaaagatgtactgattacggttatgcagaaacatcagaagtattttgctgtaatctccaagtccactggcgatctgctaccttattttattgctgttgccaatggtgcaattagcaaggaagttgttcgcaaagggaatgaagctgttctcagggcaaggtatgaggatgccaaattcttttataagatggatacacaaaagaaattttctgaattccgaggccagcttagtggcattctttttcatgaaaaacttgggacaatgctcgataaaatgacacgtgtcgagaataccgttgctgaattggcccttattcttggaataaatgagagaacggtcccaattatcaaagatgcggctgcattggctatgtcagatcttgccacttctattgtcacagaatttacttcacttgctggaattatggcacgccattatgctttgagagacagcatccctgaagagattggatagcctagttggattgtttggagctggatgccagccaagttctaccaatgatccatttggacttcgaagggtctcttatggattggtccaaatattagttgagaacaaaaagagctttgacctcagacgagctctcaccttattggcaggggtgcaacccatagcaatagagagtgatgttatagatgaggcagtacagttcgtcacaaggagactggaacagcttctggtggatgagggaattaactgcgagatagtccgatcagtgcttatggagcgtgcaaactgcccttatctagcagcacaaacagcgaccgaaatggaagcattttcgagaacagaaacatttcaaaaaatcgttgaagcgtattcaaggccaacaaggatcatccgtggaaaagaaattgagtctgctttggaggttgacccacacgtatttgagaaagatgaagagaaagttttgtggagcgcctacttggaggttgctgataagatccatcctggtgttgatattaagacctttgtggatgcttctcttatcctgatacaacccctagaagatttcttcaatagtgtcttcgtgatggcggaagacgagagagttcgcaacaaccggctaacgttgctgaggaagattgagagtttgcccaaggggattgcggacctgtcagttttacctgggttttaagctgcctattccagccagggggtgtgagcaatagccgtagcggagagatgattttgattttacaagtatttctgattaaaggaaaaaaaaacgtcgtcgcagtagggcacggcaatcccagtaaacgctgtacttgtaattctgattaatacagtcaacaaacggaatcatatctcaaatcttgtgtcgac

SEQ ID NO: 82724 - DNA, 3203 bp, Zea Mays
ccgcagacggcgacgcctccacctcctccaccgtgtccgctgccaaccaacggggctcttccgcttcctccgtcctcaccttccagcaggccatccagcgcctccaggagtactgggcctccgtaggatgcgccgtcatgcagtgtagcaacaccgaggttggagcgggcacaatgaatcctctcacatttcttagggtcttaggtcctgagccatggaatgtcgcttacgtggagccaagtataagaccagacgacagtcgctatggggacaatcccaataggcttcagcgccatactcagtttcaggtaattctgaagcctgatcctggaaattcgcaagatctctttctgcacagcctttcagcaataggtattaacatccatgaacatgacatccgcttcgttgaagacaactgggagagtccggttcttggtgcttggggactgggctgggaggtttggatggatggcatggaaatcacacagttcacatattttcagcagtcaggaagccttccattgcagccggtttctgttgaaataacatatggacttgaacgtatcctcatgtcactccaggaagttgatcacttcaagaatatactatacaccgaaggaatcacatatggagagctgttccttgagaacgagaaggagatgagtgcatattatttagaacatgcggatgtcagtcacattcaaaagcactttgacaattttgaagaagaggctcgatctttattatcactggggctgccaattccagcgtatgatcaggttctgaaggcctctcatgctttcaatatattagattctagaggttttgttggtgtaactgagcgtgcaagatattttggtcgcatgcgaagccttgctcgtcaatgtgctcagctttgggtggaaactcgagaaaaccttggacatcctttgggtgcttatgaagaggataaccttatctatcctcatgtctccaaaaaaactcatagagaggaagtgctggtacaaccacgtgcatttgttcttgaaataggaacagaagagttgccaccccgtgacgtcgtagaagcaactgaacagcttgagaaatctctagttaatacattggagaaacgtagattgacccatgggaaagtgcacacttacgggacaccaaggagattggcgattgttgttgaaaatcttagtatgaagcaaacagaggtagaggtggaactacgtggcccaccagttgcgaaggcatttgacgaagaaggaaaccccactaaggccgctgagggattttgtcgaaagaataatgtctctgtcgatcacctatatagaagaatagatggtcctaactgaagatttacctactattgtttctggtatttcatttcccaagtcgatgcgctggaactccaatattgtttttagtcgtccaatacgctggatcctggcacttcatggcgattttgttgtgccattttattttgctggcatctcaagtgggaatcagtcatgtggccttcgtaactcttctttggctaattttaaggtggaaactgcagaatcatatttaggtactgtggaaaaagctgggatcttgattaatatgcaggagcggaaggaaaaagtcttacatgcctctactgtattggctcaaggtgttggtggcgatttcattgcgcctgatagcttgctgcaggaggttgtcaatcttgtggaggcacctgtgcccatccttggtcgatatgatgattccttcttagaacttcctaaagatgtactgattacggttatgcagaaacatcagaagtattttgctgtaatctccaagtccactggcgatctgctaccttattttattgctgttgccaatggtgcaattagcaaggaagttgttcgcaaagggaatgaagctgttctcagggcaaggtatgaggatgccaaattcttttataagatggatacacaaaagaaattttctgaattccgaggccagcttagtggcattctttttcatgaaaaacttgggacaatgctcgataaaatgacacgtgtcgagaataccgttgctgaattggcccttattcttggaataaatgagagaacggtcccaattatcaaagatgcggctgcattggctatgtcagatcttgccacttctattgtcacagaatttacttcacttgctggaattatggcacgccattatgctttgagagacagcatccctgaagagattgcagaagcactatttgagataacactccctcggtcttcgggtgatgtgtttccaagaacagatgctggtatagttcttgcggttgctgatagattggatagcctagttggattgtttggagctggatgccagccaagttctaccaatgatccatttggacttcgaagggtctcttatggattggtccaaatattagttgagaacaaaaagagctttgacctcagacgagctctcaccttattggcaggggtgcaacccatagcaatagagagtgatgttatagatgaggcagtacagttcgtcacaaggagactggaacagcttctggtggatgagggaattaactgcgagatagtccgatcagtgcttatggagcgtgcaaactgcccttatctagcagcacaaacagcgaccgaaatggaagcattttcgagaacagaaacatttcaaaaaatcgttgaagcgtattcaaggccaacaaggatcatccgtggaaaagaaattgagtctgctttggaggttgacccacacgtatttgagaaagatgaagagaaagttttgtggagcgcctacttggaggttgctgataagatccatcctggtgttgatattaagacctttgtggatgcttctcttatcctgatacaacccctagaagatttcttcaatagtgtcttcgtgatggcggaagacgagagagttcgcaacaaccggctaacgttgctgaggaagattgagagtttgcccaaggggattgcggacctgtcagttttacctgggttttaagctgcctattccagccagggggtgtgagcaatagccgtagcggagagatgattttgattttacaagtatttctgattaaaggaaaaaaaaacgtcgtcgcagtagggcacggcaatcccagtaaacgctgtacttgtaattctgattaatacagtcaacaaacggaatcatatctcaaatcttgtgtcgac

SEQ ID NO: 82725 - DNA, 3259 bp, Zea Mays
ccgcagacggcgacgcctccacctcctccaccgtgtccgctgccaaccaacggggctcttccgcttcctccgtcctcaccttccagcaggccatccagcgcctccaggagtactgggcctccgtaggatgcgccgtcatgcagtgtagcaacaccgaggttggagcgggcacaatgaatcctctcacatttcttagggtcttaggtcctgagccatggaatgtcgcttacgtggagccaagtataagaccagacgacagtcgctatggggacaatcccaataggcttcagcgccatactcagtttcaggtaattctgaagcctgatcctggaaattcgcaagatctctttctgcacagcctttcagcaataggtattaacatccatgaacatgacatccgcttcgttgaagacaactgggagagtccggttcttggtgcttggggactgggctgggaggtttggatggatggcatggaaatcacacagttcacatattttcagcagtcaggaagccttccattgcagccggtttctgttgaaataacatatggacttgaacgtatcctcatgtcactccaggaagttgatcacttcaagaatatactatacaccgaaggaatcacatatggagagctgttccttgagaacgagaaggagatgagtgcatattatttagaacatgcggatgtcagtcacattcaaaagcactttgacaattttgaagaagaggctcgatctttattatcactggggctgccaattccagcgtatgatcaggttctgaaggcctctcatgctttcaatatattagattctagaggttttgttggtgtaactgagcgtgcaagatattttggtcgcatgcgaagccttgctcgtcaatgtgctcagctttgggtggaaactcgagaaaaccttggacatcctttgggtgcttatgaagaggataaccttatctatcctcatgtctccaaaaaaactcatagagaggaagtgctggtacaaccacgtgcatttgttcttgaaataggaacagaagagttgccaccccgtgacgtcgtagaagcaactgaacagcttgagaaatctctagttaatacattggagaaacgtagattgacccatgggaaagtgcacacttacgggacaccaaggagattggcgattgttgttgaaaatcttagtatgaagcaaacagaggtagaggtggaactacgtggcccaccagttgcgaaggcatttgacgaagaaggaaaccccactaaggccgctgagggattttgtcgaaagaataatgtctctgtcgatcacctatatagaagaatagatggtaaaacagaatatatctacgctagagtcagagagtctgctcgttttgctgatgaggtcctaactgaagatttacctactattgtttctggtatttcatttcccaagtcgatgcgctggaactccaatattgtttttagtcgtccaatacgctggatcctggcacttcatggcgattttgttgtgccattttattttgctggcatctcaagtgggaatcagtcatgtggccttcgtaactcttctttggctaattttaaggtggaaactgcagaatcatatttaggtactgtggaaaaagctgggatcttgattaatatgcaggagcggaaggaaaaagtcttacatgcctctactgtattggctcaaggtgttggtggcgatttcattgcgcctgatagcttgctgcaggaggttgtcaatcttgtggaggcacctgtgcccatccttggtcgatatgatgattccttcttagaacttcctaaagatgtactgattacggttatgcagaaacatcagaagtattttgctgtaatctccaagtccactggcgatctgctaccttattttattgctgttgccaatggtgcaattagcaaggaagttgttcgcaaagggaatgaagctgttctcagggcaaggtatgaggatgccaaattcttttataagatggatacacaaaagaaattttctgaattccgaggccagcttagtggcattctttttcatgaaaaacttgggacaatgctcgataaaatgacacgtgtcgagaataccgttgctgaattggcccttattcttggaataaatgagagaacggtcccaattatcaaagatgcggctgcattggctatgtcagatcttgccacttctattgtcacagaatttacttcacttgctggaattatggcacgccattatgctttgagagacagcatccctgaagagattgcagaagcactatttgagataacactccctcggtcttcgggtgatgtgtttccaagaacagatgctggtatagttcttgcggttgctgatagattggatagcctagttggattgtttggagctggatgccagccaagttctaccaatgatccatttggacttcgaagggtctcttatggattggtccaaatattagttgagaacaaaaagagctttgacctcagacgagctctcaccttattggcaggggtgcaacccatagcaatagagagtgatgttatagatgaggcagtacagttcgtcacaaggagactggaacagcttctggtggatgagggaattaactgcgagatagtccgatcagtgcttatggagcgtgcaaactgcccttatctagcagcacaaacagcgaccgaaatggaagcattttcgagaacagaaacatttcaaaaaatcgttgaagcgtattcaaggccaacaaggatcatccgtggaaaagaaattgagtctgctttggaggttgacccacacgtatttgagaaagatgaagagaaagttttgtggagcgcctacttggaggttgctgataagatccatcctggtgttgatattaagacctttgtggatgcttctcttatcctgatacaacccctagaagatttcttcaatagtgtcttcgtgatggcggaagacgagagagttcgcaacaaccggctaacgttgctgaggaagattgagagtttgcccaaggggattgcggacctgtcagttttacctgggttttaagctgcctattccagccagggggtgtgagcaatagccgtagcggagagatgattttgattttacaagtatttctgattaaaggaaaaaaaaacgtcgtcgcagtagggcacggcaatcccagtaaacgctgtacttgtaattctgattaatacagtcaacaaacggaatcatatctcaaatcttgtgtcgac

SEQ ID NO: 82726 - DNA, 3170 bp, Zea Mays
atccgccgcagacggcgacgcctccacctcctccaccgtgtccgctgccaaccaacggggctcttccgcttcctccgtcctcaccttccagcaggccatccagcgcctccaggagtactgggcctccgtaggatgcgccgtcatgcagtgtagcaacaccgaggttggagcgggcacaatgaatcctctcacatttcttagggtcttaggtcctgagccatggaatgtcgcttacgtggagccaagtataagaccagacgacagtcgctatggggacaatcccaataggcttcagcgccatactcagtttcaggtaattctgaagcctgatcctggaaattcgcaagatctctttctgcacagcctttcagcaataggtattaacatccatgaacatgacatccgcttcgttgaagacaactgggagagtccggttcttggtgcttggggactgggctgggaggtttggatggatggcatggaaatcacacagttcacatattttcagcagtcaggaagccttccattgcagccggtttctgttgaaataacatatggacttgaacgtatcctcatgtcactccagatgctgtgacaggaagttgatcacttcaagaatatactatacaccgaaggaatcacatatggagagctgttccttgagaacgagaaggagatgagtgcatattatttagaacatgcggatgtcagtcacattcaaaagcactttgacaattttgaagaagaggctcgatctttattatcactggggctgccaattccagcgtatgatcaggttctgaaggcctctcatgctttcaatatattagattctagaggttttgttggtgtaactgagcgtgcaagatattttggtcgcatgcgaagccttgctcgtcaatgtgctcagctttgggtggaaactcgagaaaaccttggacatcctttgggtgcttatgaagaggataaccttatctatcctcatgtctccaaaaaaactcatagagaggaagtgctggtacaaccacgtgcatttgttcttgaaataggaacagaagagttgccaccccgtgacgtcgtagaagcaactgaacagcttgagaaatctctagttaatacattggagaaacgtagattgacccatgggaaagtgcacacttacgggacaccaaggagattggcgattgttgttgaaaatcttagtatgaagcaaacagaggtagaggtggaactacgtggcccaccagttgcgaaggcatttgacgaagaaggaaaccccactaaggtcctaactgaagatttacctactattgtttctggtatttcatttcccaagtcgatgcgctggaactccaatattgtttttagtcgtccaatacgctggatcctggcacttcatggcgattttgttgtgccattttattttgctggcatctcaaggtttgcattggcagtgggaatcagtcatgtggccttcgtaactcttctttggctaattttaaggtggaaactgcagaatcatatttaggtactgtggaaaaagctgggatcttgattaatatgcaggagcggaaggaaaaagtcttacatgcctctactgtattggctcaaggtgttggtggcgatttcattgcgcctgatagcttgctgcaggaggttgtcaatcttgtggaggcacctgtgcccatccttggtcgatatgatgattccttcttagaacttcctaaagatgtactgattacggttatgcagaaacatcagaagtattttgctgtaatctccaagtccactggcgatctgctaccttattttattgctgttgccaatggtgcaattagcaaggaagttgttcgcaaagggaatgaagctgttctcagggcaaggtatgaggatgccaaattcttttataagatggatacacaaaagaaattttctgaattccgaggccagcttagtggcattctttttcatgaaaaacttgggacaatgctcgataaaatgacacgtgtcgagaataccgttgctgaattggcccttattcttggaataaatgagagaacggtcccaattatcaaagatgcggctgcattggctatgtcagatcttgccacttctattgtcacagaatttacttcacttgctggaattatggcacgccattatgctttgagagacagcatccctgaagagattgcagaagcactatttgagataacactccctcggtcttcgggtgatgtgtttccaagaacagatgctggtatagttcttgcggttgctgatagattggatagcctagttggattgtttggagctggatgccagccaagttctaccaatgatccatttggacttcgaagggtctcttatggattggtccaaatattagttgagaacaaaaagagctttgacctcagacgagctctcaccttattggcaggggtgcaacccatagcaatagagagtgatgttatagatgaggcagtacagttcgtcacaaggagactggaacagcttctggtggatgagggaattaactgcgagatagtccgatcagtgcttatggagcgtgcaaactgcccttatctagcagcacaaacagcgaccgaaatggaagcattttcgagaacagaaacatttcaaaaaatcgttgaagcgtattcaaggccaacaaggatcatccgtggaaaagaaattgagtctgctttggaggttgacccacacgtatttgagaaagatgaagagaaagttttgtggagcgcctacttggaggttgctgataagatccatcctggtgttgatattaagacctttgtggatgcttctcttatcctgatacaacccctagaagatttcttcaatagtgtcttcgtgatggcggaagacgagagagttcgcaacaaccggctaacgttgctgaggaagattgagagtttgcccaaggggattgcggacctgtcagttttacctgggttttaagctgcctattccagccagggggtgtgagcaatagccgtagcggagagatgattttgattttacaagtatttctgattaaaggaaaaaaaaacgtcgtcgcagtagggcacggcaatcccagtaaacgctgtacttgtaattctgattaatacagtcaacaaacggaatcatatctcaaatcttgtgtcgac

SEQ ID NO: 82727 - DNA, 3290 bp, Zea Mays
atccgccgcagacggcgacgcctccacctcctccaccgtgtccgctgccaaccaacggggctcttccgcttcctccgtcctcaccttccagcaggccatccagcgcctccaggagtactgggcctccgtaggatgcgccgtcatgcagtgtagcaacaccgaggttggagcgggcacaatgaatcctctcacatttcttagggtcttaggtcctgagccatggaatgtcgcttacgtggagccaagtataagaccagacgacagtcgctatggggacaatcccaataggcttcagcgccatactcagtttcaggtaattctgaagcctgatcctggaaattcgcaagatctctttctgcacagcctttcagcaataggtattaacatccatgaacatgacatccgcttcgttgaagacaactgggagagtccggttcttggtgcttggggactgggctgggaggtttggatggatggcatggaaatcacacagttcacatattttcagcagtcaggaagccttccattgcagccggtttctgttgaaataacatatggacttgaacgtatcctcatgtcactccagatgctgtgacaggaagttgatcacttcaagaatatactatacaccgaaggaatcacatatggagagctgttccttgagaacgagaaggagatgagtgcatattatttagaacatgcggatgtcagtcacattcaaaagcactttgacaattttgaagaagaggctcgatctttattatcactggggctgccaattccagcgtatgatcaggttctgaaggcctctcatgctttcaatatattagattctagaggttttgttggtgtaactgagcgtgcaagatattttggtcgcatgcgaagccttgctcgtcaatgtgctcagctttgggtggaaactcgagaaaaccttggacatcctttgggtgcttatgaagaggataaccttatctatcctcatgtctccaaaaaaactcatagagaggaagtgctggtacaaccacgtgcatttgttcttgaaataggaacagaagagttgccaccccgtgacgtcgtagaagcaactgaacagcttgagaaatctctagttaatacattggagaaacgtagattgacccatgggaaagtgcacacttacgggacaccaaggagattggcgattgttgttgaaaatcttagtatgaagcaaacagaggtagaggtggaactacgtggcccaccagttgcgaaggcatttgacgaagaaggaaaccccactaaggccgctgagggattttgtcgaaagaataatgtctctgtcgatcacctatatagaagaatagatggtaaaacagaatatatctacgctagagtcagagagtctgctcgttttgctgatgaggtcctaactgaagatttacctactattgtttctggtatttcatttcccaagtcgatgcgctggaactccaatattgtttttagtcgtccaatacgctggatcctggcacttcatggcgattttgttgtgccattttattttgctggcatctcaaggtttgcattggcagtgggaatcagtcatgtggccttcgtaactcttctttggctaattttaaggtggaaactgcagaatcatatttaggtactgtggaaaaagctgggatcttgattaatatgcaggagcggaaggaaaaagtcttacatgcctctactgtattggctcaaggtgttggtggcgatttcattgcgcctgatagcttgctgcaggaggttgtcaatcttgtggaggcacctgtgcccatccttggtcgatatgatgattccttcttagaacttcctaaagatgtactgattacggttatgcagaaacatcagaagtattttgctgtaatctccaagtccactggcgatctgctaccttattttattgctgttgccaatggtgcaattagcaaggaagttgttcgcaaagggaatgaagctgttctcagggcaaggtatgaggatgccaaattcttttataagatggatacacaaaagaaattttctgaattccgaggccagcttagtggcattctttttcatgaaaaacttgggacaatgctcgataaaatgacacgtgtcgagaataccgttgctgaattggcccttattcttggaataaatgagagaacggtcccaattatcaaagatgcggctgcattggctatgtcagatcttgccacttctattgtcacagaatttacttcacttgctggaattatggcacgccattatgctttgagagacagcatccctgaagagattgcagaagcactatttgagataacactccctcggtcttcgggtgatgtgtttccaagaacagatgctggtatagttcttgcggttgctgatagattggatagcctagttggattgtttggagctggatgccagccaagttctaccaatgatccatttggacttcgaagggtctcttatggattggtccaaatattagttgagaacaaaaagagctttgacctcagacgagctctcaccttattggcaggggtgcaacccatagcaatagagagtgatgttatagatgaggcagtacagttcgtcacaaggagactggaacagcttctggtggatgagggaattaactgcgagatagtccgatcagtgcttatggagcgtgcaaactgcccttatctagcagcacaaacagcgaccgaaatggaagcattttcgagaacagaaacatttcaaaaaatcgttgaagcgtattcaaggccaacaaggatcatccgtggaaaagaaattgagtctgctttggaggttgacccacacgtatttgagaaagatgaagagaaagttttgtggagcgcctacttggaggttgctgataagatccatcctggtgttgatattaagacctttgtggatgcttctcttatcctgatacaacccctagaagatttcttcaatagtgtcttcgtgatggcggaagacgagagagttcgcaacaaccggctaacgttgctgaggaagattgagagtttgcccaaggggattgcggacctgtcagttttacctgggttttaagctgcctattccagccagggggtgtgagcaatagccgtagcggagagatgattttgattttacaagtatttctgattaaaggaaaaaaaaacgtcgtcgcagtagggcacggcaatcccagtaaacgctgtacttgtaattctgattaatacagtcaacaaacggaatcatatctcaaatcttgtgtcgac

SEQ ID NO: 82728 - DNA, 3238 bp, Zea Mays
atccgccgcagacggcgacgcctccacctcctccaccgtgtccgctgccaaccaacggggctcttccgcttcctccgtcctcaccttccagcaggccatccagcgcctccaggagtactgggcctccgtaggatgcgccgtcatgcagtgtagcaacaccgaggttggagcgggcacaatgaatcctctcacatttcttagggtcttaggtcctgagccatggaatgtcgcttacgtggagccaagtataagaccagacgacagtcgctatggggacaatcccaataggcttcagcgccatactcagtttcaggtaattctgaagcctgatcctggaaattcgcaagatctctttctgcacagcctttcagcaataggtattaacatccatgaacatgacatccgcttcgttgaagacaactgggagagtccggttcttggtgcttggggactgggctgggaggtttggatggatggcatggaaatcacacagttcacatattttcagcagtcaggaagccttccattgcagccggtttctgttgaaataacatatggacttgaacgtatcctcatgtcactccagatgctgtgacaggaagttgatcacttcaagaatatactatacaccgaaggaatcacatatggagagctgttccttgagaacgagaaggagatgagtgcatattatttagaacatgcggatgtcagtcacattcaaaagcactttgacaattttgaagaagaggctcgatctttattatcactggggctgccaattccagcgtatgatcaggttctgaaggcctctcatgctttcaatatattagattctagaggttttgttggtgtaactgagcgtgcaagatattttggtcgcatgcgaagccttgctcgtcaatgtgctcagctttgggtggaaactcgagaaaaccttggacatcctttgggtgcttatgaagaggataaccttatctatcctcatgtctccaaaaaaactcatagagaggaagtgctggtacaaccacgtgcatttgttcttgaaataggaacagaagagttgccaccccgtgacgtcgtagaagcaactgaacagcttgagaaatctctagttaatacattggagaaacgtagattgacccatgggaaagtgcacacttacgggacaccaaggagattggcgattgttgttgaaaatcttagtatgaagcaaacagaggtagaggtggaactacgtggcccaccagttgcgaaggcatttgacgaagaaggaaaccccactaaggccgctgagggattttgtcgaaagaataatgtctctgtcgatcacctatatagaagaatagatggtaaaacagaatatatctacgctagagtcagagagtctgctcgttttgctgatgaggtcctaactgaagatttacctactattgtttctggtatttcatttcccaagtcgatgcgctggaactccaatattgtttttagtcgtccaatacgctggatcctggcacttcatggcgattttgttgtgccattttattttgctggcatctcaagtgggaatcagtcatgtggccttcgtaactcttctttggctaattttaaggtggaaactgcagaatcatatttaggagcggaaggaaaaagtcttacatgcctctactgtattggctcaaggtgttggtggcgatttcattgcgcctgatagcttgctgcaggaggttgtcaatcttgtggaggcacctgtgcccatccttggtcgatatgatgattccttcttagaacttcctaaagatgtactgattacggttatgcagaaacatcagaagtattttgctgtaatctccaagtccactggcgatctgctaccttattttattgctgttgccaatggtgcaattagcaaggaagttgttcgcaaagggaatgaagctgttctcagggcaaggtatgaggatgccaaattcttttataagatggatacacaaaagaaattttctgaattccgaggccagcttagtggcattctttttcatgaaaaacttgggacaatgctcgataaaatgacacgtgtcgagaataccgttgctgaattggcccttattcttggaataaatgagagaacggtcccaattatcaaagatgcggctgcattggctatgtcagatcttgccacttctattgtcacagaatttacttcacttgctggaattatggcacgccattatgctttgagagacagcatccctgaagagattgcagaagcactatttgagataacactccctcggtcttcgggtgatgtgtttccaagaacagatgctggtatagttcttgcggttgctgatagattggatagcctagttggattgtttggagctggatgccagccaagttctaccaatgatccatttggacttcgaagggtctcttatggattggtccaaatattagttgagaacaaaaagagctttgacctcagacgagctctcaccttattggcaggggtgcaacccatagcaatagagagtgatgttatagatgaggcagtacagttcgtcacaaggagactggaacagcttctggtggatgagggaattaactgcgagatagtccgatcagtgcttatggagcgtgcaaactgcccttatctagcagcacaaacagcgaccgaaatggaagcattttcgagaacagaaacatttcaaaaaatcgttgaagcgtattcaaggccaacaaggatcatccgtggaaaagaaattgagtctgctttggaggttgacccacacgtatttgagaaagatgaagagaaagttttgtggagcgcctacttggaggttgctgataagatccatcctggtgttgatattaagacctttgtggatgcttctcttatcctgatacaacccctagaagatttcttcaatagtgtcttcgtgatggcggaagacgagagagttcgcaacaaccggctaacgttgctgaggaagattgagagtttgcccaaggggattgcggacctgtcagttttacctgggttttaagctgcctattccagccagggggtgtgagcaatagccgtagcggagagatgattttgattttacaagtatttctgattaaaggaaaaaaaaacgtcgtcgcagtagggcacggcaatcccagtaaacgctgtacttgtaattctgattaatacagtcaacaaacggaatcatatctcaaatcttgtgtcgac

SEQ ID NO: 82729 - DNA, 3276 bp, Zea Mays
atccgccgcagacggcgacgcctccacctcctccaccgtgtccgctgccaaccaacggggctcttccgcttcctccgtcctcaccttccagcaggccatccagcgcctccaggagtactgggcctccgtaggatgcgccgtcatgcagtgtagcaacaccgaggttggagcgggcacaatgaatcctctcacatttcttagggtcttaggtcctgagccatggaatgtcgcttacgtggagccaagtataagaccagacgacagtcgctatggggacaatcccaataggcttcagcgccatactcagtttcaggtaattctgaagcctgatcctggaaattcgcaagatctctttctgcacagcctttcagcaataggtattaacatccatgaacatgacatccgcttcgttgaagacaactgggagagtccggttcttggtgcttggggactgggctgggaggtttggatggatggcatggaaatcacacagttcacatattttcagcagtcaggaagccttccattgcagccggtttctgttgaaataacatatggacttgaacgtatcctcatgtcactccagatgctgtgacaggaagttgatcacttcaagaatatactatacaccgaaggaatcacatatggagagctgttccttgagaacgagaaggagatgagtgcatattatttagaacatgcggatgtcagtcacattcaaaagcactttgacaattttgaagaagaggctcgatctttattatcactggggctgccaattccagcgtatgatcaggttctgaaggcctctcatgctttcaatatattagattctagaggttttgttggtgtaactgagcgtgcaagatattttggtcgcatgcgaagccttgctcgtcaatgtgctcagctttgggtggaaactcgagaaaaccttggacatcctttgggtgcttatgaagaggataaccttatctatcctcatgtctccaaaaaaactcatagagaggaagtgctggtacaaccacgtgcatttgttcttgaaataggaacagaagagttgccaccccgtgacgtcgtagaagcaactgaacagcttgagaaatctctagttaatacattggagaaacgtagattgacccatgggaaagtgcacacttacgggacaccaaggagattggcgattgttgttgaaaatcttagtatgaagcaaacagaggtagaggtggaactacgtggcccaccagttgcgaaggcatttgacgaagaaggaaaccccactaaggccgctgagggattttgtcgaaagaataatgtctctgtcgatcacctatatagaagaatagatggtaaaacagaatatatctacgctagagtcagagagtctgctcgttttgctgatgaggtcctaactgaagatttacctactattgtttctggtatttcatttcccaagtcgatgcgctggaactccaatattgtttttagtcgtccaatacgctggatcctggcacttcatggcgattttgttgtgccattttattttgctggcatctcaagtgggaatcagtcatgtggccttcgtaactcttctttggctaattttaaggtggaaactgcagaatcatatttaggtactgtggaaaaagctgggatcttgattaatatgcaggagcggaaggaaaaagtcttacatgcctctactgtattggctcaaggtgttggtggcgatttcattgcgcctgatagcttgctgcaggaggttgtcaatcttgtggaggcacctgtgcccatccttggtcgatatgatgattccttcttagaacttcctaaagatgtactgattacggttatgcagaaacatcagaagtattttgctgtaatctccaagtccactggcgatctgctaccttattttattgctgttgccaatggtgcaattagcaaggaagttgttcgcaaagggaatgaagctgttctcagggcaaggtatgaggatgccaaattcttttataagatggatacacaaaagaaattttctgaattccgaggccagcttagtggcattctttttcatgaaaaacttgggacaatgctcgataaaatgacacgtgtcgagaataccgttgctgaattggcccttattcttggaataaatgagagaacggtcccaattatcaaagatgcggctgcattggctatgtcagatcttgccacttctattgtcacagaatttacttcacttgctggaattatggcacgccattatgctttgagagacagcatccctgaagagattgcagaagcactatttgagataacactccctcggtcttcgggtgatgtgtttccaagaacagatgctggtatagttcttgcggttgctgatagattggatagcctagttggattgtttggagctggatgccagccaagttctaccaatgatccatttggacttcgaagggtctcttatggattggtccaaatattagttgagaacaaaaagagctttgacctcagacgagctctcaccttattggcaggggtgcaacccatagcaatagagagtgatgttatagatgaggcagtacagttcgtcacaaggagactggaacagcttctggtggatgagggaattaactgcgagatagtccgatcagtgcttatggagcgtgcaaactgcccttatctagcagcacaaacagcgaccgaaatggaagcattttcgagaacagaaacatttcaaaaaatcgttgaagcgtattcaaggccaacaaggatcatccgtggaaaagaaattgagtctgctttggaggttgacccacacgtatttgagaaagatgaagagaaagttttgtggagcgcctacttggaggttgctgataagatccatcctggtgttgatattaagacctttgtggatgcttctcttatcctgatacaacccctagaagatttcttcaatagtgtcttcgtgatggcggaagacgagagagttcgcaacaaccggctaacgttgctgaggaagattgagagtttgcccaaggggattgcggacctgtcagttttacctgggttttaagctgcctattccagccagggggtgtgagcaatagccgtagcggagagatgattttgattttacaagtatttctgattaaaggaaaaaaaaacgtcgtcgcagtagggcacggcaatcccagtaaacgctgtacttgtaattctgattaatacagtcaacaaacggaatcatatctcaaatcttgtgtcgac

SEQ ID NO: 82730 - DNA, 3257 bp, Zea Mays
gaccccgggaagccgaagaagttagctgtgaggtctttaaagaggagttgttgcattgcagttgcaggttgcacagccgcggaagccagcacctcaaagccatggcggaagtggaccacctcgctgccgagagggccaccgcgcgcttcgacgtcgaggagatgaaggttgcgtgggccggctcacgccacgccgtccacgtcgccgaccgcatggcgcgcctcgtcgcatccgaccctgtcttccgcaaggataacaggaccatgctctccaggaaggagttgttcaaggacactctaagaaaagcagcgcatgcgtggaagcggattgtcgagctacgtcttacagaagaggaagcggatttgctgagacaatatgttgaccagcctggttatgttgatctgcattggggcatgttcgttccagctataaaaggccaaggaactgaggagcagcagcacaagtggttaccactggcttacaagttccaaataattgggtgctatgctcagacggaacttggtcatggctcaaacgttcagggccttgaaacaactgctacattcgatccgaagactgatgagtttgtcatccacagtccaactctcacgtccagcaaatggtggcctggtggcttggggaaagcttccacccatgcagtggtgtacgctcggttgataactgaaggaaaggactatggcatacatggtttcattgtgcaactgcgaagcttagaggatcactccccacttcctggtgttaccctcggtgatattggtggaaagttcggtagtggtgcatataacagtatggataatggtgttcttcgatttgaccatgtgcgcatcccaagggatcaaatgttgatgaggctttcacaagttacaagggaggggaaatatgttcactcaaatgttccaaagcagctgttgtatgggacaatggtttacgttcgccagtcaattgttgcagatgcttctaaggctttgtcccgtgctgtttgcattgctgtacgatacagcgcagtcagaaagcagtttggctctcaagatggtggccctgagactcaggtccttaattacaagactcaacagagcagactctttccattgctggcttcagcatatgcatttagatttgtgggtgattggctcaactggctatatacggatgtaactcagaaactggaagccaaggacttctcgaccctgcaggaagctcatgcatgcactgctggtttgaaagctgtgacaacatcagtaacagctgatgcaattgaagaatgccgaaagctctgtggtggacatggttacttgaacagcagtgggcttcctgagttgtttgcggtctatgttcccgcttgcacttacgaaggagacaacgtcgttttgcttttgcaggttgcaaggattctaatgaaaaccgtttctcagttggcatccgggaaacagcctgttggcacaatggcctacatgggcaaagtgcagtatttgatgcaatgcaaatctgctgtcagttcagctgaagattggcttaaccctgatgccatacaagaggcatttgaagcaagagcgctcagaatggcggtaaactgtgcccagaacataagccaagctgcaagccaagaggaagctgcaggtttctatgagcggtccccagatttgcttgaggctgcggtagctcacatccagctgattatcgtgaccaagttcattgagaaggtgcatcaggagattcctggacacggagtgaaggaacagctccaggccctctgcaacgtgtacgcgctgtacatcctccacaagcacctgggcgacttcttggcgactgggtgcatcacgcccaggcagggagcgctggcaaacgagcagctgggcaagctgtacgcgtgcgtccgaacgctgtggcgctggtggatgcgttcaactacacggaccactacctggggtctgtgctggggcggtacgacggcgacgtgtaccctgcgctctacgaggaggcgtggaaggacccgctgaacgagacggtggtgccggaggggtaccacgagtacctccgcccactcatcaagcagcagcagctcaagctctcgaggctctgaagtctgaatcctctctctctctctctctctctctctctctctctgatgtggaagccagccaagatgtgtgtacgttagacatgtgtggtgggtttcagttgatacacgagggagtgagtaataaagagcgagcgagagatgaaacaaagaactgaatttgtatcgtacaacaaagaactttgccgtttggttcacatatttataacgtaatgggtaattgataacgttaaatcatgtttgttttagtccaaccgtaatcagataccacactaaaatttgataccagcttattcaaatttgttaccaccagtaatcgagcgtaaaccattaccatttatgttacatttcttgaaccaaacagcatcttaatttgttgttactgaccacgtgattggttgttaggaacagcagatcctggtcgaagcctagatgcaggctgggcttagcctgtatgcattgatgcaaaccaaaataaattctcttgtttggttgtttgtcctcaattagccaggttcagtacaacccttgtctggtttgctgttttaggtaagttacatggatttagctctaagttacacaactcaactacatttctaaaattacaatgttataaattacacaaatccaaatttatgcaattatatattacaataacttatcctttacatatcctttacaaaattataaaatacaattataatattgatactgaggcacaagaacactttacaaaattgtagtttacaagtatgcattagcagtttaccagcgtccattgcagccacccattctgttctcagttctcaaacaccaaaaacactttaaacaaaacagctcagttctcgattcaatttacaaaaacaccaaaaacacccgatcaagtgtacaatcaaaatacttgtaaacaaaatagctctctgtttagcaaatacttgtaaacaaaatagaccaaaaacaacttggttgtttgatggcaaagtaaatataaaaaattcatgaagagaaggtacaccacttccatttaaatgtgtcacgagcttcgaatcaggaagatatgcactcagcacgttaacacggacgagtttctgacatcaagaaactcgaatggctgcctcgagtggctaggtgaattattcaggaaatctccggtgcacat

SEQ ID NO: 82731 - DNA, 3307 bp, Zea Mays
ctctcggcaccaccgcccgccctatatgtacgtcatcgtcatcacagggagggaccccgggaagccgaagaagttagctgtgaggtctttaaagaggagttgttgcattgcagttgcaggttgcacagccgcggaagccagcacctcaaagccatggcggaagtggaccacctcgctgccgagagggccaccgcgcgcttcgacgtcgaggagatgaaggttgcgtgggccggctcacgccacgccgtccacgtcgccgaccgcatggcgcgcctcgtcgcatccgaccctgtcttccgcaaggataacaggaccatgctctccaggaaggagttgttcaaggacactctaagaaaagcagcgcatgcgtggaagcggattgtcgagctacgtcttacagaagaggaagcggatttgctgagacaatatgttgaccagcctggttatgttgatctgcattggggcatgttcgttccagctataaaaggccaaggaactgaggagcagcagcacaagtggttaccactggcttacaagttccaaataattgggtgctatgctcagacggaacttggtcatggctcaaacgttcagggccttgaaacaactgctacattcgatccgaagactgatgagtttgtcatccacagtccaactctcacgtccagcaaatggtggcctggtggcttggggaaagcttccacccatgcagtggtgtacgctcggttgataactgaaggaaaggactatggcatacatggtttcattgtgcaactgcgaagcttagaggatcactccccacttcctggtgttaccctcggtgatattggtggaaagttcggtagtggtgcatataacagtatggataatggtgttcttcgatttgaccatgtgcgcatcccaagggatcaaatgttgatgaggctttcacaagttacaagggaggggaaatatgttcactcaaatgttccaaagcagctgttgtatgggacaatggtttacgttcgccagtcaattgttgcagatgcttctaaggctttgtcccgtgctgtttgcattgctgtacgatacagcgcagtcagaaagcagtttggctctcaagatggtggccctgagactcaggtccttaattacaagactcaacagagcagactctttccattgctggcttcagcatatgcatttagatttgtgggtgattggctcaactggctatatacggatgtaactcagaaactggaagccaaggacttctcgaccctgcaggaagctcatgcatgcactgctggtttgaaagctgtgacaacatcagtaacagctgatgcaattgaagaatgccgaaagctctgtggtggacatggttacttgaacagcagtgggcttcctgagttgtttgcggtctatgttcccgcttgcacttacgaaggagacaacgtcgttttgcttttgcaggttgcaaggattctaatgaaaaccgtttctcagttggcatccgggaaacagcctgttggcacaatggcctacatgggcaaagtgcagtatttgatgcaatgcaaatctgctgtcagttcagctgaagattggcttaaccctgatgccatacaagaggcatttgaagcaagagcgctcagaatggcggtaaactgtgcccagaacataagccaagctgcaagccaagaggaaggtttctatgagcggtccccagatttgcttgaggctgcggtagctcacatccagctgattatcgtgaccaagttcattgagaaggtgcatcaggagattcctggacacggagtgaaggaacagctccaggccctctgcaacgtgtacgcgctgtacatcctccacaagcacctgggcgacttcttggcgactgggtgcatcacgcccaggcagggagcgctggcaaacgagcagctgggcaagctgtacgcgcaggtgcgtccgaacgctgtggcgctggtggatgcgttcaactacacggaccactacctggggtctgtgctggggcggtacgacggcgacgtgtaccctgcgctctacgaggaggcgtggaaggacccgctgaacgagacggtggtgccggaggggtaccacgagtacctccgcccactcatcaagcagcagcagctcaagctctcgaggctctgaagtctgaatcctctctctctctctctctctctctctctctctctgatgtggaagccagccaagatgtgtgtacgttagacatgtgtggtgggtttcagttgatacacgagggagtgagtaataaagagcgagcgagagatgaaacaaagaactgaatttgtatcgtacaacaaagaactttgccgtttggttcacatatttataacgtaatgggtaattgataacgttaaatcatgtttgttttagtccaaccgtaatcagataccacactaaaatttgataccagcttattcaaatttgttaccaccagtaatcgagcgtaaaccattaccatttatgttacatttcttgaaccaaacagcatcttaatttgttgttactgaccacgtgattggttgttaggaacagcagatcctggtcgaagcctagatgcaggctgggcttagcctgtatgcattgatgcaaaccaaaataaattctcttgtttggttgtttgtcctcaattagccaggttcagtacaacccttgtctggtttgctgttttaggtaagttacatggatttagctctaagttacacaactcaactacatttctaaaattacaatgttataaattacacaaatccaaatttatgcaattatatattacaataacttatcctttacatatcctttacaaaattataaaatacaattataatattgatactgaggcacaagaacactttacaaaattgtagtttacaagtatgcattagcagtttaccagcgtccattgcagccacccattctgttctcagttctcaaacaccaaaaacactttaaacaaaacagctcagttctcgattcaatttacaaaaacaccaaaaacacccgatcaagtgtacaatcaaaatacttgtaaacaaaatagctctctgtttagcaaatacttgtaaacaaaatagaccaaaaacaacttggttgtttgatggcaaagtaaatataaaaaattcatgaagagaaggtacaccacttccatttaaatgtgtcacgagcttcgaatcaggaagatatgcactcagcacgttaacacggacgagtttctgacatcaagaaactcgaatggctgcctcgagtggctaggtgaattattcaggaaatctccggtgcacat

SEQ ID NO: 82732 - DNA, 3275 bp, Zea Mays
gtcaaatacacgcacatgtaaaaggagattcttctcgtcgccgacccgctctcggcaccaccgcccgccctatatttgcaggttgcacagccgcggaagccagcacctcaaagccatggcggaagtggaccacctcgctgccgagagggccaccgcgcgcttcgacgtcgaggagatgaaggttgcgtgggccggctcacgccacgccgtccacgtcgccgaccgcatggcgcgcctcgtcgcatccgaccctgtcttccgcaaggataacaggaccatgctctccaggaaggagttgttcaaggacactctaagaaaagcagcgcatgcgtggaagcggattgtcgagctacgtcttacagaagaggaagcggatttgctgagacaatatgttgaccagcctggttatgttgatctgcattggggcatgttcgttccagctataaaaggccaaggaactgaggagcagcagcacaagtggttaccactggcttacaagttccaaataattgggtgctatgctcagacggaacttggtcatggctcaaacgttcagggccttgaaacaactgctacattcgatccgaagactgatgagtttgtcatccacagtccaactctcacgtccagcaaatggtggcctggtggcttggggaaagcttccacccatgcagtggtgtacgctcggttgataactgaaggaaaggactatggcatacatggtttcattgtgcaactgcgaagcttagaggatcactccccacttcctggtgttaccctcggtgatattggtggaaagttcggtagtggtgcatataacagtatggataatggtgttcttcgatttgaccatgtgcgcatcccaagggatcaaatgttgatgaggctttcacaagttacaagggaggggaaatatgttcactcaaatgttccaaagcagctgttgtatgggacaatggtttacgttcgccagtcaattgttgcagatgcttctaaggctttgtcccgtgctgtttgcattgctgtacgatacagcgcagtcagaaagcagtttggctctcaagatggtggccctgagactcaggtccttaattacaagactcaacagagcagactctttccattgctggcttcagcatatgcatttagatttgtgggtgattggctcaactggctatatacggatgtaactcagaaactggaagccaaggacttctcgaccctgcaggaagctcatgcatgcactgctggtttgaaagctgtgacaacatcagtaacagctgatgcaattgaagaatgccgaaagctctgtggtggacatggttacttgaacagcagtgggcttcctgagttgtttgcggtctatgttcccgcttgcacttacgaaggagacaacgtcgttttgcttttgcaggttgcaaggattctaatgaaaaccgtttctcagttggcatccgggaaacagcctgttggcacaatggcctacatgggcaaagtgcagtatttgatgcaatgcaaatctgctgtcagttcagctgaagattggcttaaccctgatgccatacaagaggcatttgaagcaagagcgctcagaatggcggtaaactgtgcccagaacataagccaagctgcaagccaagaggaagctgcaggtttctatgagcggtccccagatttgcttgaggctgcggtagctcacatccagctgattatcgtgaccaagttcattgagaaggtgcatcaggagattcctggacacggagtgaaggaacagctccaggccctctgcaacgtgtacgcgctgtacatcctccacaagcacctgggcgacttcttggcgactgggtgcatcacgcccaggcagggagcgctggcaaacgagcagctgggcaagctgtacgcgcaggtgcgtccgaacgctgtggcgctggtggatgcgttcaactacacggaccactacctggggtctgtgctggggcggtacgacggcgacgtgtaccctgcgctctacgaggaggcgtggaaggacccgctgaacgagacggtggtgccggaggggtaccacgagtacctccgcccactcatcaagcagcagcagctcaagctctcgaggctctgaagtctgaatcctctctctctctctctctctctctctctctctctgatgtggaagccagccaagatgtgtgtacgttagacatgtgtggtgggtttcagttgatacacgagggagtgagtaataaagagcgagcgagagatgaaacaaagaactgaatttgtatcgtacaacaaagaactttgccgtttggttcacatatttataacgtaatgggtaattgataacgttaaatcatgtttgttttagtccaaccgtaatcagataccacactaaaatttgataccagcttattcaaatttgttaccaccagtaatcgagcgtaaaccattaccatttatgttacatttcttgaaccaaacagcatcttaatttgttgttactgaccacgtgattggttgttaggaacagcagatcctggtcgaagcctagatgcaggctgggcttagcctgtatgcattgatgcaaaccaaaataaattctcttgtttggttgtttgtcctcaattagccaggttcagtacaacccttgtctggtttgctgttttaggtaagttacatggatttagctctaagttacacaactcaactacatttctaaaattacaatgttataaattacacaaatccaaatttatgcaattatatattacaataacttatcctttacatatcctttacaaaattataaaatacaattataatattgatactgaggcacaagaacactttacaaaattgtagtttacaagtatgcattagcagtttaccagcgtccattgcagccacccattctgttctcagttctcaaacaccaaaaacactttaaacaaaacagctcagttctcgattcaatttacaaaaacaccaaaaacacccgatcaagtgtacaatcaaaatacttgtaaacaaaatagctctctgtttagcaaatacttgtaaacaaaatagaccaaaaacaacttggttgtttgatggcaaagtaaatataaaaaattcatgaagagaaggtacaccacttccatttaaatgtgtcacgagcttcgaatcaggaagatatgcactcagcacgttaacacggacgagtttctgacatcaagaaactcgaatggctgcctcgagtggctaggtgaattattcaggaaatctccggtgcacat

SEQ ID NO: 82733 - DNA, 1706 bp, Zea Mays
caaatacacgcacatgtaaaaggagattcttctcgtcgccgacccgctctcggcaccaccgcccgccctatatgtacgtcatcgtcatcacagggagggaccccgggaagccgaagaagttagctgtgaggtctttaaagaggagttgttgcattgcagttgcaggttgcacagccgcggaagccagcacctcaaagccatggcggaagtggaccacctcgctgccgagagggccaccgcgcgcttcgacgtcgaggagatgaaggttgcgtgggccggctcacgccacgccgtccacgtcgccgaccgcatggcgcgcctcgtcgcatccgaccctgtcttccgcaaggataacaggaccatgctctccaggaaggagttgttcaaggacactctaagaaaagcagcgcatgcgtggaagcggattgtcgagctacgtcttacagaagaggaagcggatttgctgagacaatatgttgaccagcctggttatgttgatctgcattggggcatgttcgttccagctataaaaggccaaggaactgaggagcagcagcacaagtggttaccactggcttacaagttccaaataattgggtgctatgctcagacggaacttggtcatggctcaaacgttcagggccttgaaacaactgctacattcgatccgaagactgatgagtttgtcatccacagtccaactctcacgtccagcaaatggtggcctggtggcttggggaaagcttccacccatgcagtggtgtacgctcggttgataactgaaggaaaggactatggcatacatggtttcattgtgcaactgcgaagcttagaggatcactccccacttcctggtgttaccctcggtgatattggtggaaagttcggtagtggtgcatataacagtatggataatggtgttcttcgatttgaccatgtgcgcatcccaagggatcaaatgttgatgaggctttcacaagttacaagggaggggaaatatgttcactcaaatgttccaaagcagctgttgtatgggacaatggtttacgttcgccagtcaattgttgcagatgcttctaaggctttgtcccgtgctgtttgcattgctgtacgatacagcgcagtcagaaagcagtttggctctcaagatggtggccctgagactcaggtccttaattacaagactcaacagagcagactctttccattgctggcttcagcatatgcatttagatttgtgggtgattggctcaactggctatatacggatgtaactcagaaactggaagccaaggacttctcgaccctgcaggaagctcatgcatgcactgctggtttgaaagctgtgacaacatcagtaacagctgtatgtaatccttgtgctgttctacttgttattaatagtttatactggctgtacctcactctttttggctctcttatacgattatgattgaagtggagttgagttaataccggtcattccaaagtactcgcatcgagtataaaagtggtttgtagaagttctgaactaccaatttggcagatattgttgtttatcacttccatctttcttgggtatttcagttgtagctcataattcaggtttcaaaggctgtcactagatacgtttttcccccctgtttaacttgactgtattcctgaagctccattccattttaaggggagatttctctctgttttgc

SEQ ID NO: 82734 - DNA, 1219 bp, Zea Mays
tcataacagtataacacacatttatacatgagttgttacggtattatatgtttccgttgcaacgtagggtcactcacctagtattgatatatgaatatacaaataagccgtagtggaaagtgtgatgttgggccaagcctgaaagcaaagagtgggccgggtggccaggaccaacgacttttccatagtcgtgctcgtcttcgtccacctcccgacccgactgagtagcaagcaattctccaaattagggtttctttccgcttgctttccagtttgcggcatcagtcggtggcgcctgcgatggagtctctgttcggccaatcgcagcggaggaggagggcgggcggcagcggcttcgaatcgctcaagcgtctgggtcacatctcacccgctgtgcagtcccacctcaaacatgtgtacctcaccctatgctccgcgctggccttctctgcactcggcgcgtacctccacatcctcctcaacgtcggaggcgccctcacgaccgtgggatgcgtggcctccatcgccttcctcatctccctgcccgcttcacgggaccaggagaggaaccgcttggcgctgctcatgtctgccgcgctccttcaaggcgcgtccgttggtccgctcgtcgaccttgttattgacttggattcgaggattctcgtcactgcgttcgtcgggaccgcagttgcttttgcatgcttctctggcgctgccatcatcgccaagcgcagggaatacctgtacctcggcggtctgctttcatctggcctctccattcttctctggctgcagtttgctacttcaatctttggccacaccagcgcgaccttcatgtttgagctgcagctctactttggcctcctggttttcctgggatatatggtgtttgacacccaggagatcatcgagagggcgcaccgtggggacatggactacatcaagcacgcgctgactctcttcaccgactttgttgcggttcttgttcgaatccttgtcatcatgatgaagaatgcacaggagaaatcccaagacgagaagaagaggaagaagcggtagctgctgaatgaattggatgacatatgttgttgtggtcactacttcatagtaccgtgtactcctatcctattgtactaataataataatagtaagacgaaagatgactgctgggaatgaatatttggttctgctatttttgtgttgattttctactgatga

SEQ ID NO: 82735 - DNA, 1211 bp, Zea Mays
ttaattacaaaatattttctcataacagtataacacacatttatacatgagttgttacggtattatatgtttccgttgcaacgtagggtcactcacctagtattgatatatgaatatacaaataagccgtagtggaaagtgtgatgttgggccaagcctgaaagcaaagagtgggccgggtggccaggaccaacgacttttccatagtcgtgctcgtcttcgtccacctcccgacccgactgagtagcaagcaattctccaaattagggtttctttccgcttgctttccagtttgcggcatcagtcggtggcgcctgcgatggagtctctgttcggccaatcgcagcggaggaggagggcgggcggcagcggcttcgaatcgctcaagcgtctgggtcacatctcacccgctgtgtacctcaccctatgctccgcgctggccttctctgcactcggcgcgtacctccacatcctcctcaacgtcggaggcgccctcacgaccgtgggatgcgtggcctccatcgccttcctcatctccctgcccgcttcacgggaccaggagaggaaccgcttggcgctgctcatgtctgccgcgctccttcaaggcgcgtccgttggtccgctcgtcgaccttgttattgacttggattcgaggattctcgtcactgcgttcgtcgggaccgcagttgcttttgcatgcttctctggcgctgccatcatcgccaagcgcagggaatacctgtacctcggcggtctgctttcatctggcctctccattcttctctggctgcagtttgctacttcaatctttggccacaccagcgcgaccttcatgtttgagctctactttggcctcctggttttcctgggatatatggtgtttgacacccaggagatcatcgagagggcgcaccgtggggacatggactacatcaagcacgcgctgactctcttcaccgactttgttgcggttcttgttcgaatccttgtcatcatgatgaagaatgcacaggagaaatcccaagacgagaagaagaggaagaagcggtagctgctgaatgaattggatgacatatgttgttgtggtcactacttcatagtaccgtgtactcctatcctattgtactaataataataatagtaagacgaaagatgactgctgggaatgaatatttggttctgctatttttgtgttgattttctactgatga

SEQ ID NO: 82736 - DNA, 1480 bp, Zea Mays
atagtctactgcttgggaagggaaaacgggggtgcatttgttgggatttttccaactcaattccatccaatccaagagcaagtttcaccggattgattccccaccgcacccgaccacaaatcccaccaagcaaaccctaatccgtcggccatgtcgtcctcccccgcggcgctgcgcttctactgccaccagtgcgaccgcaccgtctccctcgcccctcccgcatccccggacgccgacgtcttctgcccccgctgcggcggcggattcgtcgaggagcttcctcccaaccctagccccgcgcctccggccgccgccttctttgccccgccctccttcgacatccgccaccccagcgacctctccgctttcttcggccccgcctcccccgagccgctcgccccaggcctcttcgatccctccaacttccttcacgaccacttcggcggcctcctctccggcggcgccaccatccagatcgtcctcgagggtgggcccccgcccccaggcctcaactttgccgactacttcgtcggctcctccggcctcgagcagctcatccagcagctcgccgagaacgaccccaaccgctacggcaccccgcccgccgccaaggccgccgtcgcctcgctccctgacgtcgctgtctcggccgacatgatgcaggccgacggcggcgctcagtgtgccgtctgcatggacgacttccacctcggcgccgccgccaagcagctcccctgcaagcacgtcttccacaaggactgcatcgtcccatggctcgacctccacagctcctgcccggtctgccgcttcgagctgcccaccgacgaccctgactacaatcacacccatcagcagcacgcgatgcagctggtggccctcagtctcagactggatatgatgatctcgactgaggcctcaatagccgatcttggaaacaaataggctatacaccaaagatgagagatgataccgtcgtgtaccaaattaataaatgtgcatcagaagtatggagtcctttaggaacctctgctgactgttgatggaatatggttggtttgttgacactgtcagtgcattgtttctgaagggatatgggcctgttaatttaaaatttgtattcactaatggttgggggaggaacggtggagaaactgagtcatgtatagttgttccttttgcaattgctgcatggtttttttcctgttccataagtcatttggcctttggatacttgatttcaaatgattcctgggttgtgtgggagtgaaatgtaggcaaattactagagatggcaatgggtaaatacccaccgggtattactactccatacccacgacaaaaaaataatcccgccgggtcattcatatacactggtgggtcacgtgggtatgggtcacccatcgggtcacccgtacccacaaaaattaaatatctatcaaaatagtatattatacaaatatcaagtatatccatctaa

SEQ ID NO: 82737 - DNA, 1472 bp, Zea Mays
atagtctactgcttgggaagggaaaacgggggtgcatttgttgggatttttccaactcaattccatccaatccaagagcaagtttcaccggattgattccccaccgcacccgaccacaaatcccaccaagcaaaccctaatccgtcggccatgtcgtcctcccccgcggcgctgcgcttctactgccaccagtgcgaccgcaccgtctccctcgcccctcccgcatccccggacgccgacgtcttctgcccccgctgcggcggcggattcgtcgaggagcttcctcccaaccctagccccgcgcctccggccgccgccttctttgccccgccctccttcgacatccgccaccccagcgacctctccgctttcttcggccccgcctcccccgagccgctcgccccaggcctcttcgatccctccaacttccttcacgaccacttcggcggcctcctctccggcggcgccaccatccagatcgtcctcgagggtgggcccccgcccccaggcctcaactttgccgactacttcgtcggctcctccggcctcgagcagctcatccagcagctcgccgagaacgaccccaaccgctacggcaccccgcccgccgccaaggccgccgtcgcctcgctccctgacgtcgctgtctcggccgacatgatgcaggccgacggcggcgctcagtgtgccgtctgcatggacgacttccacctcggcgccgccgccaagcagctcccctgcaagcacgtcttccacaaggactgcatcgtcccatggctcgacctccacagctcctgcccggtctgccgcttcgagctgcccaccgacgaccctgactacaatcacacccatcagcagcacgctggtggccctcagtctcagactggatatgatgatctcgactgaggcctcaatagccgatcttggaaacaaataggctatacaccaaagatgagagatgataccgtcgtgtaccaaattaataaatgtgcatcagaagtatggagtcctttaggaacctctgctgactgttgatggaatatggttggtttgttgacactgtcagtgcattgtttctgaagggatatgggcctgttaatttaaaatttgtattcactaatggttgggggaggaacggtggagaaactgagtcatgtatagttgttccttttgcaattgctgcatggtttttttcctgttccataagtcatttggcctttggatacttgatttcaaatgattcctgggttgtgtgggagtgaaatgtaggcaaattactagagatggcaatgggtaaatacccaccgggtattactactccatacccacgacaaaaaaataatcccgccgggtcattcatatacactggtgggtcacgtgggtatgggtcacccatcgggtcacccgtacccacaaaaattaaatatctatcaaaatagtatattatacaaatatcaagtatatccatctaa

SEQ ID NO: 82738 - DNA, 2044 bp, Zea Mays
gaagtttcgtgacttgaggaagaatagtctactgcttgggaagggaaaacgggggtgcatttgttgggatttttccaactcaattccatccaatccaagagcaagtttcaccggattgattccccaccgcacccgaccacaaatcccaccaagcaaaccctaatccgtcggccatgtcgtcctcccccgcggcgctgcgcttctactgccaccagtgcgaccgcaccgtctccctcgcccctcccgcatccccggacgccgacgtcttctgcccccgctgcggcggcggattcgtcgaggagcttcctcccaaccctagccccgcgcctccggccgccgccttctttgccccgccctccttcgacatccgccaccccagcgacctctccgctttcttcggccccgcctcccccgagccgctcgccccaggcctcttcgatccctccaacttccttcacgaccacttcggcggcctcctctccggcggcgccaccatccagatcgtcctcgagggtgggcccccgcccccaggcctcaactttgccgactacttcgtcggctcctccggcctcgagcagctcatccagcagctcgccgagaacgaccccaaccgctacggcaccccgcccgccgccaaggccgccgtcgcctcgctccctgacgtcgctgtctcggccgacatgatgcaggccgacggcggcgctcagtgtgccgtctgcatggacgacttccacctcggcgccgccgccaagcagctcccctgcaagcacgtcttccacaaggactgcatcgtcccatggctcgacctccacagctcctgcccggtctgccgcttcgagctgcccaccgacgaccctgactacaatcacacccatcagcagcacgctggtggccctcagtctcagactggatatgatgatctcgactgaggcctcaatagccgatcttggaaacaaataggtatgaacaacaaattgcagttattactactagggttcatcgcttgctgttatctgtttggcgtcacctacctatagttcaggaatcaggtagcaccatgcatttactatcgcatttgattacggttactgtattgactgccaaagaaaaagaaaaaggctctattgtgccatcattgttctacaaaagcgtattacaagagtgaatgaccatccttgttctatgtttacctgatattaacatggtatgcacttggcgtggatgataaccaagattcatctagggcaatcaatgggatgtaacttgcatgttgtaactgcgactatcactggaccgatctgttcttctcttgggttatcagtgtgtacggaagtgctattgatttagatgtctactatgggccttttgtttatctttcttggtttggtttgaaggtatagagctgtcaaaagggtctgcatttgtttaaccgtgtttgatttagttgtggtaacctgcaagctgcagtaggttgaccactaattatgttttgctcttgtaattctgtaggctatacaccaaagatgagagatgataccgtcgtgtaccaaattaataaatgtgcatcagaagtatggagtcctttaggaacctctgctgactgttgatggaatatggttggtttgttgacactgtcagtgcattgtttctgaagggatatgggcctgttaatttaaaatttgtattcactaatggttgggggaggaacggtggagaaactgagtcatgtatagttgttccttttgcaattgctgcatggtttttttcctgttccataagtcatttggcctttggatacttgatttcaaatgattcctgggttgtgtgggagtgaaatgtaggcaaattactagagatggcaatgggtaaatacccaccgggtattactactccatacccacgacaaaaaaataatcccgccgggtcattcatatacactggtgggtcacgtgggtatgggtcacccatcgggtcacccgtacccacaaaaattaaatatctatcaaaatagtatattatacaaatatcaagtatatccatctaa

SEQ ID NO: 82739 - DNA, 1001 bp, Zea Mays
acgtcgttgttcttcaccaaaccgtgggcggttgagctcggacatcaacggtgaaggcccgcgcacgcagtcgtttgcatcctagttttctccctgctcgctgcgctcatatcgtcgtcctcatgctcgttccgcgacgccgctcccagtccacagctcgccggcttccctgtgcgaggtcgcggatgtcgtcgctcggcccttgtgtcttgccgagctcagcaccgccgctaggccatggcgcacggccatcccatcccggtcctcctctgcatgctggcgtttttattttcgtctcctccaacttcgcctagtcgtcgtcttacagctcttccacctcgtcgcgcagcttcagcatgccgttgagttttgccttacctcgctgtcatggtcctctagcgtgcgagctccctctctagccatccccggcatcgtcgtcgtttcagcagctttgtcgcaccttgtgttcgcaccggaagacgaaagagaagcaccagtgcaactctcgtcaagtatcggtgatatgcgcaagctagacagcgtcgtcgatttcatggtttcaaatcggatttagctttggtgtgctagttgatcacgtgatgtagaagacgagctgagtcaaccacaagatgttgttaagcgtgggcttcttcgcaaggcgatgctgatggacgaacttaaggatggatgacccggacaagtgttagaccaaaagctgatcgccaagtggacgtcatctaacaaacactaacctagtgttattctaggcaagccccggtgcatgcaaccccttccttgtgtttttaaatgatttttacacacattaagtctagtgaaaggtgcattaggtttataggagttacttggaaacccattgatgcattggctaccttgaaatccgttccttttatagatacttctggtgaagtatcaaatatgatttacaaaatgcttagatcttgcggatagaggttgtcctttgcaataatgcttagctcagg

SEQ ID NO: 82740 - DNA, 2208 bp, Zea Mays
ttcacaagttagtttattacctgaatcttctagcctgaatctagcatttttctaatctagatcattcacttgacctacactaggttgcttttaaaatccaatttttgtttcacttgttatctacgatgaagggcagcgatccagtcttcatatccgagaagtaacggcgatccgaatcgattaatacccagctggggatctctaaccacacgacatatgtagcacttaacccttgcatatgtcaaccattcccacggatcctccaccacatgaactggtccgcgctacccgggagcacattaccctaccatccagcctcttgccaggagggtaactgctactcccaccatctcccacgcccagtgcgcggttgtcttttcacgtatggaatagccgggttcaggcttacccatgacgaggtatgtggctagttaaaaggtcctagatcatcaggccaacaatcggtacggtccttaatcgacacagacgggcgacctttcctgctcagcgtctggtcccattttaaactattttaaaattttggcgcctgacagaggggccatgcctggataatgaatttatcaacgtcttgatgccttcattatcccaagcccattttctttttgtaaaaacatgagtcatagatgaaaaacatttttcttagtctatcagcatgactaagcatctctagcttttataaaacaggtgataaggtatggtaatcaatctttcaaggatggtaatgcatcaattgtttaatcaatcaactcctatcacctaatgcagcatataagtgataaaattttgtaaacacaagggaggtggcaaatgcaccggggcttgccttgttgcagagaagattcaaaaccttattctactctggtaagtagttagatgaaactccaccgctggatcaacatgcactgaagtgaactccttcttcaaacatcacttcttctacgtgttctacaaatcaattacatgtagattaatgcttgctatggtatggaaatgcatttcataaagaaggtaacaaataatatatctagaatacacctacaacatataaatatataaatcgccaaaatatgaattaagagcgccgcactaccggatgatgatacgatgccggttcgacgagaaaattcacgaacacaagctaggagaggacgctggcgctgctgctgttctgacgaagtaggatcaacccagatggaaaggaagcgggcagggcctgagcatggtgcagttcacggctgctcaccaacttggcgaagtccaaaccaaggcgagtccgacgagttcagttggggatgcatcgggattgaagaggtgctgggcaccagggcgagcgcgctggggtcgggcgacctcgatctgagagcgagggagaagctcagtgacggcgaagtctggaggtgacaaagtgtccgagcgcgcgatggagggcgagggccagagcgcagcgtcggtgtgcaccagaaggcagatgtcgagcctacagtgaagaaggggacgatggcgttcaacgagatggacggagctcagtgcttgtaggacggtgacatgacaggactgtagggcaagcggcttcgtgacgagcgcagaggtagactatggctgggtgttgagggcactggagtcaagtgctgctgctgcaatagcgtaagggaggtcagggaggaactgtgaatgggaggctagggtgctgatggactaagcacagggttcatctcggcaaccggcaagctccaagcgctgtgatgagcggagtcttggaagccgcatggtgtgaagagcaagaagtaaacctgtgcgtggaatgtgaggtggcgtgaaggagcttgcagcctgatggcatgggataaggatcaggtagcttgaattaggagaagcgtacgtgacccctttttcaggaagccgatatgtgctggaagcctggaacctggaaggatggagagatcttggacgtggcagattgagataatcacagggagatgagcgttcccagtgcttgtggtggggataaggatgagtgctggcaaaatttccaagaggctagtgtcggctggaacctaggagaaacatcaagatgaggagaggagacgtaggtggcttccctcactagcaaaaagagtacgctaagaatataacagggagccggcgtggatattggataagaaagagcgtgagatacatatgtaatcg

SEQ ID NO: 82741 - DNA, 1588 bp, Zea Mays
taaactaagttctatactccactcatattatcgcacttttgaaaaaaatttgacgtagtgaatgcattctaggtatatcaaacaagataatgcaaatgcttatgatgacatgtcagagttttagttaatgtaacaccaggggtgttacagtcttcccccctaaaaagaaatctcgtcccgagatttaaaactctaggctaggtaatggaaaagaaaatgcgtcactggcttatttcccattacacctataagacaggggtgtgtccctattggtttatatcagaaataaactacacaaagggcactagaaacttaggaacacgctcttccagatactcttccgattcctatgtggtttcatcttccatgggttggttccactgtagcttagaaaacttgataacttttcttcaagtgaccgatacttttgatccaaaaccttttatggaatattccaattaggttaaatctggtccaaggttaacatctgaaatcttaataacatgcttgatgactcaaaaacatttctttaactgggacacgtggaacatgttgtgcattgttgacaaattctttggcaactgtaccttataaactactggtccaccaaatgaactgagttccaaggcttcagagataggaaaaggtagtatagaaaagcaaagataggtagcatgaataggatggatgaaacatgtactaagctattacatagggggtttaacttaaaattgtatgtcatgatgcatgctcgtcctattcgtcctcacaattcttgccaacacataatggctatcacgttctatggcggtggcaatcctacttacttcgtaattgatcactagtcgcactttcctagggtttagttagtgtacctgcagaaaattgcattatagttgcgggttagtggttagcatcttaaactaagccaccttatagtccttaaccatatactatttgcacttcgactattaggacttgcttattcattcttaagtttttttttttcaaaataatttggactcaaaatccttttgaagcctatcaaaggattactttaatatccatgataatgggggatcgctccgataccacgctgtgacagccctcccaagttatcaggcccacatgcaccaatccttgccttaatggcctcagatggctgtgcacgtgtaccgggtaacttaacaaggctaccgagttcgtcaactggaactcatcatcccaaggatctcccacataacaggtatattacagtaatcacatttgatacacacacattggagatagagcggaagacttttacaaagtacactttacattccagaactcaagttttacatggtagaaagagatgtatttattacaagtcttgatagtactcaaaggacataacttattacaataattggaagggtgaagcctttccataagagaaatataaaaaccttctaagcttcaagtcctccacatgaagtaactaacccaaggataagggaataaaacttctcctacaaaaacaacaagggataaaaccctgagtacgcaattactcagcaagacttacccgactaaagaaaagactttc

SEQ ID NO: 82742 - DNA, 1359 bp, Zea Mays
caaagtttaaaacgcttattgtgtgaggagtggctaattgaataataagtctagtgtctctctcatatagctgataaatacgaccgtggttatattaaatgattattaaaatgcatcgcaggtagtatgtagtgggtgcatatgtcgaataggtttaaattggctctttgctgagaagtgaggagaattaatagcgtgaagaattgatttattaatccaaacgattatccgataaggctgtcatcgttgatttggtacgtgaattaaccacgtgatgcggagaaccagaattgagttgaccacaagatggtgctgatgaacggaattgaagatggacagacgaaacaagtatcagaacaaaggatggtcgtcaagtgatcgacgtctaacaaacactaacgtactgtttatcccaggcaagccccggtgcatgcaaccccttccttgtgtttttaaataatttttacatactttaagtctagcgaaaatgtgcattaggtttataggagttgcttggaaaccctttgatgcattgcctaccttgatatccatacctttatagatacttctgatgaagtatcaaaatatgatttacaaaaaatgcttatccctgcttagaccttgtagatagaggttgtcttttgcattaaggcctagctcaggggttatcttaaggaaggatgacttctacctgcaagaatattttcattgggagcgtggtgggatcttactgcaaagttccctataatgctcttttcatcctaaggaactgttgggggccttcgtcctccgaaggtcctcaaaaacatgatttgacaatgttttccaagtggattatgtgaacaggtaccttcggactcagaattacgaacatgaagtgcggtcaggacgaagcctgaaccagacgaaggacgggctgattaccaagctccacgaaggatggtgcacagccgaagctgtgcgcagggaagcttcgtcgcgatagcagagaggggaaccgacttaaagatgaaaagactacgtggaccttgtcagatttccataagtcattgacaaatgtaatggacataaatgtaattttacgtgggctgcgtcccgcgtctataaatagatgaacagtactcccgtactgttcacgctgacttggcatttgcttttgcgtcacgcttgtactttttatcttctctcaggaccgaaggtacatttgtaatttgaaatcatttctatttttccatgttaataaaatagaaatgattctatgatgatgcttatattatatttcatgctttatatgaatccttcgtcattacttgttatgtttacgaaggtatgtctcttatgaccttcgtccgaaactca

SEQ ID NO: 82743 - DNA, 2155 bp, Zea Mays
ttcagaccgcaggtaactttatcagatttcgaatcgaattaaactgtgtcacaagaactgtcgacccttttgttatcgctaaaaatctcgatccaaaaatatctgtgattttccattataaaaaaaaagagaaagaaataaaaaagagagaaaaatatcatcgctctttcctatcagctgcagccgttctccctgattttttccaccgcccatgggcctggatattttttttctcagctctatcctttgccgtgcgtgcctggccagctcgtggaaaaatctcgccgccgcctccattctcctttttctcgcagcgccgcggcttccctccccctgagctccctcagccatgacgcgtcttcctccctgcacacgtccttctgctcgatcccaagcttcctgtgcgcgcgctactcttccttcccatgttactgcgcgctctaccttccctcccatggcgtccatctccctatgcttgccccttcccctgcttctcctccgtggagctccatctccttgcgcggcactccctccagctccttcctctccctctcggttctctgttggccggtgctctactcctcccatccacgacgtgggttctgctccctctgctcggagtctcctacgcgcagctcgccaggctctccctctctcatggcgagcgcctgtgctccctccaccctgctcgcatggccgcgccggctccctccagtcggccgcgcgcccagccaaagtcccctgcgcgcagctcgcgccctgctcgcccctcttctcgccgagtactttccccataaaatttgctcgaccacggtctcgtcaaaccgtgaagcttcctcgccgtgtgctctggcatcggctgtcgccaattttgccataaagttcacgagcactccttgctcagtttgtttcgcagtgggctatttctccacatttcaattccgtgctgcttgccccgtgtgcgctcgctccagactcgatctcgtcgtcattccgtgtgtcatcaagaaatcccaagaatcgggcggattcgtgtcagttgttggaacggtacgtgaattaaccacgtgatgcggagaaccagaattgagttgaccacaagatggtgctgatgaacggaattgaagatggacagacgaaacaagtatcagaacaaaggatggtcgtcaagtgatcgacgtctaacaaacactaacgtactgtttatcccaggcaagccccggtgcatgcaaccccttccttgtgtttttaaataatttttacatactttaagtctagcgaaaatgtgcattaggtttataggagttgcttggaaaccctttgatgcattgcctaccttgatatccatacctttatagatacttctgatgaagtatcaaaatatgatttacaaaaaatgcttatccctgcttagaccttgtagatagaggttgtcttttgcattaaggcctagctcaggggttatcttaaggaaggatgacttctacctgcaagaatattttcattgggagcgtggtgggatcttactgcaaagttccctataatgctcttttcatcctaaggaactgttgggggccttcgtcctccgaaggtcctcaaaaacatgatttgacaatgttttccaagtggattatgtgaacaggtaccttcggactcagaattacgaacatgaagtgcggtcaggacgaagcctgaaccagacgaaggacgggctgattaccaagctccacgaaggatggtgcacagccgaagctgtgcgcagggaagcttcgtcgcgatagcagagaggggaaccgacttaaagatgaaaagactacgtggaccttgtcagatttccataagtcattgacaaatgtaatggacataaatgtaattttacgtgggctgcgtcccgcgtctataaatagatgaacagtactcccgtactgttcacgctgacttggcatttgcttttgcgtcacgcttgtactttttatcttctctcaggaccgaaggtacatttgtaatttgaaatcatttctatttttccatgttaataaaatagaaatgattctatgatgatgcttatattatatttcatgctttatatgaatccttcgtcattacttgttatgtttacgaaggtatgtctcttatgaccttcgtccgaaactca

SEQ ID NO: 82744 - DNA, 276 bp, Zea Mays
gccacgctccaccggcaatgggttgagaagaagagatttgtgggtcctggaatccgctgcaccagctaccctagctagggcttggcagggacgggagtgcttgcacggcgctggaggaggaaggtcagcaggaggcggcccggcacggccctgccgaaaccctattctacctccccctccctgaccgcctcgtctgatcgtctcgcgaacacgaggggttttgcgggtgaggaggcggagtcgaccccaccgaccaaaggaagacggagaaaggcg

SEQ ID NO: 82745 - DNA, 662 bp, Zea Mays
accagattcttctcctatattgaagagtgcaatgtagctcttcgcatgcaggagccttttctgcttcttggacggtgtagaggcagtcagagcatcatcttgggtttttcttttggtggaggcgggcgttgaggtttcattaggttcttgttttgaaggagaaggtgaaacacttgtgttcctaactctggagggcttttttgttgagtctttggggttgtttggcaagggtgtggatttgggggtagcaattgcagtggcatccttggtgggcgttttagcagatctgtgaaggggtggtgtgtcagcaagtctagatttgtgctttcctttgttttctcgagtggacctcctgaggtttggtgtgtgagcactggcagctgcggtgttcctggtctcccttccatcggcaagcttccttgtggcagttgcagaagcagcagctggaggagaagaaggggggggaggggcatctcctcctcctcctgaccgggtattagccatggatcagtagtagcagcagcagatcaacacctgggtcagttcaaccgtttgttcctccgaggtgcgaatcacgcccccgcccgcggcaccggcagcgaactcgtcccccaaaatcgccggcgagcccgaaccccaacaacccgaggccactacctctg

SEQ ID NO: 82746 - DNA, 8015 bp, Zea Mays
tgctttgagagagaagcagcacgccaacactgaagcaagaacaatacaaaacaaaagcatttagcagcaaacatgattaaaataaaaacaaaaaaaaaattttatctaaccagagccaaattgaatgcatgcagtatgcccttaggctcctggctgatttggtgattcttcaaaatatactcaagaaattcctcacataaggatttcaccttctcctgcaaaatttgttatgctccatccatgaaagcaatcaacttcgattgaaaattgagtacatgaaataaagtaaagtttcagttttgttatttgacagaaaattttagggtaaaatgttctatgatctggatgcatccttgctacaaataccgcatgtcattttgtatgttattatgcaaggagactgcaactatctttaatagtaacttcagtttaaactcattttatttgtgctaatccaagttgcaaaccatctccacggtcactaattgctcgtcgggacgcgatgaacacgtacgtccccgacacaacgcgcccaaggacgaaatgaatatcaatctcaacatgcttcgtgtgtgggtgctggacagcgttgacggagaggtagacagcgctgacgttgtcacaaaagacaagtgtgctcctggtgagggtgttgtgaaggtcctagtagagctcgcacaaccagctcgcctcagccatcccgttggtgacggcctggtactcaaccttggcacaagagcagaaagatcatggaggacggccagatactcaaccagctcaccccgttggtgacggccaagtgacggcttggaggaccaagagatgaggttggccccaaaaaacactatatagtcagaggtagaccgacgggtgtccgtgtactcggccctagcagagtaggtctagattgttagaagtatatttatgttttctacatttcctcattctataagggcttagtaccggtgtataactgtatatataatggccttagggacttatattgaatacaagtgctattcatagcatggtaccaagccagaaattagggttagtttccagcctggtatttcctacgcacatgtttgctgccaatcttctcatcttgaagattgtcacccgatttgtcgtcgttggctcgttcactcatgcacatcagtagggagagtgtgcattcctccatcggaggcatggtatttcatctcctctgctttggcctccgatggtttcttctcctcggagggtgtcgtctctagcttgtccttctctacgaactcgggtttcttctctatccgcccactaggacgtggttcctctcgcccccgtcagtcgtcttcctgccagctagccagccatcctcccgctcgttcgttgctcgcccgacggcagtactcccgcccgcttgttggccagcacaccagcctgaatcttcttctgcccgcctgcagaccatacgactgcatgccagccatactgctcactcttatatgatctgtaaaaaaactactttcgccgcttattcctctacgctcctgtcgtcaattattgttgctcagctatggcaccatcttcgtcttcaccaaacgggggtgccccattacaagttgtctgctcatctttgatggcaccaattatcgtgtttgggttcctcacatgtggtgacatatgcaaggtcttcgtctatggaattttctttcatgtggtgacatgcaaggtcttcgtctatggaattttctttctcgcgagcttccctgtcctccttgtcctaaggcttctaccaaacatgtgatattgaacatggtgactcttaaggcaaaggaccagctgcttacatattatgataatcagttggcatcatatgaggatgcttgagctggttccattcttattgctagtatggatgatcactttgttgcaaaggttattgagtgtgacagttctcatctgatgtgaacccttcttcgtgatcactacaaacgtactagtcactcatcttgttgtcattcgttagaagcactccttacgacgaggtgattctacagttgatgagttctacagtcatatgtttgccatctggtgttaagcttgatactcttagtccacaaatctctatcactactcctataaagcaccagtttcgatggtcgtcctgcatcacgcacgaagcgcataagtttgttcccctccacccgataagttgattcccctcccacgcttctcgcctaacaaaccagactagtgtaaccaaccatgcaaccaccacgagcgcttcctcctcatcgttcccgtccaccgcttctcgcctaagcctttatctattgcttgattgcatgtgtaaccaaccatgcaaccatcacgagcacttcctcctcgttgttgccatagtatattaacccccaactttacatctcttttcctgtctccgcctgcctcaccaagattctttcacaccgccatagaggacatcgagcaggatggacttgctacttgccgccgccacgccccactcgtggcgccgcctttaccttccccatcgacaagcgtatcaaaccattgacgtgactcttcgtcgccatgcgcttctagaggcaacagggtaggaacaaccaagggagaggacggcaaagcgtcatcgccgccgatgcgtgactgaacaaccgagggagaggaggcgctctagatctcgagttgagtggtgttttgtattggttgtttgcaaagaatttgagatatttatgttgaggaggcagcgctctggattccgaattgagttcagttttgtattggttgtttgcaaagaatttgagatacggcaacgcacaggcattgtactagtgtctcctagcacatgtgagttttgtctccgtcagaagagtgaccatgagtttcttcgcacaaatgacttcttgacctgtttgtgtgatgagtttgagcctcttcatgcccagttacttgctcgtcgcccttttgtatctctggtggatgcccttgtcgatgttcgcaacgagactcatcttcgtacaggtggtttattgtcttcttcggtttcgttttggctacttggtctctgtcttcaccttcccagacatcattcgtcacccttgtgtgaatctggtggatgctcttgctgatgttagcaatgagactcgtctttgttcagctagtttattgtcttcttcgatttcattttggatgctcggtcttcatcttcgccttcctagtatattgctcccccgtcgttgtagatgtcatcggcatcttctccttctgcacatggaaagggtagtggttttcattgtgatcattgcggacaggatggacatgtagagtttttctatcgatcagcttactgatcatgaatgtcgtgttattcttaatcatgatttctgttatgttcaggatcgttccacgggtcgctgggttgggtactgactctcagcacctttgggatcttgactggcttcatcttttccttctgctgcacttgccagctctatcagctctgcattagctgctttgtccacgtcgtcttttgctcagtagcatcattgtctaggtcatctttgtggcactcatctgtctacttgattcattgtggtctcctaggttcggtttcaagtcatgagtccttagctcagtgttagggttttcaactgggcaagcagattcaccttccttatcattctagtgagtcagcgtctgagcgtccttttcatcttgtccactaatgtatgggtggactccctttgcttcaaaaggggcgtcaacgatattatattattttatagatgattttttcgccacacgtagatttattttatgaaaaacgtagtgaggctttgttcatctataagattttctctgctatggatcgcactcaatttggcacatctattcgtgtattttgtattgattctgtaggaaaatacctttctagggctcttcacaaggttcttgttgcgcaaggtacgcttgctcaattttgttgccctgatgctcatgttcaaaatggtgttgctaagcgcaagcattgtcatcttcttgagacttctcaagctctcatgcttgcttattctaccccccccccccacttttagactaaggttgtctctactgccacttatttgaaattcagccttcctcggctcttcagggtggcattccttccgagcgcctttgtggcaagatgctgattactccagccttcgtctttttgcttgtgttatgtgcctcttgtggatcgcgagcgctctaagttgaatgcacagtctactaagtgcatcttccttgggtacagtgttgagcataagggttatgttgttgggattcggttgctcgtcggaagaggatttctcggaatgttgtctttattgagattcgtcctttctatcctagtccgtctacatgtctgatctttggttgatcctctgtcttccctttcctgtctatgaacgactctgctacagcattgtgtctgtctcccacctaccactattgtgccttctcctcaatgtgccctcgtctgttgcgcctcctcctatgcccctctatgacttattcatagacttttgttctgattcctgactacattgtcaaacctcctgcgacaaaggtctatacacgaagacgtccttttgactactccatcggcttcctctggtgtgtcctcttctcttgatgtttcagcctctctgttgattcatcttcttcggctaggccatattcttctggtgatagctctcctaatttcattactcattgtggtcttcgtactcgtcaacctgtagatttctatggtttcggcctcattacatggcaaggttttaccggatctgttctttctgagccaacttcctatcgtgatgttattcttcatcctgaatggcaactttcaactaagctatctgttctacctactaagctatttatcttaacaatgtgccctaagcccagatggtgaaaaccaggacaggaggaggaattgatcaacctgcacgcatacgtcaaggaagatcatggaacagttcggaatcacaaatgaatcctccacctgctgggttggaagcgttcctcgtcgcttagacccagttgttgcagaatatggcgaacattatggccaacatgcaggctcagctcaacaacaatcagcagcaccaacaacagcaacctcccatggacaagcacagagagtacatgagtcataagcctccaactttttccaactccccagatgcattgcaggctgatgactagttgaaagctatggaaaagatgcttaatatcgcacaatacattgatcgggataaagtcttttatgcatcaggtcgcctctctggcctcgctgctgattcgtgggatgcctattgtgcagcacagacaccatcacttgggccgaattctcaacaaacttcataaattaccacattcctattggcctaatgaagatcaaggagttcctttcactcaagtagggaggaatgacagtaagcgagtacagagacaagttcacccaattgtccagatacgctcctgaggaggttgcagacaacgagaagaagcaggagttattcctggagggacttattgggccactccaatatcagttgatgtctcctttccatctttccaaagacttctaaacaaggctatagctctggaacacaagcgtgttgagctaggtgagatgaagaggaaggctaccaaccaagggcatgctggtattagtactcgtccctgtttgtccctgttatgcttcatcgcaaggcaccccaatgcttggcagtcctaggcaaccgaattccagaagtcagtccctcaccaatcaagcattccggtgggaccagttggccctaatacttcaacaaacaaggcatgcttgaaatgtgcacaaattggtcattatgccaacaactgccctaacaaggacgcctacaccactccagctccaatgaagcagggtcaatcctcggggaataaaaatcaggcctttatcaatcaatagaggacaacaaaacttctcgcgtggcaaagtcaaccatgtggaagcggatgctgctcctgaaaatcccgaagactcagaagttgtgcctggagaaaatgaagaaaactaggaagaaaatgaaccataaatcagagttctcttatctctgtcctgatttcgaggacgagattcttttaaggggtaggatttgtaatacccaaattctatgaataaagatgaggataagagttatacttaatgtgggtttttttagtcatcatgtttaagtgatcaacttaattaataaatcatgttgattcattttgattgttgcatcttagtacaaatttggattttgaattctgctgaactgcagttggaattttaaaatcgaaaatagaatttaaaatggaaaactgaaaacaagaaatagaaacaaaaagaagccacccgggccgaaacccgccggcccatctgctgccctagcacaacccagttcgcgtgcgccttgtcccactatcgggtgggccgtcctcgtcaatgcccagcatgtcccaagccgtcgctccattcaccgccatgtgtgacccaaccactagaactatccccctccctcgcgtcgtaacaaacccagtcggagcgtgcgattcccgcggccgttgcaaccgccatcggctggcgtccagcctaggagacgactatatatatgcccttgcgcctcatctcctgggtcatctcgcatccacgaattcaagcatgccgagagcaggggagtcgtcagcatgcgtcagggtcaagaaagagagggagtctgccgtcgtggtgtgtcgtctacgcaatcgttcagggttcaagggtcgttgaaggaggaccacgggagccggtgggtcgcgtacgagaaagccctcgggcgcgagggtcaccgaagccttgtgaatcgctcactagagttgcggatcgtcgccgagccacgccacgacggggacgacggcaccagcgccaccgctttggaggaatttgtcgccggtgtaggcgcccaccgtggatccgcttcacaacgtcgtcgagcatgcattgttgcagtatatggtgattgagaagctaggtcctcatcgatctgtgattgctactgttgcctcaatgattcttatgcatcggcagtcatgaacaagatagcaatggtgaatgtttctatgatttctttcttgtgacttatgctgaggattacgaatttacgacttgactaatgaattagcaataaaagtatagatgttctagttcaatgctgataaattagacacgaaacatacaacaaaacaagaactatcatggatgataccaatatcagtttcatgccagcacacacacatggagatggcaagcactggccatgacccctgaagctgaaagaacaatatactcaaaataaagtagctggtagaaaccagcaaacatcactgttcttaaggcgtcgcctaggcgtccaggcggaggtccaacgcctaggcgccttgcctgcctacctcgcctaggcgtccaggcggtggtccaacgccttgtctcgccttaccgctttaaaaaccattgcaaacattatggattaaagatgacaattgagaatataatcacatgtgcatattgcttaatataaactagctagtggcaactgttaaatattaatagattccagatgatacactaataagataataaattatgagtcaactttctcatttttaaaagcaatatttatcaagaaccaacttgacaaatgactagggaaaatacacatttcacacatggttcgaggctccaagctgagatatattaaccatcaaaagcctaagagtgccaaattctatcttataccttatgagaatttaataaatgattttacacaggattaaaaaataaaaagagaacatgaagtcatggagggggcaatagagttaaatatgtgtagcagtaccggcagttgcagcaacttatataacttcgaaatctctggcttgagttgaacgtgtagacctttttg

SEQ ID NO: 82747 - DNA, 3083 bp, Zea Mays
ctcagtccctccccccgccattttcggttctggcctgtggccttcccctttgcctccggtcgagtggacgtgctcccttctcattcacctccgagtggccgtgctccgcaccgctgcacctgcacagccgcgccgtgctcccttccccttcgggtcgccgaggcaccggggttgccggactatcgggcactggcttcttcaccagctcaactcgacattgccctcccctcagccgcagcaagacaagcaccatacgcgtcccgccgggcgccagcagccgatcttcagtgcgcgacagcaaatcttcagtgcatgtgtagattgctaagtgatggattcattatcagctcgttcagctgtgcaagggaaagggaggagtgaaagagatgagactgattcagagagcaactcttttgaccataatgatgacatgtctgaggatgagatgacagtgctaggtgggaaagatgctgatgttgttacagttaatgaatctgatggcgatagagccaagaaaagtcgtcgaggggtgaagatgccagttaaggttgaggggggcagcaagagcaaatccaaggtttgggaggtctgtgataagattaatgtgcccaataagtcagataaggagaatccgctattgaaggcaaagtgcaaatattgtaacaagctttatagttgaaggcaaagtgctattgaagaactgtcccaagtatcgaaagcatattgaagaaaagctagatcaaacactgttgaactttgctccttcaaaggcaggtgaatctggttgtggtctccctactatctcatctcctagagaatataatcatgaacaagtctaaaaattaaatgctaagatgattatagttcatgagtacccgtttagaatggttgagcacacatggtttaatattgtcatgaagtatatgaatctgttgtatgaatttattggtagaaagaccataagagctgaatgtataaaggtttatgagtctgaaaaagaatcattggctaaggcccttaaaggtgtggatttcatttccttgaccactgatttatggacatctaatcaaatgttgtcctatatgtgtttggttgcacactacattgataaagattggaaaatgcaatattgtgtgctgaatttttttgagttagaccctccaaaggacatgtgataggacaagctgcatatgttgtgttactgcatggaaaatagaagataagattatttctttcactctagataatgttgcaaacaatgacagtgctatacgtggtctgagggctagatttgcagctagaaaggggaatgctttcatttcaaaatacttccatgtctgttgttgtgcacacatcatcaatttggttgtcaatgatggagccgctgcattagcttctttgatagaaaacctaaggttaacagtcaagtaccttaagaagtctccatcttgtatgcataagtttgttgacatttgtagatctcctgcaattcaaattggagaagggatgaggcttgatgtctcaacgaggtggggttcaacatataagatgttgcgcactactatagcttacaaagaagctataaagacataggctgattcagatttgaattataagtggaaacctacattagaagaatgagatttgtttgctgcaattgagccaattctagcctctttaggaaccactacactgtcaacttcttcctaccccaccgcaaacctattctatccccataatgtggatgtcaaaattgcattgagagcagcaatggtttctactaattttaatatgaaaaaatgggtattgcgatgatggagaaattcaacaagtattgggaataaaggaacaatgttatggtgattgctactatcctagatccaaggtataagatgagatatattgagtggtgttttggtaagattttttatgtagaccaagttggatttgagatagaagaatttagagacgaattggaaaagttgtatgaagactatgagatgcaacatagagagagaaaagctgctcaaagcaagcttagtgcatcatcatcattggcaatgaatagatcttgtagtttgcctactgcatcatgtgagtttcagtcatacttatcatctactgaagtgaatccatcaaaaagtgagttgctcatctattggatgaaacaatgtgagtttggctgataaggattttgatttgctaagctggtgcaaggttaactcacatagatttccagtggtgtcgaggatggcaaagttcttaattgtgcccgctacctctgtgtcttcagagtctacttttcgcactgggggtcgaactctagatgactatcgtagctctctaagcccttctatggtagaggcattgatatgctcctctagttggattcgaagtgcacatgatgggagtcatatgtattgtagtatgatattcttctacttttttattctagtgtgttttctatttttttatcaatgtaatgctctatttattttttggagcaagatgaagaagacgatattgaaaacaatgcatttccaaaaagtttggtggagagcaactagatcttgatatcttttggacaattggatggttgatcacatagcaagtcgcatggatgatggactcatcagtcatcactcatggacatgttcacatggatgagcacacaacaagtggcatttgattctggaattttggatggtggtagttgcatgccacttgtatttgtgtaactgtgggctgtcacctgttaggttgtgcggctgtggcatggttctttacttcttttgtttatctcttcactgtttagacttgagaatttgtagttgcattcgtattgcagactttattgtcttactgttggagatggtagtgatgttactgaatactgaggtagtgtaactgttggagttggcagactttattgtcttgcacttttgctattggagttggtattgcagacttaagtgttatttcagtttgtgagtaatgtgactatgtccccttatgtttattcaagtcataaagtattcaacatttaacttgtctataaactgttattgcaatttgcattttag

SEQ ID NO: 82748 - DNA, 1288 bp, Zea Mays
ccgtccctggctgttggctccctcagtccctccccccgccattttcggttctggcctgtggccttcccctttgcctccggtcgagtggacgtgctcccttctcattcacctccgagtggccgtgctccgcaccgctgcacctgcacagccgcgccgtgctcccttccccttcgggtcgccgaggcaccggggttgccggactatcgggcactggcttcttcaccagctcaactcgacattgccctcccctcagccgcagcaagacaagcaccatacgcgtcccgccgggcgccagcagccgatcttcagtgcgcgacagcaaatcttcagtgcatgattgctaagtgatggattcattatcagctcgttcagctgtgcaagggaaagggaggagtgaaagagatgagactgattcagagagcaactcttttgaccataatgatgacatgtctgaggatgagatgacagtgctaggtgggaaagatgctgatgttgttacagttaatgaatctgatggcgatagagccaagaaaagtcgtcgaggggtgaagatgccagttaaggttgaggggggcagcaagagcaaatccaaggtttgggaggtctgtgataagattaatgtgcccaataagtcagataaggagaatccgctattgaaggcaaagtgcaaatattgtaacaagctttatagttgaaggcaaagtgctattgaagaactgtcccaagtatcgaaagcatattgaagaaaagctagatcaaacactgttgaactttgctccttcaaagtggacaattggatggttgatcacatagcaagtcgcatggatgatggactcatcagtcatcactcatggacatgttcacatggatgagcacacaacaagtggcatttgattctggaattttggatggtggtagttgcatgccacttgtatttgtgtaactgtgggctgtcacctgttaggttgtgcggctgtggcatggttctttacttcttttgtttatctcttcactgtttagacttgagaatttgtagttgcattcgtattgcagactttattgtcttactgttggagatggtagtgatgttactgaatactgaggtagtgtaactgttggagttggcagactttattgtcttgcacttttgctattggagttggtattgcagacttaagtgttatttcagtttgtgagtaatgtgactatgtccccttatgtttattcaagtcataaagtattcaacatttaacttgtctataaactgttattgcaatttgcattttag

SEQ ID NO: 82749 - DNA, 3175 bp, Zea Mays
cctgcacaagcacaatgcacagcacaacgcctgggtgacaccgtgagtccatgacagccgccgcccgccggtctgcccgtccctggctgttggctccctcagtccctccccccgccattttcggttctggcctgtggccttcccctttgcctccggtcgagtggacgtgctcccttctcattcacctccgagtggccgtgctccgcaccgctgcacctgcacagccgcgccgtgctcccttccccttcgggtcgccgaggcaccggggttgccggactatcgggcactggcttcttcaccagctcaactcgacattgccctcccctcagccgcagcaagacaagcaccatacgcgtcccgccgggcgccagcagccgatcttcagtgcgcgacagcaaatcttcagtgcatgattgctaagtgatggattcattatcagctcgttcagctgtgcaagggaaagggaggagtgaaagagatgagactgattcagagagcaactcttttgaccataatgatgacatgtctgaggatgagatgacagtgctaggtgggaaagatgctgatgttgttacagttaatgaatctgatggcgatagagccaagaaaagtcgtcgaggggtgaagatgccagttaaggttgaggggggcagcaagagcaaatccaaggtttgggaggtctgtgataagattaatgtgcccaataagtcagataaggagaatccgctattgaaggcaaagtgcaaatattgtaacaagctttatagttgaaggcaaagtgctattgaagaactgtcccaagtatcgaaagcatattgaagaaaagctagatcaaacactgttgaactttgctccttcaaaggcaggtgaatctggttgtggtctccctactatctcatctcctagagaatataatcatgaacaagtctaaaaattaaatgctaagatgattatagttcatgagtacccgtttagaatggttgagcacacatggtttaatattgtcatgaagtatatgaatctgttgtatgaatttattggtagaaagaccataagagctgaatgtataaaggtttatgagtctgaaaaagaatcattggctaaggcccttaaaggtgtggatttcatttccttgaccactgatttatggacatctaatcaaatgttgtcctatatgtgtttggttgcacactacattgataaagattggaaaatgcaatattgtgtgctgaatttttttgagttagaccctccaaaggacatgtgataggacaagctgcatatgttgtgttactgcatggaaaatagaagataagattatttctttcactctagataatgttgcaaacaatgacagtgctatacgtggtctgagggctagatttgcagctagaaaggggaatgctttcatttcaaaatacttccatgtctgttgttgtgcacacatcatcaatttggttgtcaatgatggagccgctgcattagcttctttgatagaaaacctaaggttaacagtcaagtaccttaagaagtctccatcttgtatgcataagtttgttgacatttgtagatctcctgcaattcaaattggagaagggatgaggcttgatgtctcaacgaggtggggttcaacatataagatgttgcgcactactatagcttacaaagaagctataaagacataggctgattcagatttgaattataagtggaaacctacattagaagaatgagatttgtttgctgcaattgagccaattctagcctctttaggaaccactacactgtcaacttcttcctaccccaccgcaaacctattctatccccataatgtggatgtcaaaattgcattgagagcagcaatggtttctactaattttaatatgaaaaaatgggtattgcgatgatggagaaattcaacaagtattgggaataaaggaacaatgttatggtgattgctactatcctagatccaaggtataagatgagatatattgagtggtgttttggtaagattttttatgtagaccaagttggatttgagatagaagaatttagagacgaattggaaaagttgtatgaagactatgagatgcaacatagagagagaaaagctgctcaaagcaagcttagtgcatcatcatcattggcaatgaatagatcttgtagtttgcctactgcatcatgtgagtttcagtcatacttatcatctactgaagtgaatccatcaaaaagtgagttgctcatctattggatgaaacaatgtgagtttggctgataaggattttgatttgctaagctggtgcaaggttaactcacatagatttccagtggtgtcgaggatggcaaagttcttaattgtgcccgctacctctgtgtcttcagagtctacttttcgcactgggggtcgaactctagatgactatcgtagctctctaagcccttctatggtagaggcattgatatgctcctctagttggattcgaagtgcacatgatgggagtcatatgtattgtagtatgatattcttctacttttttattctagtgtgttttctatttttttatcaatgtaatgctctatttattttttggagcaagatgaagaagacgatattgaaaacaatgcatttccaaaaagtttggtggagagcaactagatcttgatatcttttggacaattggatggttgatcacatagcaagtcgcatggatgatggactcatcagtcatcactcatggacatgttcacatggatgagcacacaacaagtggcatttgattctggaattttggatggtggtagttgcatgccacttgtatttgtgtaactgtgggctgtcacctgttaggttgtgcggctgtggcatggttctttacttcttttgtttatctcttcactgtttagacttgagaatttgtagttgcattcgtattgcagactttattgtcttactgttggagatggtagtgatgttactgaatactgaggtagtgtaactgttggagttggcagactttattgtcttgcacttttgctattggagttggtattgcagacttaagtgttatttcagtttgtgagtaatgtgactatgtccccttatgtttattcaagtcataaagtattcaacatttaacttgtctataaactgttattgcaatttgcattttag

SEQ ID NO: 82750 - DNA, 1267 bp, Zea Mays
gaggaaacctcacggaaaagcgaggacggccgccatggatgttgcggtcgtcgcgtgaaggtagagagagagaaaaagaagaaaaagaaaaaaaggcgagagccggcggcgatcgagcacttgagcagacggtttgatggcgttcctggcacgccagggagggattcatttgccatcagtcaggcccgccgccgcattgttggttgtgagttgtgacttgagggcggcggcggcggcagccagcaggtggcggcgggcgggtgtatatatgatgcgggactttttcaaagatcttgacgggaggtccagtgactaggcagcaaaatacagttgattgtcagcctcgtactcgagtgtgcgtaccggtagttgcattgaattatcagtttctgttcgccggttcttattgggtcggtcctagtcgcgggcttaaattcacagcgaatatatgtaggaaggacttggtctttgccgctgaagaagcgaacgcggttcgtggcgctgccggatgagataatcgcgtgacttcttcttcgtctctcccgcgcgcgcgcgcgccgggatgaaacgatcgaggcctgcggttgcttgatttggaggagcgtggcaagcaaaagcatgatgtgctggggtgacgatcagagagcccagaagatgtactagactgattgatggtccgcagcagggtcccagacgctctgtcccgtggttggtcgttttcctcggttgcgagcgagccggggaagagcgcctgctgtgctgccggccggcccacgacggtagcggcggcagctccctgtcttgcctccgacgacgacagggactcaagtgtgtcgtcttcttttttttcttcttcttctactgtggtctgtggtctatgtatcttctacatatttaaggctatcttgctcgtcctctctagatgttgtaggttgctgaagaagcttaggatataaatacttctacatgtatatgaaaacacttgcggaggccatgacagtagccaacagcttcgcgtgtcatcgtctgcgtcgtttaattttactctagcattcgtctcaatccacatgcatcaatatggattgaagtgaatactaagtattcaaacaatgcctcgtaattctgttcatgtaaatattccgtcgaatatgaataaggtttcgcatgtttttggtggctcagttacttgtctcagcatgttagtgttaggagtggctgccatgtggggccattgccaagggcaagtggatttctaccgctataaaag

SEQ ID NO: 82751 - DNA, 1618 bp, Zea Mays
aaaaatgatgctaatgtctaaggacatatgagaaactaaggatactcgaaaacggctagtttggatagtttcttcatgcgtggagcacgaaatagtactacatgaagacagaacatggcagccgttgaaaattattgtccagtttactcagtaacagtcagatggtagacgtctgaactgtgcgtggagtatgaattgtgcaactgaaatgaaaacgagtgaaatctggggcgtgggggtcagggacaacttacgtgtctgaaaccactcggataccttacgtgtccttccaactgaccagctgcgatgcgattgtgtttcgccgagctcggttcagtgagctggctaacccttatcaggatgagttcgatcgtcactagagttcaggaaacgggtcacggcgacgtgctagtactaccttttcgaaccctttcatgcgaggtgcatgctcacctcactaaccaaaaaagctttccgaggaaacctcacggaaaagcgaggacggccgccatggatgttgcggtcgtcgcgtgaaggtagagagagagaaaaagaagaaaaagaaaaaaaggcgagagccggcggcgatcgagcacttgagcagacggtttgatggcgttcctggcacgccagggagggattcatttgccatcagtcaggcccgccgccgcattgttggttgtgagttgtgacttgagggcggcggcggcggcagccagcaggtggcggcgggcgggtgtatatatgatgcgggactttttcaaagatcttgacgggaggtccagtgactaggcagcaaaatacagttgattgtcagcctcgtactcgagtaagcgaacgcggttcgtggcgctgccggatgagataatcgcgtgacttcttcttcgtctctcccgcgcgcgcgcgcgccgggatgaaacgatcgaggcctgcggttgcttgatttggaggagcgtggcaagcaaaagcatgatgtgctggggtgacgatcagagagcccagaagatgtactagactgattgatggtccgcagcagggtcccagacgctctgtcccgtggttggtcgttttcctcggttgcgagcgagccggggaagagcgcctgctgtgctgccggccggcccacgacggtagcggcggcagctccctgtcttgcctccgacgacgacagggactcaagtgtgtcgtcttcttttttttcttcttcttctactgtggtctgtggtctatgtatcttctacatatttaaggctatcttgctcgtcctctctagatgttgtaggttgctgaagaagcttaggatataaatacttctacatgtatatgaaaacacttgcggaggccatgacagtagccaacagcttcgcgtgtcatcgtctgcgtcgtttaattttactctagcattcgtctcaatccacatgcatcaatatggattgaagtgaatactaagtattcaaacaatgcctcgtaattctgttcatgtaaatattccgtcgaatatgaataaggtttcgcatgtttttggtggctcagttacttgtctcagcatgttagtgttaggagtggctgccatgtggggccattgccaagggcaagtggatttctaccgctataaaag

SEQ ID NO: 82752 - DNA, 3432 bp, Zea Mays
cccaaaacccactccgcctcctccgtgtacggtgtaccccatggcgcccgccgcggccgtcatcggcgctggagattccgatcgtctcgcgcgcgaggtggcgcgggtgctggacgagtgccgcgcatcccacgccgtgcaaccgcgtaagctgcgggagctcgcggccctccgctcctcttcaggaggcggcggccgcctcttcatcgcagccttccacgtcgctgtcacgccgctcttcgccctcgcccgccgatccgctgaatctgaccgcgtcgcccgcttcatctctgccttcgcgtccgcttccgcatcatcggccgacgatggtgggaacgggttcctcgaggagttccttcggttcctcgtcaccgcgtccaaggccgcgcaccgtcccgcgcgattccgcgcatgccaaatcatctctgagattataatgcggctgccagatgatgctgaggtgagcgatgagatttgggatgaagtaattgatggcatgaaggtccgggttcaagataagaatgctgcaattcgcacttatgctgtgcgagcattgtcccgttttgcagttgaaggagaggatggtggcattgttgacctattcctcgagaccctagacaatgagccgaatgctgaggttcggaagacaatagttttttctcttccaccatcaaataatacactagagagcgtagttgaatcaatgcttgacattagtgaatcagttagacgagcagcatattctgtgcttgcaactaaatttcccctgcagactcttagcattaagcaaaggactactgtccttcacaggggcctatctgataggtctgcttcagtaaacaacgagtgcctgaagatgctgaaggatgagtggcttgttaagtactgtggaggggatgtgatttcccttctcagatttcttgatgtcgagacatatgaatcagttggagaatctgtaatggcagtgcttctaaaagatggtgctttgcgagtgcaagatgggcacagtattaggcagtacttcactgcaaatgaacgagattccaatattcaactcatggatgctgaggttgctctttactggaaaatcatgtgcaagcatttgcaagctgaagctcaggtcaaaggctcagaggctgcagcaactacaggtgcggaagcagcggtatatgcttctgaggctactgataaaaacgaccttctcgacagtgtccttcctagcacaattactgattatgttgatttggtaaaggcacacctttctgccggaccaaattatcacttcacatcaaggcaattattgctacttggtgaaatgcttgagttctctgatactatgaaccgaaagattgcaagttcttttctgcatgagcttctcgtcaggcctcttgaacatgaagttgatgatgatgggaaccagattgcaattggagacggtgtgagtcttggaggagacaaagactgggcgaaagcagtggcggagttggccaaaaaagtgcattcttctgttggtgaattcgaaatggtggtttccactgttgttgaagagctggctagaccttgcagggagagaacagctgacttcatgcagtggatgcactgtctcgccgtgacaggtcttctgcttcagaatacttcaaccttacggaatctccaggccacagcaattgagccttcagaactgcttcactctttgttgcttcccgcagcaaaacaaaatcatgttgatgtacaaagggctgctttaagatgcctttgtctccttggactgttagagaacagacctaatgcagagttggtgaagcagctacgcttatctttcatcaatgggcctgacttggttagtgccatagcatgcaaggccttgattgaccttgtaacttggcatgggccacaagaaatagatcgagccattggaattgaatcgccagatcctagctacgaaaaatctcagttcactcaagttgacctctctgatatgaatgatgatgatctaaacattggagttcttgatattttattttctggatttcataaagatcactgggaattcgatctagagggtgacaatcatgataatgtcccaaccattcttggtgaaggttttgcaaagattcttctcctcagtgggaattttgcaagtatacctgctgatttgcatactgttatcctcgctaaactcattaaattgtatttctcagaggaaactaaagagctcgaaagattgaaacaatgtatgtctgtcttctttcagcactatccagcactttcagataaacacaagagttgtatctgcaacgcatttgtacctgtcatgaaagccatgtggcctggtttatatggtaatgctgggggtagcactcatgttatttcaaagagacggaaacttgcggttcaagcttctcgtttcatggtgcaaatggtgcaaacccaattattttcaaccgaaagtatggaccaagcttcaaaaagttctgaaagtgcttcaggtttagcagatgcgtcaaacaattttgacatcagcgaggaagggcttgctatccgtatagcactagaggtagccagttgcccagataagaagaccgcagctgggaaagcatatgctttggccctgtgcaaggttgtggtccttctaagattccggcaatcagaacagaaggccatcaagtgcatgagaggccttgtgaatcatttggctgcttcagtggcttccgacaaggagctcgggaaggagctagctcaaatggctgcacggcttagatcgcttgatgcctgtccagacgaagaacttgcacaagatgacgcagatgccatattcaagaaactaggattcgatgatggcttcaagttggacaccaatcaagcagtgcctcctacaccagcaccacggtcagtccggcctccggctcctgccaggagaagagcgagacaggcaccgtcctctagcgatgacagtgacgaggaagcgggagaagctgacgtgcctgcaacatcggcaagcagggttccagccactcccagtatgactgctgctgcacgttctcagagagcaagcaagactgctgctctgagcaagatgtctgcaaaacctgctaccgcgtctgatgacagtgagctggacgggcagtctgacgtcacgagcgaggaggatgcatccgatgaggagtcgttatagccttataggttgctgttattgtctcgtgtaatcgtggactggagtttctgatgacgttgttgagcggaagaaccaagtaatctaactaaattaattacagcggtgacatattgtcactgcattatgtatttctttcgtgttactaagtatgatttaaagccttcatttgcgtttgagctgcagcaatctgcacagacggttttataagcagcaagtgattagttttaaataaaagtcctgacggtggtaaatttaat

SEQ ID NO: 82753 - DNA, 3675 bp, Zea Mays
cccaaaacccactccgcctcctccgtgtacggtgtaccccatggcgcccgccgcggccgtcatcggcgctggagattccgatcgtctcgcgcgcgaggtggcgcgggtgctggacgagtgccgcgcatcccacgccgtgcaaccgcgtaagctgcgggagctcgcggccctccgctcctcttcaggaggcggcggccgcctcttcatcgcagccttccacgtcgctgtcacgccgctcttcgccctcgcccgccgatccgctgaatctgaccgcgtcgcccgcttcatctctgccttcgcgtccgcttccgcatcatcggccgacgatggtgggaacgggttcctcgaggagttccttcggttcctcgtcaccgcgtccaaggccgcgcaccgtcccgcgcgattccgcgcatgccaaatcatctctgagattataatgcggctgccagatgatgctgaggtgagcgatgagatttgggatgaagtaattgatggcatgaaggtccgggttcaagataagaatgctgcaattcgcacttatgctgtgcgagcattgtcccgttttgcagttgaaggagaggatggtggcattgttgacctattcctcgagaccctagacaatgagccgaatgctgaggttcggaagacaatagttttttctcttccaccatcaaataatacactagagagcgtagttgaatcaatgcttgacattagtgaatcagttagacgagcagcatattctgtgcttgcaactaaatttcccctgcagactcttaggggcctatctgataggtctgcttcagtaaacaacgagtgcctgaagatgctgaaggatgagtggcttgttaagtactgtggaggggatgtgatttcccttctcagatttcttgatgtcgagacatatgaatcagttggagaatctgtaatggcagtgcttctaaaagatggtgctttgcgagtgcaagatgggcacagtattaggcagtacttcactgcaaatggtgaaaaaggttcttcatcccagtctgtctcctactttcaaactgacctttctccagattttgttgctcagttcatgttcattgtgaatatgaatctctgacaaaggacaaagtaactaactccaatgaaatgaataaacctgaaagataaccccatgcaatctatgttttttcaagttcgtttgtttgaaaacacagaagaatcaagttgtctctgctcattcatcctctttctgctgctcggtatcatcattcttataatattttcagcagaacgagattccaatattcaactcatggatgctgaggttgctctttactggaaaatcatgtgcaagcatttgcaagctgaagctcaggtcaaaggctcagaggctgcagcaactacaggtgcggaagcagcggtatatgcttctgaggctactgataaaaacgaccttctcgacagtgtccttcctagcacaattactgattatgttgatttggtaaaggcacacctttctgccggaccaaattatcacttcacatcaaggcaattattgctacttggtgaaatgcttgagttctctgatactatgaaccgaaagattgcaagttcttttctgcatgagcttctcgtcaggcctcttgaacatgaagttgatgatgatgggaaccagattgcaattggagacggtgtgagtcttggaggagacaaagactgggcgaaagcagtggcggagttggccaaaaaagtgcattcttctgttggtgaattcgaaatggtggtttccactgttgttgaagagctggctagaccttgcagggagagaacagctgacttcatgcagtggatgcactgtctcgccgtgacaggtcttctgcttcagaatacttcaaccttacggaatctccaggccacagcaattgagccttcagaactgcttcactctttgttgcttcccgcagcaaaacaaaatcatgttgatgtacaaagggctgctttaagatgcctttgtctccttggactgttagagaacagacctaatgcagagttggtgaagcagctacgcttatctttcatcaatgggcctgacttggttagtgccatagcatgcaaggccttgattgaccttgtaacttggcatgggccacaagaaatagatcgagccattggaattgaatcgccagatcctagctacgaaaaatctcagttcactcaagttgacctctctgatatgaatgatgatgatctaaacattggagttcttgatattttattttctggatttcataaagatcactgggaattcgatctagagggtgacaatcatgataatgtcccaaccattcttggtgaaggttttgcaaagattcttctcctcagtgggaattttgcaagtatacctgctgatttgcatactgttatcctcgctaaactcattaaattgtatttctcagaggaaactaaagagctcgaaagattgaaacaatgtatgtctgtcttctttcagcactatccagcactttcagataaacacaagagttgtatctgcaacgcatttgtacctgtcatgaaagccatgtggcctggtttatatggtaatgctgggggtagcactcatgttatttcaaagagacggaaacttgcggttcaagcttctcgtttcatggtgcaaatggtgcaaacccaattattttcaaccgaaagtatggaccaagcttcaaaaagttctgaaagtgcttcaggtttagcagatgcgtcaaacaattttgacatcagcgaggaagggcttgctatccgtatagcactagaggtagccagttgcccagataagaagaccgcagctgggaaagcatatgctttggccctgtgcaaggttgtggtccttctaagattccggcaatcagaacagaaggccatcaagtgcatgagaggccttgtgaatcatttggctgcttcagtggcttccgacaaggagctcgggaaggagctagctcaaatggctgcacggcttagatcgcttgatgcctgtccagacgaagaacttgcacaagatgacgcagatgccatattcaagaaactaggattcgatgatggcttcaagttggacaccaatcaagcagtgcctcctacaccagcaccacggtcagtccggcctccggctcctgccaggagaagagcgagacaggcaccgtcctctagcgatgacagtgacgaggaagcgggagaagctgacgtgcctgcaacatcggcaagcagggttccagccactcccagtatgactgctgctgcacgttctcagagagcaagcaagactgctgctctgagcaagatgtctgcaaaacctgctaccgcgtctgatgacagtgagctggacgggcagtctgacgtcacgagcgaggaggatgcatccgatgaggagtcgttatagccttataggttgctgttattgtctcgtgtaatcgtggactggagtttctgatgacgttgttgagcggaagaaccaagtaatctaactaaattaattacagcggtgacatattgtcactgcattatgtatttctttcgtgttactaagtatgatttaaagccttcatttgcgtttgagctgcagcaatctgcacagacggttttataagcagcaagtgattagttttaaataaaagtcctgacggtggtaaatttaat

SEQ ID NO: 82754 - DNA, 3722 bp, Zea Mays
atttcccctttcccactcccaaaacccactccgcctcctccgtgtacggtgtaccccatggcgcccgccgcggccgtcatcggcgctggagattccgatcgtctcgcgcgcgaggtggcgcgggtgctggacgagtgccgcgcatcccacgccgtgcaaccgcgtaagctgcgggagctcgcggccctccgctcctcttcaggaggcggcggccgcctcttcatcgcagccttccacgtcgctgtcacgccgctcttcgccctcgcccgccgatccgctgaatctgaccgcgtcgcccgcttcatctctgccttcgcgtccgcttccgcatcatcggccgacgatggtgggaacgggttcctcgaggagttccttcggttcctcgtcaccgcgtccaaggccgcgcaccgtcccgcgcgattccgcgcatgccaaatcatctctgagattataatgcggctgccagatgatgctgaggtgagcgatgagatttgggatgaagtaattgatggcatgaaggtccgggttcaagataagaatgctgcaattcgcacttatgctgtgcgagcattgtcccgttttgcagttgaaggagaggatggtggcattgttgacctattcctcgagaccctagacaatgagccgaatgctgaggttcggaagacaatagttttttctcttccaccatcaaataatacactagagagcgtagttgaatcaatgcttgacattagtgaatcagttagacgagcagcatattctgtgcttgcaactaaatttcccctgcagactcttagcattaagcaaaggactactgtccttcacaggggcctatctgataggtctgcttcagtaaacaacgagtgcctgaagatgctgaaggatgagtggcttgttaagtactgtggaggggatgtgatttcccttctcagatttcttgatgtcgagacatatgaatcagttggagaatctgtaatggcagtgcttctaaaagatggtgctttgcgagtgcaagatgggcacagtattaggcagtacttcactgcaaatggtgaaaaaggttcttcatcccagtctgtctcctactttcaaactgacctttctccagattttgttgctcagttcatgttcattgtgaatatgaatctctgacaaaggacaaagtaactaactccaatgaaatgaataaacctgaaagataaccccatgcaatctatgttttttcaagttcgtttgtttgaaaacacagaagaatcaagttgtctctgctcattcatcctctttctgctgctcggtatcatcattcttataatattttcagcagaacgagattccaatattcaactcatggatgctgaggttgctctttactggaaaatcatgtgcaagcatttgcaagctgaagctcaggtcaaaggctcagaggctgcagcaactacaggtgcggaagcagcggtatatgcttctgaggctactgataaaaacgaccttctcgacagtgtccttcctagcacaattactgattatgttgatttggtaaaggcacacctttctgccggaccaaattatcacttcacatcaaggcaattattgctacttggtgaaatgcttgagttctctgatactatgaaccgaaagattgcaagttcttttctgcatgagcttctcgtcaggcctcttgaacatgaagttgatgatgatgggaaccagattgcaattggagacggtgtgagtcttggaggagacaaagactgggcgaaagcagtggcggagttggccaaaaaagtgcattcttctgttggtgaattcgaaatggtggtttccactgttgttgaagagctggctagaccttgcagggagagaacagctgacttcatgcagtggatgcactgtctcgccgtgacaggtcttctgcttcagaatacttcaaccttacggaatctccaggccacagcaattgagccttcagaactgcttcactctttgttgcttcccgcagcaaaacaaaatcatgttgatgtacaaagggctgctttaagatgcctttgtctccttggactgttagagaacagacctaatgcagagttggtgaagcagctacgcttatctttcatcaatgggcctgacttggttagtgccatagcatgcaaggccttgattgaccttgtaacttggcatgggccacaagaaatagatcgagccattggaattgaatcgccagatcctagctacgaaaaatctcagttcactcaagttgacctctctgatatgaatgatgatgatctaaacattggagttcttgatattttattttctggatttcataaagatcactgggaattcgatctagagggtgacaatcatgataatgtcccaaccattcttggtgaaggttttgcaaagattcttctcctcagtgggaattttgcaagtatacctgctgatttgcatactgttatcctcgctaaactcattaaattgtatttctcagaggaaactaaagagctcgaaagattgaaacaatgtatgtctgtcttctttcagcactatccagcactttcagataaacacaagagttgtatctgcaacgcatttgtacctgtcatgaaagccatgtggcctggtttatatggtaatgctgggggtagcactcatgttatttcaaagagacggaaacttgcggttcaagcttctcgtttcatggtgcaaatggtgcaaacccaattattttcaaccgaaagtatggaccaagcttcaaaaagttctgaaagtgcttcaggtttagcagatgcgtcaaacaattttgacatcagcgaggaagggcttgctatccgtatagcactagaggtagccagttgcccagataagaagaccgcagctgggaaagcatatgctttggccctgtgcaaggttgtggtccttctaagattccggcaatcagaacagaaggccatcaagtgcatgagaggccttgtgaatcatttggctgcttcagtggcttccgacaaggagctcgggaaggagctagctcaaatggctgcacggcttagatcgcttgatgcctgtccagacgaagaacttgcacaagatgacgcagatgccatattcaagaaactaggattcgatgatggcttcaagttggacaccaatcaagcagtgcctcctacaccagcaccacggtcagtccggcctccggctcctgccaggagaagagcgagacaggcaccgtcctctagcgatgacagtgacgaggaagcgggagaagctgacgtgcctgcaacatcggcaagcagggttccagccactcccagtatgactgctgctgcacgttctcagagagcaagcaagactgctgctctgagcaagatgtctgcaaaacctgctaccgcgtctgatgacagtgagctggacgggcagtctgacgtcacgagcgaggaggatgcatccgatgaggagtcgttatagccttataggttgctgttattgtctcgtgtaatcgtggactggagtttctgatgacgttgttgagcggaagaaccaagtaatctaactaaattaattacagcggtgacatattgtcactgcattatgtatttctttcgtgttactaagtatgatttaaagccttcatttgcgtttgagctgcagcaatctgcacagacggttttataagcagcaagtgattagttttaaataaaagtcctgacggtggtaaatttaat

SEQ ID NO: 82755 - DNA, 3452 bp, Zea Mays
aaaatttcccctttcccactcccaaaacccactccgcctcctccgtgtacggtgtaccccatggcgcccgccgcggccgtcatcggcgctggagattccgatcgtctcgcgcgcgaggtggcgcgggtgctggacgagtgccgcgcatcccacgccgtgcaaccgcgtaagctgcgggagctcgcggccctccgctcctcttcaggaggcggcggccgcctcttcatcgcagccttccacgtcgctgtcacgccgctcttcgccctcgcccgccgatccgctgaatctgaccgcgtcgcccgcttcatctctgccttcgcgtccgcttccgcatcatcggccgacgatggtgggaacgggttcctcgaggagttccttcggttcctcgtcaccgcgtccaaggccgcgcaccgtcccgcgcgattccgcgcatgccaaatcatctctgagattataatgcggctgccagatgatgctgaggtgagcgatgagatttgggatgaagtaattgatggcatgaaggtccgggttcaagataagaatgctgcaattcgcacttatgctgtgcgagcattgtcccgttttgcagttgaaggagaggatggtggcattgttgacctattcctcgagaccctagacaatgagccgaatgctgaggttcggaagacaatagttttttctcttccaccatcaaataatacactagagagcgtagttgaatcaatgcttgacattagtgaatcagttagacgagcagcatattctgtgcttgcaactaaatttcccctgcagactcttagcattaagcaaaggactactgtccttcacaggggcctatctgataggtctgcttcagtaaacaacgagtgcctgaagatgctgaaggatgagtggcttgttaagtactgtggaggggatgtgatttcccttctcagatttcttgatgtcgagacatatgaatcagttggagaatctgtaatggcagtgcttctaaaagatggtgctttgcgagtgcaagatgggcacagtattaggcagtacttcactgcaaatgcagaacgagattccaatattcaactcatggatgctgaggttgctctttactggaaaatcatgtgcaagcatttgcaagctgaagctcaggtcaaaggctcagaggctgcagcaactacaggtgcggaagcagcggtatatgcttctgaggctactgataaaaacgaccttctcgacagtgtccttcctagcacaattactgattatgttgatttggtaaaggcacacctttctgccggaccaaattatcacttcacatcaaggcaattattgctacttggtgaaatgcttgagttctctgatactatgaaccgaaagattgcaagttcttttctgcatgagcttctcgtcaggcctcttgaacatgaagttgatgatgatgggaaccagattgcaattggagacggtgtgagtcttggaggagacaaagactgggcgaaagcagtggcggagttggccaaaaaagtgcattcttctgttggtgaattcgaaatggtggtttccactgttgttgaagagctggctagaccttgcagggagagaacagctgacttcatgcagtggatgcactgtctcgccgtgacaggtcttctgcttcagaatacttcaaccttacggaatctccaggccacagcaattgagccttcagaactgcttcactctttgttgcttcccgcaaaacaaaatcatgttgatgtacaaagggctgctttaagatgcctttgtctccttggactgttagagaacagacctaatgcagagttggtgaagcagctacgcttatctttcatcaatgggcctgacttggttagtgccatagcatgcaaggccttgattgaccttgtaacttggcatgggccacaagaaatagatcgagccattggaattgaatcgccagatcctagctacgaaaaatctcagttcactcaagttgacctctctgatatgaatgatgatgatctaaacattggagttcttgatattttattttctggatttcataaagatcactgggaattcgatctagagggtgacaatcatgataatgtcccaaccattcttggtgaaggttttgcaaagattcttctcctcagtgggaattttgcaagtatacctgctgatttgcatactgttatcctcgctaaactcattaaattgtatttctcagaggaaactaaagagctcgaaagattgaaacaatgtatgtctgtcttctttcagcactatccagcactttcagataaacacaagagttgtatctgcaacgcatttgtacctgtcatgaaagccatgtggcctggtttatatggtaatgctgggggtagcactcatgttatttcaaagagacggaaacttgcggttcaagcttctcgtttcatggtgcaaatggtgcaaacccaattattttcaaccgaaagtatggaccaagcttcaaaaagttctgaaagtgcttcaggtttagcagatgcgtcaaacaattttgacatcagcgaggaagggcttgctatccgtatagcactagaggtagccagttgcccagataagaagaccgcagctgggaaagcatatgctttggccctgtgcaaggttgtggtccttctaagattccggcaatcagaacagaaggccatcaagtgcatgagaggccttgtgaatcatttggctgcttcagtggcttccgacaaggagctcgggaaggagctagctcaaatggctgcacggcttagatcgcttgatgcctgtccagacgaagaacttgcacaagatgacgcagatgccatattcaagaaactaggattcgatgatggcttcaagttggacaccaatcaagcagtgcctcctacaccagcaccacggtcagtccggcctccggctcctgccaggagaagagcgagacaggcaccgtcctctagcgatgacagtgacgaggaagcgggagaagctgacgtgcctgcaacatcggcaagcagggttccagccactcccagtatgactgctgctgcacgttctcagagagcaagcaagactgctgctctgagcaagatgtctgcaaaacctgctaccgcgtctgatgacagtgagctggacgggcagtctgacgtcacgagcgaggaggatgcatccgatgaggagtcgttatagccttataggttgctgttattgtctcgtgtaatcgtggactggagtttctgatgacgttgttgagcggaagaaccaagtaatctaactaaattaattacagcggtgacatattgtcactgcattatgtatttctttcgtgttactaagtatgatttaaagccttcatttgcgtttgagctgcagcaatctgcacagacggttttataagcagcaagtgattagttttaaataaaagtcctgacggtggtaaatttaat

SEQ ID NO: 82756 - DNA, 3460 bp, Zea Mays
caaaaatttcccctttcccactcccaaaacccactccgcctcctccgtgtacggtgtaccccatggcgcccgccgcggccgtcatcggcgctggagattccgatcgtctcgcgcgcgaggtggcgcgggtgctggacgagtgccgcgcatcccacgccgtgcaaccgcgtaagctgcgggagctcgcggccctccgctcctcttcaggaggcggcggccgcctcttcatcgcagccttccacgtcgctgtcacgccgctcttcgccctcgcccgccgatccgctgaatctgaccgcgtcgcccgcttcatctctgccttcgcgtccgcttccgcatcatcggccgacgatggtgggaacgggttcctcgaggagttccttcggttcctcgtcaccgcgtccaaggccgcgcaccgtcccgcgcgattccgcgcatgccaaatcatctctgagattataatgcggctgccagatgatgctgaggtgagcgatgagatttgggatgaagtaattgatggcatgaaggtccgggttcaagataagaatgctgcaattcgcacttatgctgtgcgagcattgtcccgttttgcagttgaaggagaggatggtggcattgttgacctattcctcgagaccctagacaatgagccgaatgctgaggttcggaagacaatagttttttctcttccaccatcaaataatacactagagagcgtagttgaatcaatgcttgacattagtgaatcagttagacgagcagcatattctgtgcttgcaactaaatttcccctgcagactcttagcattaagcaaaggactactgtccttcacaggggcctatctgataggtctgcttcagtaaacaacgagtgcctgaagatgctgaaggatgagtggcttgttaagtactgtggaggggatgtgatttcccttctcagatttcttgatgtcgagacatatgaatcagttggagaatctgtaatggcagtgcttctaaaagatggtgctttgcgagtgcaagatgggcacagtattaggcagtacttcactgcaaatggtgaaaaagaacgagattccaatattcaactcatggatgctgaggttgctctttactggaaaatcatgtgcaagcatttgcaagctgaagctcaggtcaaaggctcagaggctgcagcaactacaggtgcggaagcagcggtatatgcttctgaggctactgataaaaacgaccttctcgacagtgtccttcctagcacaattactgattatgttgatttggtaaaggcacacctttctgccggaccaaattatcacttcacatcaaggcaattattgctacttggtgaaatgcttgagttctctgatactatgaaccgaaagattgcaagttcttttctgcatgagcttctcgtcaggcctcttgaacatgaagttgatgatgatgggaaccagattgcaattggagacggtgtgagtcttggaggagacaaagactgggcgaaagcagtggcggagttggccaaaaaagtgcattcttctgttggtgaattcgaaatggtggtttccactgttgttgaagagctggctagaccttgcagggagagaacagctgacttcatgcagtggatgcactgtctcgccgtgacaggtcttctgcttcagaatacttcaaccttacggaatctccaggccacagcaattgagccttcagaactgcttcactctttgttgcttcccgcaaaacaaaatcatgttgatgtacaaagggctgctttaagatgcctttgtctccttggactgttagagaacagacctaatgcagagttggtgaagcagctacgcttatctttcatcaatgggcctgacttggttagtgccatagcatgcaaggccttgattgaccttgtaacttggcatgggccacaagaaatagatcgagccattggaattgaatcgccagatcctagctacgaaaaatctcagttcactcaagttgacctctctgatatgaatgatgatgatctaaacattggagttcttgatattttattttctggatttcataaagatcactgggaattcgatctagagggtgacaatcatgataatgtcccaaccattcttggtgaaggttttgcaaagattcttctcctcagtgggaattttgcaagtatacctgctgatttgcatactgttatcctcgctaaactcattaaattgtatttctcagaggaaactaaagagctcgaaagattgaaacaatgtatgtctgtcttctttcagcactatccagcactttcagataaacacaagagttgtatctgcaacgcatttgtacctgtcatgaaagccatgtggcctggtttatatggtaatgctgggggtagcactcatgttatttcaaagagacggaaacttgcggttcaagcttctcgtttcatggtgcaaatggtgcaaacccaattattttcaaccgaaagtatggaccaagcttcaaaaagttctgaaagtgcttcaggtttagcagatgcgtcaaacaattttgacatcagcgaggaagggcttgctatccgtatagcactagaggtagccagttgcccagataagaagaccgcagctgggaaagcatatgctttggccctgtgcaaggttgtggtccttctaagattccggcaatcagaacagaaggccatcaagtgcatgagaggccttgtgaatcatttggctgcttcagtggcttccgacaaggagctcgggaaggagctagctcaaatggctgcacggcttagatcgcttgatgcctgtccagacgaagaacttgcacaagatgacgcagatgccatattcaagaaactaggattcgatgatggcttcaagttggacaccaatcaagcagtgcctcctacaccagcaccacggtcagtccggcctccggctcctgccaggagaagagcgagacaggcaccgtcctctagcgatgacagtgacgaggaagcgggagaagctgacgtgcctgcaacatcggcaagcagggttccagccactcccagtatgactgctgctgcacgttctcagagagcaagcaagactgctgctctgagcaagatgtctgcaaaacctgctaccgcgtctgatgacagtgagctggacgggcagtctgacgtcacgagcgaggaggatgcatccgatgaggagtcgttatagccttataggttgctgttattgtctcgtgtaatcgtggactggagtttctgatgacgttgttgagcggaagaaccaagtaatctaactaaattaattacagcggtgacatattgtcactgcattatgtatttctttcgtgttactaagtatgatttaaagccttcatttgcgtttgagctgcagcaatctgcacagacggttttataagcagcaagtgattagttttaaataaaagtcctgacggtggtaaatttaat

SEQ ID NO: 82757 - DNA, 3264 bp, Zea Mays
caattttcaaaggagatgctgtcgaaattttatatatggatgttagatgtgtagtttagtagcattcgagggtgtttttggatcccgaggtgttacaaagacaaagcaagaaaccgacagagctctcctagctgtgtgtccactagacagtctgatgtttagtgtcagacaattcgatactctcggggcagattgaagactcgtatgatgaaggtagatgggaccaagaagcagaaccaggctaagtctttagattataatgcggctgccagatgatgctgaggtgagcgatgagatttgggatgaagtaattgatggcatgaaggtccgggttcaagataagaatgctgcaattcgcacttatgctgtgcgagcattgtcccgttttgcagttgaaggagaggatggtggcattgttgacctattcctcgagaccctagacaatgagccgaatgctgaggttcggaagacaatagttttttctcttccaccatcaaataatacactagagagcgtagttgaatcaatgcttgacattagtgaatcagttagacgagcagcatattctgtgcttgcaactaaatttcccctgcagactcttagcattaagcaaaggactactgtccttcacaggggcctatctgataggtctgcttcagtaaacaacgagtgcctgaagatgctgaaggatgagtggcttgttaagtactgtggaggggatgtgatttcccttctcagatttcttgatgtcgagacatatgaatcagttggagaatctgtaatggcagtgcttctaaaagatggtgctttgcgagtgcaagatgggcacagtattaggcagtacttcactgcaaatggtgaaaaagcagaacgagattccaatattcaactcatggatgctgaggttgctctttactggaaaatcatgtgcaagcatttgcaagctgaagctcaggtcaaaggctcagaggctgcagcaactacaggtgcggaagcagcggtatatgcttctgaggctactgataaaaacgaccttctcgacagtgtccttcctagcacaattactgattatgttgatttggtaaaggcacacctttctgccggaccaaattatcacttcacatcaaggcaattattgctacttggtgaaatgcttgagttctctgatactatgaaccgaaagattgcaagttcttttctgcatgagcttctcgtcaggcctcttgaacatgaagttgatgatgatgggaaccagattgcaattggagacggtgtgagtcttggaggagacaaagactgggcgaaagcagtggcggagttggccaaaaaagtgcattcttctgttggtgaattcgaaatggtggtttccactgttgttgaagagctggctagaccttgcagggagagaacagctgacttcatgcagtggatgcactgtctcgccgtgacaggtcttctgcttcagaatacttcaaccttacggaatctccaggccacagcaattgagccttcagaactgcttcactctttgttgcttcccgcaaaacaaaatcatgttgatgtacaaagggctgctttaagatgcctttgtctccttggactgttagagaacagacctaatgcagagttggtgaagcagctacgcttatctttcatcaatgggcctgacttggttagtgccatagcatgcaaggccttgattgaccttgtaacttggcatgggccacaagaaatagatcgagccattggaattgaatcgccagatcctagctacgaaaaatctcagttcactcaagttgacctctctgatatgaatgatgatgatctaaacattggagttcttgatattttattttctggatttcataaagatcactgggaattcgatctagagggtgacaatcatgataatgtcccaaccattcttggtgaaggttttgcaaagattcttctcctcagtgggaattttgcaagtatacctgctgatttgcatactgttatcctcgctaaactcattaaattgtatttctcagaggaaactaaagagctcgaaagattgaaacaatgtatgtctgtcttctttcagcactatccagcactttcagataaacacaagagttgtatctgcaacgcatttgtacctgtcatgaaagccatgtggcctggtttatatggtaatgctgggggtagcactcatgttatttcaaagagacggaaacttgcggttcaagcttctcgtttcatggtgcaaatggtgcaaacccaattattttcaaccgaaagtatggaccaagcttcaaaaagttctgaaagtgcttcaggtttagcagatgcgtcaaacaattttgacatcagcgaggaagggcttgctatccgtatagcactagaggtagccagttgcccagataagaagaccgcagctgggaaagcatatgctttggccctgtgcaaggttgtggtccttctaagattccggcaatcagaacagaaggccatcaagtgcatgagaggccttgtgaatcatttggctgcttcagtggcttccgacaaggagctcgggaaggagctagctcaaatggctgcacggcttagatcgcttgatgcctgtccagacgaagaacttgcacaagatgacgcagatgccatattcaagaaactaggattcgatgatggcttcaagttggacaccaatcaagcagtgcctcctacaccagcaccacggtcagtccggcctccggctcctgccaggagaagagcgagacaggcaccgtcctctagcgatgacagtgacgaggaagcgggagaagctgacgtgcctgcaacatcggcaagcagggttccagccactcccagtatgactgctgctgcacgttctcagagagcaagcaagactgctgctctgagcaagatgtctgcaaaacctgctaccgcgtctgatgacagtgagctggacgggcagtctgacgtcacgagcgaggaggatgcatccgatgaggagtcgttatagccttataggttgctgttattgtctcgtgtaatcgtggactggagtttctgatgacgttgttgagcggaagaaccaagtaatctaactaaattaattacagcggtgacatattgtcactgcattatgtatttctttcgtgttactaagtatgatttaaagccttcatttgcgtttgagctgcagcaatctgcacagacggttttataagcagcaagtgattagttttaaataaaagtcctgacggtggtaaatttaat

SEQ ID NO: 82758 - DNA, 3150 bp, Zea Mays
gtttattcaattttcaaaggagatgctgtcgaaattttatatatggatgttagatgtgtagtttagtagcattcgagggtgtttttggatcccgaggtgttacaaagacaaagcaagaaaccgacagagctctcctagctgtgtgtccactagacagtctgatgtttagtgtcagacaattcgatactctcggggcagattgaagactcgtatgatgaaggtagatgggaccaagaagcagaaccaggctaagtctttagattataatgcggctgccagatgatgctgagttgaaggagaggatggtggcattgttgacctattcctcgagaccctagacaatgagccgaatgctgaggttcggaagacaatagttttttctcttccaccatcaaataatacactagagagcgtagttgaatcaatgcttgacattagtgaatcagttagacgagcagcatattctgtgcttgcaactaaatttcccctgcagactcttagcattaagcaaaggactactgtccttcacaggggcctatctgataggtctgcttcagtaaacaacgagtgcctgaagatgctgaaggatgagtggcttgttaagtactgtggaggggatgtgatttcccttctcagatttcttgatgtcgagacatatgaatcagttggagaatctgtaatggcagtgcttctaaaagatggtgctttgcgagtgcaagatgggcacagtattaggcagtacttcactgcaaatgaacgagattccaatattcaactcatggatgctgaggttgctctttactggaaaatcatgtgcaagcatttgcaagctgaagctcaggtcaaaggctcagaggctgcagcaactacaggtgcggaagcagcggtatatgcttctgaggctactgataaaaacgaccttctcgacagtgtccttcctagcacaattactgattatgttgatttggtaaaggcacacctttctgccggaccaaattatcacttcacatcaaggcaattattgctacttggtgaaatgcttgagttctctgatactatgaaccgaaagattgcaagttcttttctgcatgagcttctcgtcaggcctcttgaacatgaagttgatgatgatgggaaccagattgcaattggagacggtgtgagtcttggaggagacaaagactgggcgaaagcagtggcggagttggccaaaaaagtgcattcttctgttggtgaattcgaaatggtggtttccactgttgttgaagagctggctagaccttgcagggagagaacagctgacttcatgcagtggatgcactgtctcgccgtgacaggtcttctgcttcagaatacttcaaccttacggaatctccaggccacagcaattgagccttcagaactgcttcactctttgttgcttcccgcaaaacaaaatcatgttgatgtacaaagggctgctttaagatgcctttgtctccttggactgttagagaacagacctaatgcagagttggtgaagcagctacgcttatctttcatcaatgggcctgacttggttagtgccatagcatgcaaggccttgattgaccttgtaacttggcatgggccacaagaaatagatcgagccattggaattgaatcgccagatcctagctacgaaaaatctcagttcactcaagttgacctctctgatatgaatgatgatgatctaaacattggagttcttgatattttattttctggatttcataaagatcactgggaattcgatctagagggtgacaatcatgataatgtcccaaccattcttggtgaaggttttgcaaagattcttctcctcagtgggaattttgcaagtatacctgctgatttgcatactgttatcctcgctaaactcattaaattgtatttctcagaggaaactaaagagctcgaaagattgaaacaatgtatgtctgtcttctttcagcactatccagcactttcagataaacacaagagttgtatctgcaacgcatttgtacctgtcatgaaagccatgtggcctggtttatatggtaatgctgggggtagcactcatgttatttcaaagagacggaaacttgcggttcaagcttctcgtttcatggtgcaaatggtgcaaacccaattattttcaaccgaaagtatggaccaagcttcaaaaagttctgaaagtgcttcaggtttagcagatgcgtcaaacaattttgacatcagcgaggaagggcttgctatccgtatagcactagaggtagccagttgcccagataagaagaccgcagctgggaaagcatatgctttggccctgtgcaaggttgtggtccttctaagattccggcaatcagaacagaaggccatcaagtgcatgagaggccttgtgaatcatttggctgcttcagtggcttccgacaaggagctcgggaaggagctagctcaaatggctgcacggcttagatcgcttgatgcctgtccagacgaagaacttgcacaagatgacgcagatgccatattcaagaaactaggattcgatgatggcttcaagttggacaccaatcaagcagtgcctcctacaccagcaccacggtcagtccggcctccggctcctgccaggagaagagcgagacaggcaccgtcctctagcgatgacagtgacgaggaagcgggagaagctgacgtgcctgcaacatcggcaagcagggttccagccactcccagtatgactgctgctgcacgttctcagagagcaagcaagactgctgctctgagcaagatgtctgcaaaacctgctaccgcgtctgatgacagtgagctggacgggcagtctgacgtcacgagcgaggaggatgcatccgatgaggagtcgttatagccttataggttgctgttattgtctcgtgtaatcgtggactggagtttctgatgacgttgttgagcggaagaaccaagtaatctaactaaattaattacagcggtgacatattgtcactgcattatgtatttctttcgtgttactaagtatgatttaaagccttcatttgcgtttgagctgcagcaatctgcacagacggttttataagcagcaagtgattagttttaaataaaagtcctgacggtggtaaatttaat

SEQ ID NO: 82759 - DNA, 4223 bp, Zea Mays
agtattcagaattattggattctttgataattgaactctatgatgatgttttacttgattgtattatattgatgctctatcatatattgatgatgattatggttcgagtatgacccatgagattaattcacacccctgaaggctgatgaagtattatttgaggtttgtattgtatctgagagaagtgaagtttattgataaatacaacatgccatatacattgcatgactcatttgcatctgaagttttgtcgcgacctatggtccgaccgtaacggtacaacttagcatcgtacgttgcccgaggagggatacgatgcagcttcatacccttagaggtatgaagacaggggacatatgcattgcattcatatacattcattaaagtgatatttgcagatgatgtggttttataccctaagaggtatgaagacagaggacctacacattgcgttcctatgcatacattgaagtgatatttgtaggtattgttgacgcagggaagtgttatacaacctattgtggttgttcgaggaaatgagatggtattggttatattggacctactgagttctatatctactagtatttctgatcttaattgtgattcttttagaatgttgattaattcaatttgtggtttaaatatctcgtcaaaacaatttgcttgctgagatgtttcatctcactcttgcattactcaatgcaagtgcttgttactcatcaaggggagtgggaagtagcagcacatccaccttcactctcacgttgcctaggcgcagtcatgatttaattagaaacttcttgtcaaaggatgtttgtttttaactagttgtgcgcactggttaattcagttcatgacgttatgattgtcttcccattgctagcagattattaatgtctattatattttcttaccatgatatctatttatgctttgttgcttccctgtttattcaattttcaaaggagatgctgtcgaaattttatatatggatgttagatgtgtagtttagtagcattcgagggtgtttttggatcccgaggtgttacaaagacaaagcaagaaaccgacagagctctcctagctgtgtgtccactagacagtctgatgtttagtgtcagacaattcgatactctcggggcagattgaagactcgtatgatgaaggtagatgggaccaagaagcagaaccaggctaagtctttagattataatgcggctgccagatgatgctgaggtgagcgatgagatttgggatgaagtaattgatggcatgaaggtccgggttcaagataagaatgctgcaattcgcacttatgctgtgcgagcattgtcccgttttgcagttgaaggagaggatggtggcattgttgacctattcctcgagaccctagacaatgagccgaatgctgaggttcggaagacaatagttttttctcttccaccatcaaataatacactagagagcgtagttgaatcaatgcttgacattagtgaatcagttagacgagcagcatattctgtgcttgcaactaaatttcccctgcagactcttagcattaagcaaaggactactgtccttcacaggggcctatctgataggtctgcttcagtaaacaacgagtgcctgaagatgctgaaggatgagtggcttgttaagtactgtggaggggatgtgatttcccttctcagatttcttgatgtcgagacatatgaatcagttggagaatctgtaatggcagtgcttctaaaagatggtgctttgcgagtgcaagatgggcacagtattaggcagtacttcactgcaaatggtgaaaaagcagaacgagattccaatattcaactcatggatgctgaggttgctctttactggaaaatcatgtgcaagcatttgcaagctgaagctcaggtcaaaggctcagaggctgcagcaactacaggtgcggaagcagcggtatatgcttctgaggctactgataaaaacgaccttctcgacagtgtccttcctagcacaattactgattatgttgatttggtaaaggcacacctttctgccggaccaaattatcacttcacatcaaggcaattattgctacttggtgaaatgcttgagttctctgatactatgaaccgaaagattgcaagttcttttctgcatgagcttctcgtcaggcctcttgaacatgaagttgatgatgatgggaaccagattgcaattggagacggtgtgagtcttggaggagacaaagactgggcgaaagcagtggcggagttggccaaaaaagtgcattcttctgttggtgaattcgaaatggtggtttccactgttgttgaagagctggctagaccttgcagggagagaacagctgacttcatgcagtggatgcactgtctcgccgtgacaggtcttctgcttcagaatacttcaaccttacggaatctccaggccacagcaattgagccttcagaactgcttcactctttgttgcttcccgcagcaaaacaaaatcatgttgatgtacaaagggctgctttaagatgcctttgtctccttggactgttagagaacagacctaatgcagagttggtgaagcagctacgcttatctttcatcaatgggcctgacttggttagtgccatagcatgcaaggccttgattgaccttgtaacttggcatgggccacaagaaatagatcgagccattggaattgaatcgccagatcctagctacgaaaaatctcagttcactcaagttgacctctctgatatgaatgatgatgatctaaacattggagttcttgatattttattttctggatttcataaagatcactgggaattcgatctagagggtgacaatcatgataatgtcccaaccattcttggtgaaggttttgcaaagattcttctcctcagtgggaattttgcaagtatacctgctgatttgcatactgttatcctcgctaaactcattaaattgtatttctcagaggaaactaaagagctcgaaagattgaaacaatgtatgtctgtcttctttcagcactatccagcactttcagataaacacaagagttgtatctgcaacgcatttgtacctgtcatgaaagccatgtggcctggtttatatggtaatgctgggggtagcactcatgttatttcaaagagacggaaacttgcggttcaagcttctcgtttcatggtgcaaatggtgcaaacccaattattttcaaccgaaagtatggaccaagcttcaaaaagttctgaaagtgcttcaggtttagcagatgcgtcaaacaattttgacatcagcgaggaagggcttgctatccgtatagcactagaggtagccagttgcccagataagaagaccgcagctgggaaagcatatgctttggccctgtgcaaggttgtggtccttctaagattccggcaatcagaacagaaggccatcaagtgcatgagaggccttgtgaatcatttggctgcttcagtggcttccgacaaggagctcgggaaggagctagctcaaatggctgcacggcttagatcgcttgatgcctgtccagacgaagaacttgcacaagatgacgcagatgccatattcaagaaactaggattcgatgatggcttcaagttggacaccaatcaagcagtgcctcctacaccagcaccacggtcagtccggcctccggctcctgccaggagaagagcgagacaggcaccgtcctctagcgatgacagtgacgaggaagcgggagaagctgacgtgcctgcaacatcggcaagcagggttccagccactcccagtatgactgctgctgcacgttctcagagagcaagcaagactgctgctctgagcaagatgtctgcaaaacctgctaccgcgtctgatgacagtgagctggacgggcagtctgacgtcacgagcgaggaggatgcatccgatgaggagtcgttatagccttataggttgctgttattgtctcgtgtaatcgtggactggagtttctgatgacgttgttgagcggaagaaccaagtaatctaactaaattaattacagcggtgacatattgtcactgcattatgtatttctttcgtgttactaagtatgatttaaagccttcatttgcgtttgagctgcagcaatctgcacagacggttttataagcagcaagtgattagttttaaataaaagtcctgacggtggtaaatttaat

SEQ ID NO: 82760 - DNA, 472 bp, Zea Mays
atttcctcctgagccagatctgtcatttcctcctgagccagatcgtgcgagccccttcggttactggtcgtccgcaggcggcaggcgaacccctctccctccctgcgatctcttagctgctcatggcaatggcagtcttaacttcctcgccgagccgcgcccgccctctccacacgagctccgctggcctacctcgtccctgcactcctgcactcgtcgtcgtcttgccgaaggagcttttgtcgccatccaccatgctgcgacacgccgagcgtcgtcattgttctcctcgtcgtccgagctctgcccgagatatcgggccgttcgtggagtctgagggaattgcaggagaggaccctgagcagcagcagcttggtgaaggcaagtgtcctctgacccattatgtcctatccacttataacttaccatcccgcattacttacttgaaacctaaggattgactagctttaca

SEQ ID NO: 82761 - DNA, 6198 bp, Zea Mays
aggttctttcgttttgtttttagtcaccctcctgcggggagaggtactgtgtttatcaaactggagaaacctaacgggcagctatgacctctagggaatctttgtaaaggcttcgtagtgaatccctggccattcaccttgggagtgaataagggtcttgcaagcccgggctagagagggaatcacggctcatgggtaaagtgtgcgacctctgcagagggtagtgaaactgatatatcagccgtgctcacggttaagagcagccttgggatcctctttgattagagatacaaatggttcgagatacaatggttccatatatgattttggttcgatgatgataatgatgttcctcgatgaggaaatgattcacgggttagttattgctaaaacctggcttcactaataataaatacctgaccaactaaaagcaactgcttaagcctaaccccacataaagctagtccacttcagccaaacggggcatttgctgagtacgttgatgtgtactcatccttgctttaccacaaaacaccaggttgtccacattgcaaccactgctcaggagaagacgaagtcgtggaaggagacttccaggagttccaagactacgacgagttttaggtgtgggttggcggcaacccccagtcagctgcttgtgaaggccttatctttactgcgtttcgctagcactttgatttaactgttaagttgatgactatgtggatgtctatgactctgtgatgtaataagttaatactcttttatgttattattcgagcactgtgcgatgatgttcatttatgtaatcgctgtgtacgtgaattctgatcctggcacgtacatagttcgcatttggtttgccttctgaaaccgggtgtgacataagtggtatcaaagctgtgctgactgtaggaccgctgacctagagtagcattggccgttttaaggacttattgactattacttcacctcatccttgattctgcttcaaaatattagtcacctcgactaattttatgttgtgctcctatatgtcccctttccaaaaagtattttattctagtatggtctatactcttctcaatctattagatctaacttacttttgtgcttgcgatatctttgtagatgccccctgaccataaccttcttgtctttttggaattctttcctctttcgtcattaaagttaccatctggcgaactctagtcctttggcactgacatgcttgtacccctttaatactcttgtttcgaatacttgcctctaaatttctactgactacttagacatttcagttttgtatgtccatgatcttcctgtcttttgagaccctttcctcttctattgttaagacgttgtctttcagcaatttcttggctcttggtatttgtatgctcatcttcttgaaatcttgcatactctcatcttttttatgcttatcttcatacctcaatgactgttcaaaacatttcagcttacatgaccttgaccacccctgttccttaacggtttatgagcggtcatttttattttgcacatccttggtgatcttgttaatttcttgtaactttcctcagtaaaggatttttacttcaacccttccattggaaccatacatatcttacccttgattattttctccacttcgccactttgcgagtcttgccttaactctatccttggttatgcttttcacgattatcatctttacccttgtcacttctatatcttaccttgatgcttatgttatacctgtcctttaaaaccttctctcttccatctcaattttatagttttattttacgtattttcattggtcatatccacttccttgtcgcttgcgagtttttaactccatccattgttgtgtgttttctttgctatcaccattaccttgtcatacatcggtcttgccttgacacttatctttactcttgctcttaaaataaaatctcctctctttcacctcaatttgagtgacagtttacctatatagcccttggacgtgtcgtctcatttttttatttgcagggcctatcttaactccatcctttatggtactaatatattttgtcttatgcttatttacctcctatcctacatctttgtccattattacctttaaaaccctcgtgatatctatgtccttaccctcctacttatctcgaacatatcctttgaagcctcctcttttccatccgtgtttgaggataatgcctcacctattcatcattgactgctcccccttcttgacaccttgcaagtgttagtctaaaatcaatttttggttgggtgtttgttcgttatcaccttaacccttgtcatcccttgatctttaccttgatgcttatcccgtccctgcattttaaagcccctccctcgttccagttcaagagtgttgtcttacctacccgctcttggtcattcccttttcctttaccgcgttgccagtcatagcgtttgtttgatataccccttacccttgtaatcactagatcttgacttgatacctatctaaggtctgcttttggaaatctccccttttctatctcaacctgagagtgttgttctacccattatgccattggtcgtatctttttgttgatcgcttacaatgcttgctttaactccattctttatggtgctcgtgtccctgttctgcacgtcttgttcttctccttgtccttcaacaactttagagagtagttattcccttttcaagaaagaccaccatttaattagaaggaacgtgtagcaacggaatgtttgttgttgtatgcttatgctatttgtttttgtgtgatgactgatttgcctctttgtgatgagtgttgatgtgttgtggcccttggtccgcaatgacatcagtttactagcggagtgccgtagagttaagtagctaggtgctctcccttctctctctttaagccatctatgcttaccttttctatcttaccttttctatctatactcttcccttttgcacttgtccggttggcatcctgcaacctctcttaatcagtcaagatcagagtcggtaaaatcttcatcaagtacatatcaatgcgcctgttaagggggttagccgctaaccctgatgaagtcaatgtgatcaacatcaaccaacaagatcagagtggcgcagcgaaagcatgtgtgggtcctaactcataggtccaggagatcctcaagaattgcatcagtgcgtcgtgaacatctgaaggtcaaaacaaccagtccacaagttaatcttgtagagaggtcagctcaagaaaaaaaccatggacaaccaatgaaccactcttgttctcttgctagcctcttcttgaatctcgagggcgagattcctgttaagggggttagatctgtaacaccctgaatctgggggtataaaatttcttttcaaatatccaccaaattcaagtgttaccctctcctttacctgtttttcttcttctaaataatggagagttattttattatatatataagtttttagcatagtaaaataaaatcctagagaagcctcgattgttgcattcatgccattgcatagtgtttatgagtgcaaaatgttatcgtaacaggttaaaaatatctcaaggattttctcaagagtgttgaaatcttcagaacaattcttcgggtattaaatatgaattttagttttttttctaatattaattaaatacttaaaatttagcatttgcgaaaaaactataaaattctagaaactcaataatacatatatatatatatatatacatctccctctcgttgaacgcgttctagatctcgtgaccttttcgtgagaacgtcaaacatcctcttctcctcgcaaaagttgtgatgttcacgtctaccccatctatcctcatctacctacggtgtctacccctcaacagctacctttgtttaccctcaatccctcatcaacctcgtctcgcttcgtcgtacattgtcgtacattatcgtacacgcaaccacctctctcgctcggtcacggcacgatccgtgacgattttggcaacggccttccacatcctcccttttatatgtatacacactgtatggttgcataacccctcgtcatttcctcctgagccagatctgtcatttcctcctgagccagatcgtgcgagccccttcggttactggtcgtccgcaggcggcaggcgaacccctctccctccctgcgatctcttagctgctcatggcaatggcagtcttaacttcctcgccgagccgcgcccgccctctccacacgagctccgctggcctacctcgtccctgcactcctgcactcgtcgtcgtcttgccgaaggagcttttgtcgccatccaccatgctgcgacacgccgagcgtcgtcattgttctcctcgtcgtccgagctctgcccgaggtgagtgtttgtccccccttccccctttctttcttcctcagcgcggcgcccctgcgcaggaagccatggctgtcgcgcgcacggcattgcagcgcccctgctttcccagcaagctccctgccaaagcctcgactcggtggccgagtggtctgcaggcggcgccctcgtcccgagtagcaccatagccggcgcagccatggccggtcgtgctcccctgcgtgcgccgccagtctgcccctaccgcggtagttgctagcgccgctgccaacctgcgttccatgcctcggtggccgtcgactacaccctggctccttgtgagtctgctcagctggagccgcccgcgcctgtaatcacccgttcgattttagtggaaaagaaaccatgcatgttcgtgagaggtggaagaaaaagcaatccgtcacgcaatatttagaaacaaccttgtgggctccatgcatgccaatgatgccatacatccacgttccttggtgcatgcaggaaaatatctagaaaccgctccacactagatcctctcaggagttgttgtggttgtgctctttgtagccctccacgtggccagccttccagccaataaatttgcgacacatcgctcagctgccttttaaagaaaagatcctgcttttattctagaattaatttactattctcctaagtcatgcaaaaactaattgctagtccacgaagcatatggttcattacgtataagctcctagttcgttaaataagcgaaatctttcacgttataaatcaatttcgacctgttcaaattgcgttagcttcgggataacattgccgacgcgttaataatgttaacgtagatgattttgaattaatacttgtttagtataaacattacatctatttggcgattctcgcgtgacggcttgctgttcgcgttcgtctatccgtagacgacgcccgtctacccccgaacccgttcatctatcctgcgtgttagtagcattattttgtcgcgacacatgctttcgttaattatttagttagttgataattattaaaatagaaatctagttaagcctatcctacaattttaattggcgctttgaaaataccgattaacatgattaatgccacctcaaatgttttgtgaagtaatatttatttagtataaacgcgatgattattagtaattctcgtgtgtcgtaggtgttgtctgcgtgttgttcgtgcgtgttgggctcatcgtcgcgtgctgttcgcgcgcgttgtgcgtgctgttcacacgtgtcgtcgtgcgttttacgcacgctaatgattcatctcacctagaatagctcgcgctaagtaaatatatatttaagcaacggttattcgaacaacacactaatcgggactaagtagtaattttactcggcatgtgattattgtctgttaatatgattaagccgaattaaatattataattcatattcgcttagtatacatgtgatatccctcgatcgtagtatcagtcgtctcggttccgttctcgcgtagtcgtagatgcgaattctttgtcgcgtgcatatttatttgatctatactgttgtatggtgtactgttttctaccatttcaagaatgttggatgtatgtttgcactcgcgtagatatcgggccgttcgtggagtctgagggaattgcaggagaggaccctgagcagcagcagcttggtgaaggcaagtgtcctctgacccattatgtcctatccacttataacttaccatcccgcattacttacttgaaacctaaggattgactagctttaca

SEQ ID NO: 82762 - DNA, 472 bp, Zea Mays
atttcctcctgagccagatctgtcatttcctcctgagccagatcgtgcgagccccttcggttactggtcgtccgcaggcggcaggcgaacccctctccctccctgcgatctcttagctactcatggcaatggcagtcttaacttcctcgccgagccgcgcccgccctctccacacgagctccgctggcctacctcgtccctgcactcctgcactcgtcgtcgtcttgccgaaggagcttttgtcgccatccaccatgctgcgacacgccgagcgtcgtcattgttctcctcgccgtccgagctctgcccgagatatcgggccgttcgtggagtctgagggaattgcaggagaggaccctgagcagcagcagcttggtgaaggcaagtgtcctctgacccattatgtcctatccacttataacttaccatcccgcattacttacttgaaacctaaggattgactagctttaca

SEQ ID NO: 82763 - DNA, 446 bp, Zea Mays
gtcatttcctcctgagccagatctgtcatttcctcctgagccagatcgtgcgagccccttcggttactggtcgtccgcaggcggcaggcgaacccctctccctccctgcgatctcttagctactcatggcaatggcagtcttaacttcctcgccgagccgcgcccgccctctccacacgagctccgctggcctacctcgtccctgcactcctgcactcgtcgtcgtcttgccgaaggagcttttgtcgccatccaccatgctgcgacacgccgagcgtcgtcattgttctcctcgccgtccgagctctgcccgagatatcgggccgttcgtggagtctgagggaattgcaggagaggaccctgaggagcagcagcttggtgaaggcaagtgtcctctgacccattatgtcctatccacttataacttaccatcccgcattacttac

SEQ ID NO: 82764 - DNA, 2269 bp, Zea Mays
gcgcactgcactcttctctgcagtctgcacatctccgggaagccaaacccgagcgtcctgactcctgagttcctgaccaaacaatcccagtactgcgattcgctcgggatcgtctgcaggccccaccggccgatccatccccccgtaaggccgtaaaccgtaaccttccgccgatcgcttcaatggccgtggcctcggccgcgcggacggcaacaccggcgtcgccggcgcgactggggtcgctgtggtcgacgctggaggaccagcgcggggcggcggtgccgctgctctcctcggcctggaccctgccgacgacctcccagggcggcatcgccggggacggggagcagctgcccaaggagggcctgctccggcgggctggcggcgttgttgcccgctggtggggggcggcgtgcggcgcggtggcggagctgtgggccttcgcgcgggccgatccgcggaagcccgtgttcgcggggaaggttgcgctcgcgctcgccctcatctcgctgctcgtcttcctccgggagccgcgcgacatcgtcagccactccgtctgggcaatcctcaccgtcgtcgtcgtcttcgagttcagcatcggagcttttgctctagtagttgcagaattgtccaaacacctgggaaaactggaggaagttattcttataacaagcatccttattgttgcctttttcacaacattgacaaagctacatccgaagatgaagccgtatgagtatggattccgtgtgttcttgttgacattctgttacgttatggtctctgggtacaacactgggaaattcactgatacagctacaagcagatttatattgattgctattggtgctgctgtcagtcttggaatcaatgtaggcatctacccaatctgggcgggagaggatttgcataacttgatagcaaagaatttcactggtgttgcaaaatccttggaaggttgtgttgatggatatctgagatgcatggaatatgaaaggattccttcaaaaatacttgtgtatcaagcatctgatgatcctgtatatagtgggtacagggcagctgttgaggcatcagcacaggaagaaaccctgcttggctttgctatatgggagccaccccatgggccttacaaaacaatgaactatccttggaggagcttcaccaaagttagtggagcattgaggcactgttcctttgcagtaatggcattacatggttgcattctttcagaaattcaggcaccaccagaaagcagaagagtattttctgcagagattcaaagagtgggacaggaaggagctaaagtattgcgcgagctcggaagcagagttaagacaatgaccaagctgagttcttcaggtattctgttcgaagtgcacatggcagctgaagagctgcaaaaaaagattgatgagaagtcatatcttctggtgaacactgaacgatgggatgctagcaagcaagctcaaggaatcaaagaagttgtaaatggtacccgtgctgtggaaacggaaaacaagaacaaagaaaacaaggatgatggcaccagtgctgtcgaaaaagaaaacaaatccaaagaaaacaacaatggagggctggaacctaccatagttgatcaaactttagtgcatcagtcaaagagctttcttgcaaattcatttctgagcagatatgattcagcgtcaacaattgacggttttaagccagcactttcttggcctgctcgtaaatcattccatccaaacataccacttgaagatgaggattcccaaacatatgaaagcgcgagtgccttgtccttggctacatttgcatcactcctgattgagtttgttgccagactacagaatgttgttaacgcatttgaagagttgagtgagaaggctaactttaaggatcctgtggtggagcctactgcagttagcacaagtaatgttaggtttctcgataaactgtgcaaatttgtaggtttctagagttgacacggatcctgtgaaggctaactctaaggatcctgttttggcatccagtttccctttttaaaattaatttgggggtacggaatgtacactaaacttgtaaatgtgcaatcagatgattgcaagttgtattgctggagttcagtttacagctacagaaatcatcaatctggtaaatgttgatctctgcatctgctgtattgtgttttcagcgccctgactgattgcacgtatgtatatcctgtgaaaagccagcttttcatatatttttttgcactcaccaggaa

SEQ ID NO: 82765 - DNA, 2346 bp, Zea Mays
agcagacagagcagcgcactgcactcttctctgcagtctgcacatctccgggaagccaaacccgagcgtcctgactcctgagttcctgaccaaacaatcccagtactgcgattcgctcgggatcgtctgcaggccccaccggccgatccatccccccgtaaggccgtaaaccgtaaccttccgccgatcgcttcaatggccgtggcctcggccgcgcggacggcaacaccggcgtcgccggcgcgactggggtcgctgtggtcgacgctggaggaccagcgcggggcggcggtgccgctgctctcctcggcctggaccctgccgacgacctcccagggcggcatcgccggggacggggagcagctgcccaaggagggcctgctccggcgggctggcggcgttgttgcccgctggtggggggcggcgtgcggcgcggtggcggagctgtgggccttcgcgcgggccgatccgcggaagcccgtgttcgcggggaaggttgcgctcgcgctcgccctcatctcgctgctcgtcttcctccgggagccgcgcgacatcgtcagccactccgtctgggcaatcctcaccgtcgtcgtcgtcttcgagttcagcatcgtgctgtgatgcaggtgcaaccttaagcaaagggtttaatcggggattggggacactaaccgcaggagcttttgctctagtagttgcagaattgtccaaacacctgggaaaactggaggaagttattcttataacaagcatccttattgttgcctttttcacaacattgacaaagctacatccgaagatgaagccgtatgagtatggattccgtgtgttcttgttgacattctgttacgttatggtctctgggtacaacactgggaaattcactgatacagctacaagcagatttatattgattgctattggtgctgctgtcagtcttggaatcaatgtaggcatctacccaatctgggcgggagaggatttgcataacttgatagcaaagaatttcactggtgttgcaaaatccttggaaggttgtgttgatggatatctgagatgcatggaatatgaaaggattccttcaaaaatacttgtgtatcaagcatctgatgatcctgtatatagtgggtacagggcagctgttgaggcatcagcacaggaagaaaccctgcttggctttgctatatgggagccaccccatgggccttacaaaacaatgaactatccttggaggagcttcaccaaagttagtggagcattgaggcactgttcctttgcagtaatggcattacatggttgcattctttcagaaattcaggcaccaccagaaagcagaagagtattttctgcagagattcaaagagtgggacaggaaggagctaaagtattgcgcgagctcggaagcagagttaagacaatgaccaagctgagttcttcaggtattctgttcgaagtgcacatggcagctgaagagctgcaaaaaaagattgatgagaagtcatatcttctggtgaacactgaacgatgggatgctagcaagcaagctcaaggaatcaaagaagttgtaaatggtacccgtgctgtggaaacggaaaacaagaacaaagaaaacaaggatgatggcaccagtgctgtcgaaaaagaaaacaaatccaaagaaaacaacaatggagggctggaacctaccatagttgatcaaactttagtgcatcagtcaaagagctttcttgcaaattcatttctgagcagatatgattcagcgtcaacaattgacggttttaagccagcactttcttggcctgctcgtaaatcattccatccaaacataccacttgaagatgaggattcccaaacatatgaaagcgcgagtgccttgtccttggctacatttgcatcactcctgattgagtttgttgccagactacagaatgttgttaacgcatttgaagagttgagtgagaaggctaactttaaggatcctgtggtggagcctactgcagttagcacaagtaatgttaggtttctcgataaactgtgcaaatttgtaggtttctagagttgacacggatcctgtgaaggctaactctaaggatcctgttttggcatccagtttccctttttaaaattaatttgggggtacggaatgtacactaaacttgtaaatgtgcaatcagatgattgcaagttgtattgctggagttcagtttacagctacagaaatcatcaatctggtaaatgttgatctctgcatctgctgtattgtgttttcagcgccctgactgattgcacgtatgtatatcctgtgaaaagccagcttttcatatatttttttgcactcaccaggaa

SEQ ID NO: 82766 - DNA, 1515 bp, Zea Mays
ctaaatctaaaataagaaaagaagcatattaactaactttctaaaccgcccgatcgggctactttgcataacccgccaactaattaaaatctcacactatttaatagtctactttccaatcgtgtcagcaactataacactacgcttactaagacatttcgtcatacaataaacacaaccatgacacaagagctacaacatgataattatcgcgaccaccacatttatccaattcatttaatacctcgactagtagcaatagtgaaatcgcgcactaatactaaattcactcgaaactatggcatcaatagcaggttctagttcgagtatttccacaaacaattagaatcggaacaacacttgagaggaaaacgtcggctagctgatttaatactaacctatttttaacgtcatcgattcaccaacatcgtgtactggtctaccgaaatctccttcgcctaaaccgtattttaaacccgagcgtttcacgatgtgtctacgccacaattgtgatcacaagcatatcgccaatattaaatcaattaaattatcctagtcatttgtatccaccaccaaagcactcctcatctaaattacattgtcgcccaaactttaccatatacatataaaaatgtctaattaattattattaccagaaattacataaacattaataccctatttttaaataaaaatagcatataatgactatcattacgaccagtaatttaatccaacgcatccaatcattcctcatactaacgggaaacaaatggatcagcttaccatgtctgaatcgactcggagtcgtgatttcgatgaggctatctggtttgaactattcactgaacaccatgtgtgtgtcgttctccccaaaatcaaacaatcagcatcgcagtgtcgatcttcccaacacacgacgagcacgagtccactcattttaccgaacagggagctgcaggggcgcatggccagtgagcacggtgaagcgatggcagcgcagatcgagctcgcggcgcggcatgacatccatggacgcgagctagatgtcggacatggagatgaaggctcaacggcgcacggcaaggtcaatgacgcgctgtggatatggaggagtctgcaggggttcatggtcggaccggcgactggccgacgaacttgatttggcagtgggcgatggctaggacgtgggggagccgggactacagtgctagccaccagcgagctttgatggcttgccgtagctgagaggagcacgtagctagcagaggcgctgtgtagagaagggagaaactggggacggtcaaggtgagcgacagctggggcctaggcaagctttgccgaccggcaacgtgacgaagacgccggctgaacctagagcagcaccagaggagcagagtgcactgacaagctcagttctatggctaggcaccggtgaagaggaagtgcctccacacagtcacacgatgaaaagatcatggagagagttttgagtggtgggagataaaggagaac

SEQ ID NO: 82767 - DNA, 4349 bp, Zea Mays
ctagaacccttgtttagcatttgcaattttgttttcagtttggctttgttcagtttgtgtccgtggtcgagtcgtgttgctggtttagggtgtatcttcgtcgtagatcaactgcaccttcaccgctattccatccaccattacctagatcacaagtcgatccaccccattaatcaacttgccctcgctagccgccgccgcgccagccctagatagattgcagatagggaagttttgccctaaccgcgccgccttctagtcgtgcctcccaaaaacataacttgaggtaccttccttaaaccaggcataacttttcgctcggttgttcaaaaaatctaaaatttttacaggagcttggtgacgccattctgaggccaaccaaaaaaatgtttggtctcgataaaattgtcaaaaaaaattcaggaaaataaagaaaaaattatcaaagctcttacacgctttttagagaacttgttcattttctgtagaccacatctgatctctgttttaggtgaaacttggtgtagctcctattttgttgcttcttgtgctgagaaaaatataaaaaaatcatacaaaaaaagaaaaacaaaatcactagtgaatcctactagtgcctttttggcctcgctagtacaatatttacggtactgccattctgctagttccattgttctttgttccaacctgttgtgctatgcctcagatacatctaagtattactcctaccatggtgacgtgcatcagtatcatattcccaaggtctacccaacaaaagagaacaagcttccataggtactacatcgcaatccgcataatcagaatacataccaatggagaaatgcactcgtaccatgtgtgttaccttaaccttgcctgaatcattgatccactgaatgtagtatggatgtggccgtggacgtgtggtcaggccaagcttcttgaccaaatctgaactcaccaaattattgcagcttccaccatcaataataacatgtgcacgccgattctcgatggtgaagaaagtctggaacaaattatggtgttgctgcttctttgatgattcaggctgagaactaagaacacgctgcaccatgatgcttcgaaggttcactatagcatcagcaccaagcatggcatcatcattggcagcaacatcactggagtcatcatcgtcaccctcagcgtcggaagtactaatgtagccatcatccgtagcaatgtatgttcgctgactcgggcaatccttcttcacgtgaccaatcccatgacagcggtggcaaacaatacccgaagaacgaccactggaagttgctgcaggtgctagtgaattatgtttcttggtgggtacctgcaaaggaaggttaccaacatgtgcagcaggtgtcgagggaggtcgcgtggacgctggagtggtcgaaggtgtatgactcgaggcaggtgtgtgcgtccgtgatgtagaggaggcgccaaaagtagccctaggtcgatgttggcgtccctgcaattccgtctctgcaagcatagcaaactggaacaacttgttgacagtgttaaattctttgtaatccataatgtcctgaatgtcacgccgcaaacctaaataaaaacgacaaagagcgtcctcatgtccctctactgtcccacaatgctgcaatcccttctgaagctcagcataataatcttgaacagatttatccccttgctctaaacgcatcaatttcttacgcaattgtctatgataagatgggggaacaaatctatcgcgcatagctaccttaagatcttcccaagtcgtaggtgctctaccatccccaactagaccagtccaccagacactagcaaaaactttaaattcactagtggcttgtctaacttgatgtcgttcaggtacaaggtgggcagcaaatttctgttctatcgtcatctcccaatcaagatatccctcagcatcataatgacccgaaaagatggtatagaaaatttaatcttagcataagggtcgtcaggagcacgattgttattaccttgctggcagtgtggcataccttctatgttttgatgaagatggcaatgtaggtgcaaatctctagtggccgcttcatcataattaccttcttcatcaaacacccatcatcgggaagacgtggacgaggaggtggtggtggcggtggcggtgcttgttgttgcgtctccaacacagcaagcctgtcgatgatctgggacaatcgtcgatccagcctctcgtaagtcttgccatggttcatgtcaatgaaggcatcatgcactgacttgtggaccgtctcctccatttgctccttcaggagcttgttgtttgcctcaagatcttggcggctaacacagtcatcgaagtctgtagggatccttgcttcttcttcgtcgcctgccatcgaaacacaaaaataggaaacaaacggtgaatgttatccttgtaggaaatgggtaacgcctaagaggggggtgaattaggacttctaaaactttcactaaacaaggccacaaataaatccctagagcaaaacctatgcaaataatcaaactagagagtgcaaactaggttttgtctaagtgttgctatctctaccgcaatggctaagtttcaatctacactatataagtatgaatacaagattgaaacttaaatgcttaatataaatgcggaagcttaaagagcaaggtagggaatgcaaactcttatggatgacaccggtatttttaccgaggtatccggaaccacgcaaggtgtggcagaacctcccaagttattgggcccacatgcacctgtccttgtctcaaagacctcagacgactatgcatgtgcaccatataacttaacaggatccgtccgagtgtcccaaggacctcggataaaccacttacaaccagaaccgcaagattaagtaaacacaaatcacacaccaacattttgcagcggaatttctttattacaaaaggttacaagttacatcaaatttacattatgtttattggagtgattacaaagtgattcaaagaaataaactttgaaatgttaaagtatttatagttttgaaatatatgctagcttaagtgatcatcctcaataagaagaataggagagctactttaacctataagaaggccgagcccaccggcacttaacaccatcatcagcagcacaaaactataacctaaaaacaacagggaataaaacactgagtacggaattactcagcaagacttacccgactaaagaaaagactctcaaggatatgctggatttaggaatcaaggaaaaagttttagcaagaatcaaattagatacttttgtagaaatagcttactaaagtgagtccttactttcaatattttaacgctagattaaatattaatagactttgtttgcatctggtctaatttcaccatctcatcaatacaacatcatttttactcataatgtttacatcctgacttaggttgtaggtcggatatcaagtctccactctctgtggatataacggcgatccgaatcgatttactcagctgaggatctctaaccacacgacatatgtagcacttaacccttgcatatgtcaaccattcacacagatcctccacaacgtgaaccggtccgcgctacccgggagcacagtactcctccaaccagcctctagccaggagggtacacgctactcccaccatctcccacgcccagtgcgcggttgtcttttcacgtatggaatagccgggttcaagcttaccctgtcccatatccagcgcatgtggctagataagatagtccttgatcatacaggcctacatacgcatccaatccttaattaacctgggtggagcatcacctgttcctaacccaagtctcgatttaagtacttccatccttaggattgttttgtattccttaggatgaaaagagcattatagggaactttgcagtaagatcccaccatgctcccaatgaaaatattcttgcaggtagaagccatccttccttaggataaacctgagctaggcataagtgcaaaggacaacctctatatgcttacaagcagggctaagcattttttttgtaaatcatattttgatacttcaccagaagtatctatataagggatggatttcaaggtagccaatgcatcgaagggttttcaagcaactcctataaacctaatgcacaatcactagacttaaagtgtgtaaaaataatttaaaaacacaaggaaggggttgcatgcaccggggcttgcctggaataaacactacgttagtgtttgttagacaacgttcacttggcgatcatcttcatcatggttcttgatcaggtcatccat

SEQ ID NO: 82768 - DNA, 2836 bp, Zea Mays
agcaaacaaaggcgtcgcggcatcgagccaagagagaagccaccgacgccaatccgcgcatttgtcgccgttagttcttcacagagaggtcagggaagacggccggggtacaccgatcgctcgcgtagcatccttgtaccgtggggttgatcggagtcatcgcaattgcttgctgtcgtttcgtcgtgccaccgtggaatccgcgatccaccgttgccatctccgtcagtgcctccaccatcggttagtgaacctcctccgagttcgccttgtgctcgcctatgtgtaagacccatttgtgctagattttgccactggttcgtccgatccgcccactcatcgcagagccgccaccgctaggcatggaggcactgtcgcgctgctgtccaagagaagagagagaaatgagagataaggttgagccgctgatttgaatccggagggttaggatgaaaatgttgtgtaccccttcacaacattaaaaccaggctgtggattcctagatgttcggctctggttgatcatggtcgtcgatcccgttatgtgtggctccgggttaagcaggtctgcgtttcgatcggatccaattgggggtcgttggatgaagatctaatgactcgcattgagtatcggttcacaatttcatagatctaatcagggacacccgtagtcgatcatgcggccctggtacgacaataccccttcaccgagcaaaaacaacaaaagagaccctacacattcttgaaataaacctgcggtccacacgtgtgtaaggactatcacagttaggtccttattttcacacaacagcccctgcacttgttagaaatagtatccgccattcaacagtaattagataattgtaaattgaatatagaaatcaattcttagtatgaaaataattccatgaacttaggaaatccataactaatccattttaattccgatttgacctgttcaagttgcattggtttcgtaagaatatttcccatacactaacaacactatttttttttatcaaatcacatatttttattggatattttgtttaacctttgtttaatagattaatcttgctaatcaaagttaagttgtctataattataatctgactaaaatatgatctcacatgaattatattaatagaatatagtttcattgtttaatcacctacaacttcagaaaaccacatcttttcaaccataactacgattttagtggttttcgaacctacgatctcgtagcgacgcgtagaatattcttacatagtttgttcttatgctttggtgtaatgttaccatatccattatttgcatgtttgtatgtattgctatgcatagaagcgaggcgacgaggaatctgaagcccaacttttggggcagcatcgggacaacaaggttattgcaagtataaggcaaattgtgtccttgatcacattctttaccctaataatgatcttgataatcactgtggcatgcttaggttaaattgatgggacctaataggctacctagttttgtttaccatgcaccttatatacaaatgaattgttgtgtagtcttgctattgctctacctggtttcgagattaatgctatatatcaattatgatcatgctttatcattattgatgtattatttattgttcatgataagtttattgtgttaattagaacatggagcttaacctgatataatagtgctaccacaagggcagtacaggaggcccttggctgactatttatgaaagctagtggaggactgccttacccgaaaggggcaagggcggtgtgaggaactgccggtatatgcaggttctcgggtcgatcatgctgcgatgactttttggacgagggatttctaaatcgcccccttctcgcagaaaccatagcgagttttctaaggtagtgcaactttgtaaaggcctcgtagtggatccctagccattcacctcacaagtgtctaagggccttgcaaaccctggctagacgggatacacggcttgtgggtaaagggtacaacctctgcaaagtgcaaaactggtatatcagccgtgctcacggtcaagaacgactcaggactctcgcatgattaatttatggaattaaatttaatctgtcatttgcattgcattatgggatttattattaattgtgatcaattatttaaattgggttggtatacacttatacatgataattgctaaataaatttgaccaacttattaaaagcaatgctcagccttaaccattttccttggtaagtcttgcacttcacatgagcccccaccataagtgagctcatgcacattattccccacacttgctgagtgatgaatgtatgtgagctcactattgctataatcacatcaggtcaagaacatgtaccactcgagatcatgaaggatgctacgatgagtatggagaggtctaggtcgtcgtttcccagtcaactaggataatggaggatcgttgtcgtcatatgatatatttatttagctattttgtacagaacacctattatttaataaagatgtgacattgctttctataccatgagtcatcatatgtgtgagacttgatcctagcacacatttcagacgtgcctgggtttgcccttaaattagggtgtgacatagaatcacttcaaaatatgtagacaacaagcatagcgggagaagaagtgattcgtgaagtatgagcacaaaaagatcagagattctaaaccaggttagaaaacttgatttcgaatggggttttgttggggttttgagatttcgatcaaaaactattagaagcaatcatagtacgagatcaattcataccagagatgagcag

SEQ ID NO: 82769 - DNA, 523 bp, Zea Mays
agccaagagagaagccaccgacgccaatccgcgcatttgtcgccgttagttcttcacagagaggtcagggaagacggccggggtacaccgatcgctcgcgtagcatccttgtaccgtggggttgatcggagtcatcgcaattgcttgctgtcgtttcgtcgtgccaccgtggaatccgcgatccaccgttgccatctccgtcagtgcctccaccatcggtcaagaacatgtaccactcgagatcatgaaggatgctacgatgagtatggagaggtctaggtcgtcgtttcccagtcaactaggataatggaggatcgttgtcgtcatatgatatatttatttagctattttgtacagaacacctattatttaataaagatgtgacattgctttctataccatgagtcatcatatgtgtgagacttgatcctagcacacatttcagacgtgcctgggtttgcccttaaattagggtgtgacatagaatcacttcaaaatatgtagacaacaagcatagcgggag

SEQ ID NO: 82770 - DNA, 1871 bp, Zea Mays
tctctcttccctccttttccacccagcgacggcgagcgggaaatgccgggccccaaaagaggccgcatccttggtgctttctgaaccttctttactttgtccccaaatggcctcctcgccctcttcacgtttcccttcaccataagcacaggcaccactccccccctgcaagctcctccctctctcggctcttggttcttgcattactctgtcagcccagaggcagagcaagtaagcaaatggttgctatggcggcgccagggcgagtggcgctcctggccgccgcactcctgttcggcgccttcttcccatccgcgttcgccacgtcctcgtaccccgcaaggcttgcgggcaggctcctgtccaccacggcgtcggcggtggccaagcagctgtggtcgctcaaatcggccgccaccaagacggcgacggcgtccgtggcggggcggtccatggtgcggtacgagggcgggtacgcggtggacacggtgttcgacggcagcaagctggggatcgagccgcacgccgcccagatcaaccgcgccggcgacctcctcctgctcgactccatcaacagcaacatctacagggtccagctgccgttgtcaccatatagcagaccaaagctccttgctggttctccagaaggtttatctggccatgttgatggaagactgcgagaagcgaggatgaaccatcctaaggggttcactgtggatgataggggcaacatttatgttgcagatgctatgaacatggcaataagaaagatcagtgacacaggggttacaaccattgctggggggaaatcaattagaggagggtacatagatgagcccagtgtcagtgatgatgcaaaattctcaaccgattttgaagtccaatacatcagcagtacctgctctctcttggtcattgatagaggaaaccaagcaattcgagaaattccactgaacgatgatgactgtgcatatcagtatgaagctggttttccactagaaacctcaagcgcctccaagacccagcattgcaagtatccctccataccagaaacctttaaacccttatgttcgtcaaccattcatcccaagagaagaaactgcaagacaggaacctgaagaggggttcttcacctcagctggaaaacttgttggaggggcaaaatcatctgtggctgaggtatttggtttcaagaagaagagcctgagcaacccataccatcagcagcaacgaagagctaacccttggccggtgcaagaaagctatgccatcccacacgacgaaccacctccggcgctggacacgagagcaccagcccctcagaagaactacagctccgagaagatccactacgtccgccatgggcacccgtatttcaacagctgggacggtcaccgtctccctcagcagcagccggaccagcagctgtatcaccagcagcagcagcagcacctgcagcagcacaggcagtgctctgcaggcccccagacgttttacgagcagagttgtgaggctacaaacgaggtcgtctttggtgcggtccaggaggtggacagcaagcggcgaatggtcgagatcaaggctgtcaactacggagacacattctatgaacagtacgggatgcggtaccgcaacaatttcatcggctacaacaacactaacaactattgaacagcctgtctatttctttgacttccctgtctctcttttcctttctttttttccatcttagttacgagttatttgctttatagtatttatttaaagtggcttttctataatagtattaatagattaggtttctctataatagtatttacaagtgagcaacttctctaaaacattatttcacctttatttcacccattctt

SEQ ID NO: 82771 - DNA, 1965 bp, Zea Mays
tctctcttccctccttttccacccagcgacggcgagcgggaaatgccgggccccaaaagaggccgcatccttggtgctttctgaaccttctttactttgtccccaaatggcctcctcgccctcttcacgtttcccttcaccataagcacaggcaccactccccccctgcaagctcctccctctctcggctcttggttcttgcattactctgtcagcccagaggcagagcaagtaagcaaatggttgctatggcggcgccagggcgagtggcgctcctggccgccgcactcctgttcggcgccttcttcccatccgcgttcgccacgtcctcgtaccccgcaaggcttgcgggcaggctcctgtccaccacggcgtcggcggtggccaagcagctgtggtcgctcaaatcggccgccaccaagacggcgacggcgtccgtggcggggcggtccatggtgcggtacgagggcgggtacgcggtggacacggtgttcgacggcagcaagctggggatcgagccgcacgccgcccagatcaaccgcgccggcgacctcctcctgctcgactccatcaacagcaacatctacagggtccagctgccgttgtcaccatatagcagaccaaagctccttgctggttctccagaaggtttatctggccatgttgatggaagactgcgagaagcgaggatgaaccatcctaaggggttcactgtggatgataggggcaacatttatgttgcagatgctatgaacatggcaataagaaagatcagtgacacaggggttacaaccattgctggggggaaatcaattagaggagggtacatagatgagcccagtgtcagtgatgatgcaaaattctcaaccgattttgaagtccaatacatcagcagtacctgctctctcttggtcattgatagaggaaaccaagcaattcgagaaattccactgaacgatgatgactgtgcatatcagtatgaagctggttttccactagcacagggtttgcattgctttgtgctgctggtttctttggttatatgcttgcattgctccaacaccggcttttaggaatgccgtcaacaatcaataaacctcaagcgcctccaagacccagcattgcaagtatccctccataccagaaacctttaaacccttatgttcgtcaaccattcatcccaagagaagaaactgcaagacaggaacctgaagaggggttcttcacctcagctggaaaacttgttggaggggcaaaatcatctgtggctgaggtatttggtttcaagaagaagagcctgagcaacccataccatcagcagcaacgaagagctaacccttggccggtgcaagaaagctatgccatcccacacgacgaaccacctccggcgctggacacgagagcaccagcccctcagaagaactacagctccgagaagatccactacgtccgccatgggcacccgtatttcaacagctgggacggtcaccgtctccctcagcagcagccggaccagcagctgtatcaccagcagcagcagcagcacctgcagcagcacaggcagtgctctgcaggcccccagacgttttacgagcagagttgtgaggctacaaacgaggtcgtctttggtgcggtccaggaggtggacagcaagcggcgaatggtcgagatcaaggctgtcaactacggagacacattctatgaacagtacgggatgcggtaccgcaacaatttcatcggctacaacaacactaacaactattgaacagcctgtctatttctttgacttccctgtctctcttttcctttctttttttccatcttagttacgagttatttgctttatagtatttatttaaagtggcttttctataatagtattaatagattaggtttctctataatagtatttacaagtgagcaacttctctaaaacattatttcacctttatttcacccattctt

SEQ ID NO: 82772 - DNA, 1624 bp, Zea Mays
attaccatcttagtagcctcaatatgagtttcaacccatttctttgcatgtgctaatttttctgatgcctgaaatgttagatacgtagacatataaatggtcattttatttgtgtaattcattttgaaattggaaataaaagaaactagtatgaaaaaggcacaaaaacattctgcatagcaggtttcccatgttagctccagtgatctgagacaacctcctacaaatgatgacgtctatagcaatgagagaacaagaacatggaaattgtagtagtaaatatttgtggtcagtgatgggagaacataagaatggaaattgaagtgataaatatttatggttctgctcttaccacataatgagcatattgtgccgctagccaaggtggtaaccatgctttatgaacctgcaaaaggaaatgaacataaacatgcatatttgcactccaaacaccatccatacgtcaaagtatagaatttaaaatttcaatggactttaggctctagtatagatatctaatttaatgatctgctagtgttataataatgtgttgcaagctttagacttgagttcttattaattatttttttctacatctcctgctagtgtcataagaatagtactataacctcttattaatttttatttttttctttatttttcccacatctcctgcagtgaccatattgtccctctctaattttgcatatcttcctcacgaacagcaagcaaaaactcaaaaagaatatacttagtcttagaaccatgcttgggatcacaggatcataaaagtacaatgatcgaaacgaagtatgaggtagcgattgagtcagttatgcgaaattgaacaaatcataacagtcatcatgagtcagttattgcccagcgattgggtacgattctatctgtccaagcctaacgaattaccaacaaaagagatatagaaattgtacacgtggatgataaacatatgaaataagcatcctattgcatcctacagtttccacgacatactaaaatagtgcatcagtcaaccagccacaaaaatacaaagcatgcgtgtgatcaggagcaacatgtcagaaaaagggtctttttggtgctctatttcacgagcaccggatcaaatagctatgaatagaacaacaaaggatacacctatctataacttactggcttacaaaatcaggatcgaaattcaatggatttatgatttaaaggcatgtcaggtcaactgcggtaacccaactagaccagaccaagcaaacaacttgagttctacaaactgacaaggatgtggctatcagcttcagaaaagcaagatggaagcaacacagggagaagagactaccatctactggaacacagtggggcaacgactggcgccgccatgacgtgggcggtgggcagcgggcgtgggctggtggctggagcgaggcgttcgggcgcaggcgctaaccggctggccgattgcgaccggctgccaggcgaaggcgggggcgcttgctgtggtggcacggctggcaagggctacatggtgaagcaaggcgaccggacgggggcgctggctggatggggcgatgacaacgaagaggatggatgcggttgttgccgctgggaatga

SEQ ID NO: 82773 - DNA, 502 bp, Zea Mays
catactatgatgatgttcgtcacaaaacacttttgttcatcacaaaacatttggcccaagcgaggccattttattttataactatcatcgatgtcaatgtagcacaagaagcacaacccattataattgaacaactatcaatgatcatcacatatacttatcaacatattatcatagatattattcaataacaaccaaatcttggagctaccagaccaacattgctacttctaaccatgtagcatcagcgccattgttgcttctctttattgcagctacaagatcaacattttgaagacaaccgatttgtacataaggttctgcatttttcgtgaggaccaccaattttgtctttaacaggaatccatttcttcaatcataggaaataataatgtcagtcaactgttagcccaagataaaacagaagaaatcaaagtacatgaataaatgggtattaccattttagaagtcttaatatgaagttcagcccattaacatcttg

SEQ ID NO: 82774 - DNA, 1737 bp, Zea Mays
cgacttgaataataactgcccgacgacgacagccggcagaccacattttttactgcgagaggctcctcgtcccactttgcattgcacccccgcaagctctcttcccagctcaactcaaatgcaagcaaagatcgagcagaaacggcagcggctgctgggcatcgcgcccgatctgccgctgcacaagctccagctcgtcgtcgccccgaccgcggcctcgcttccggcgctcgccgtggtcgccctcctcctcctcctcgccacggcgcgacgcccgtgctccttcctcgacgcgtaccgctccggcgtcgtctccctgccttccccgtccagaacctcgccgccccacctcgggcgctctgcggccgccgccagggtgccgagcgggtgcgacatcttccgcccgggccagtgggtccccgacgacgacgcgccgtactacaccaacctcacctgcccgctcatccaggagcaccagaactgcatgaagtacggccgccccgaccgcggattccttcgctggcggtggcgccccgatggctgcgacctgccccgcttcgacgccgccgccttcctggacgccgtccgggacacgtcgctggcgttcgtcggggactcgctcgccaggaaccacatgcagtccctcatgtgcctcctgtccaagacgtctcgacgacgacgaacccagagttccggacgatgcgctacgaggcgtacaacttcaccatggccatcttctggtcgccgttcctggtccgggggcaccagccggacccgcggcgccacatgtgggacatctacctggacgagccggacgcggcgtggcgcgacgccgtctcgggcttcgaccgcgtggtcctgtcggcggcgacctggttcacccggccggccatgttctacgaggccggcggggggcgcgtccgcgtcgtggggtgccactactgcctggtcccgggcgtccccgaccggacgctgcgctactcgctgcgcatggcgctccgctccgcgctccgcgtgctcacggggccccggttcaacgggacggtgatcctgcggacgctgtcgccgacgtcgcacttcgagggcggggagtgggaccgcggcggggactgccggcggacgcggccgttcgcggccaacgagacgcgggtggcggggctggacctcgacctccacgcggtgcaggtggaggagttctccagggccagggccgaggcggaggcgtctggcggggggacgaggctggcgctcatggacaccacggcggccatggtgcttcggccggacggccacccgagccggtacgggcactggccgcacgagaacgtgacgctgtacaacgactgcgtgcactggtgcctccccggccccatcgacgcctggaacgacatgctgctccagatgctcctcgcggacccatcttgatgtccgtgtgtttcttccgctagctccaatttgtcccaggaaaacaaactaatttgagcgcgcaaatttacaaaactagaccggaactaactgagctgagcgtgcacgaatccagcggccacagctgggtaaaatgccgtgccactatggcaatttgtatcagcttgatctacagaacaattggccgagcaatctccttcgtcggcctatacttgtttgtctgcgttttggcctgggttaattgagctactgatctgaaccgtttactcctccatcgggcggtccgaaagatttgttcagatgctagggtgg

SEQ ID NO: 82775 - DNA, 3392 bp, Zea Mays
gtgaaagtatcctttggtactctgtgggaaccatgccctccaagagctcttactcggctgtttaccctggatgcttagttcatttgttgatgtttgtggtcatgtttgaagcacagttatccctcctaaaaggggtgtgtgtgttttgttcgtggagcattaagatgcctagcccttctatcggatgatctagatgatatgtgtgttccaaagctagtgccagagctattcccatcactgtatagaataatatcatctcctcatctgtatgaaaattctcttcgtgcaaaggcttttgcaatagtccattcatgtatttctatgcttggatcaatgagtggtgtctataagagagatacagctagtctgatgacttcagtgcttgatccactaatagagcaattctccatagttctaaattatccggtgcagtcccaaaatcctgatgactggagcatgcagatggaggtgctcaaatgtttacttcagcttgtccagaactttcctagattacctgaagctaaaatttctgccattcttccagcactgtggcagacatttgtttcgtcattcaagacctatcacctgtcatacattcaaggtgcagaaactttggattctattagttatgattctgatggcagtgaaaaaagtcttgagtcattcgagattcagttatttgagctatggacaacaattgtggggaattctagattagcaaaggttattgggggaaacattaaggagctagcatactatactatagccttgcaacagataactgaagaacaggtgcaaaactggtcacgcgatgctaaccagtatgttgctgatgaggatgacctaacctatagctgtcgtgtgtctggatctcttttgctggaagagctagtaacagcttatgaagattatggaattgactcaattgtggaagcttcacaaatgcgttttcatgaatcacgagaattgaaggaagcgggttctgctgactggtggagactgcatgaagcatcactttttgctttaggttcactgtcagaacagttgtgtgaagcacaggattctggtttgacaaaatacaatgtgcgggatttacttgagcaaatgctaattgacattatgggaacaggggtgcatcagtacccatttctccatgcgcgtgcattttctagtgtggctaaattttcttcactgataagtaaaggggtcagtgaacagtatctatgcaatgcggcccatgcgattgcctcagatgtgccacccccggttaaagttggtgcttgtagggcactggcccaacttttaccagaatctaatcagaatctgattcagccaaacattatgggcatactttcatctcttgttgaccttctgcggcaggcatctgatgaaaccctgcatcttgttctagaaaccctgcaatcagcaatcaaatctggtggagaacaatcaactttaattgagcctgtcatttcccccatcatactggatgtttgggcacagcacattgctgacccgttcatcagcattgatgctgtcgaagtgttagaggctatcaagaatgctcctggatgcttacagccacttgtgtctcgaatccttccaacaattggatccattttagtgaaacccaaggtccagccggatggactggttgcaggttcactggaccttttgacgatggtactcaaaaatgctccagttgctgtggttaaagcagtcttcgacacatgctttgtttctactgttcaaattgttcttgaaagtgatgaccatggagagatgcagaatgcgacagaatgcttggcagcattcatatcaggtggccggcaggagttgcttgtctggggtggtgaacaaggacaaacactcaagatgctacttgatgcagcttcaaggcttttagatccagcgttagaaagttcagtatcactatttgttggaagctttgttttgcaactcattttacaaatacctctacacctgtctcctcacataccggaccttattgctgctattatgagacgtatgcaaacgagcagcattgcaggattgaaaagctcccttattgttataatagccagattagtacatatgagtgcaccaaatgttgatgggttcatcaatctattgctttctatccctgcacaggggtatgacaattcacttgtttatattatgtcagaatggtcacaactacaaggtgaaattcagggagcctaccagataaaggttacaacgactgcattagctcttctcatatcaactcgtcatcctgagctatccaaggttgaagttcaagggcatcttattaagactagtgcaggtataacgacacgttcaaaagctcgagtgactcctgatcaatggaccaagattcctctcccagttaagatcttctcattgctggcagatactttaactgaaattcaggaacaaattggtgctggtgatgacgatgactccgaagaggataatgactgggaagaagttcagaatggtgatgctagtatatcagatgatatcatacactcagcatcggttccttcaatgactaatccatcagttgaacatttaaatgcaatggccaaggtttttgatgaggatgatgatgatagttatgacgatgatctgacaaaaaacgaccctcttaatgaggtgaagttagcggacttcctaacaaacatctttgctaacttgtgggagaataatcgaccaatatttgagtatctttgccagagatcagctgttgaaaaggttttgaggaggtgaagcgttaacttgggatcctgtcttccacctttcgggatataatatatcttcatattagttatcgagtcctgtttgcattgctgtggactggttttcttgctcattatatgttcattggtgtaaactgatacatctctgaagccggtgttatgaggttttgttagtgtaggtttctttatgttctttgtatttaaaatctacaagatgtgagtatttgttgtaccgggtgtggtgatgttgggtattcatgtctgaagaattcccggcttgacttgttcttacgttgaattcctccggagggaccttgattccttggctttattcatcaatttcatgcatgcctatttggaggaacgccacctttggtgtttggcaggagcggttaagctcagggagttgggtcccggggttggagttccttagggctctactagtgtgtgcggtggtcaagtgttttctccttccttggtcaagtgtttgcctcggttcaacccctcactcttggtttggagtacgggtgtagtttttcttttgtaagaaccttcctttttattctatcttaatttaaagatgcagttcttctgtgtatccaagatttttttcatttatggactagttga

SEQ ID NO: 82776 - DNA, 3867 bp, Zea Mays
cgcttcgttatataaaccctagactaaagcccccgagtccctccgcccccgctcgccacaaccactgcgcgtgatcccatttcgaaacaaaaaaggaggagcgcgctcgcactcaactccgcggagccccaatcccagcgtcgcctgcggtttagatggaggcgcacggcgaccagcggtggctggtggattgcctgacggctacgctcgacaccgcgcgcgatgtccgcgccttcgccgaggagtcgctccgccaggcctcgcttctccctggatatggagctgcccttacaaaagttacaatcaacaaagagatctcgtttggtttacgacagcttgctgctgtcttactaaagcagtttatcaagcagcattggcaggaagacgaagagaattttgtgccccctgttgtttctgcttcagaaaaggtggtcatacgacagctcctgcttacctcattggatgattctaatgggaaaattcgcactgctattagcatggctgtagcagctattggacagcaagattggcctgaagactggcctgagttacttccggttctcttaaagttaattggcgatcaaagcaatgggaatgaagttcgtggagcattaagatgcctagcccttctatcggatgatctagatgatatgtgtgttccaaagctagtgccagagctattcccatcactgtatagaataatatcatctcctcatctgtatgaaaattctcttcgtgcaaaggcttttgcaatagtccattcatgtatttctatgcttggatcaatgagtggtgtctataagagagatacagctagtctgatgacttcagtgcttgatccactaatagagcaattctccatagttctaaattatccggtgcagtcccaaaatcctgatgactggagcatgcagatggaggtgctcaaatgtttacttcagcttgtccagaactttcctagattacctgaagctaaaatttctggcaaaatttgtgcagccattcttccagcactgtggcagacatttgtttcgtcattcaagacctatcacctgtcatacattcaaggtgcagaaactttggattctattagttatgattctgatggcagtgaaaaaagtcttgagtcattcgagattcagttatttgagctatggacaacaattgtggggaattctagattagcaaaggttattgggggaaacattaaggagctagcatactatactatagccttgcaacagataactgaagaacaggtgcaaaactggtcacgcgatgctaaccagtatgttgctgatgaggatgacctaacctatagctgtcgtgtgtctggatctcttttgctggaagagctagtaacagcttatgaagattatggaattgactcaattgtggaagcttcacaaatgcgttttcatgaatcacgagaattgaaggaagcgggttctgctgactggtggagactgcatgaagcatcactttttgctttaggttcactgtcagaacagttgtgtgaagcacaggattctggtttgacaaaatacaatgtgcgggatttacttgagcaaatgctaattgacattatgggaacaggggtgcatcagtacccatttctccatgcgcgtgcattttctagtgtggctaaattttcttcactgataagtaaaggggtcagtgaacagtatctatgcaatgcggcccatgcgattgcctcagatgtgccacccccggttaaagttggtgcttgtagggcactggcccaacttttaccagaatctaatcagaatctgattcagccaaacattatgggcatactttcatctcttgttgaccttctgcggcaggcatctgatgaaaccctgcatcttgttctagaaaccctgcaatcagcaatcaaatctggtggagaacaatcaactttaattgagcctgtcatttcccccatcatactggatgtttgggcacagcacattgctgacccgttcatcagcattgatgctgtcgaagtgttagaggctatcaagaatgctcctggatgcttacagccacttgtgtctcgaatccttccaacaattggatccattttagtgaaacccaaggtccagccggatggactggttgcaggttcactggaccttttgacgatggtactcaaaaatgctccagttgctgtggttaaagcagtcttcgacacatgctttgtttctactgttcaaattgttcttgaaagtgatgaccatggagagatgcagaatgcttggcagcattcatatcaggtggccggcaggagttgcttgtctggggtggtgaacaaggacaaacactcaagatgctacttgatgcagcttcaaggcttttagatccagcgttagaaagttcagtatcactatttgttggaagctttgttttgcaactcattttacaaatacctctacacctgtctcctcacataccggaccttattgctgctattatgagacgtatgcaaacgagcagcattgcaggattgaaaagctcccttattgttataatagccagattagtacatatgagtgcaccaaatgttgatgggttcatcaatctattgctttctatccctgcacaggggtatgacaattcacttgtttatattatgtcagaatggtcacaactacaaggtgaaattcagggagcctaccagataaaggttacaacgactgcattagctcttctcatatcaactcgtcatcctgagctatccaaggttgaagttcaagggcatcttattaagactagtgcaggtataacgacacgttcaaaagctcgagtgactcctgatcaatggaccaagattcctctcccagttaagatcttctcattgctggcagatactttaactgaaattcaggaacaaattggtgctggtgatgacgatgactccgaagaggataatgactgggaagaagttcagaatggtgatgctagtatatcagatgatatcatacactcagcatcggttccttcaatgactaatccatcagttgaacatttaaatgcaatggccaaggtttttgatgaggatgatgatgatagttatgacgatgatctgacaaaaaacgaccctcttaatgaggtgaagttagcggacttcctaacaaacatctttgctaacttgtgggagaataatcgaccaatatttgagtatctttgccagggcctgtcggattcacagagatcagctgttgaaaaggttttgaggaggtgaagcgttaacttgggatcctgtcttccacctttcgggatataatatatcttcatattagttatcgagtcctgtttgcattgctgtggactggttttcttgctcattatatgttcattggtgtaaactgatacatctctgaagccggtgttatgaggttttgttagtgtaggtttctttatgttctttgtatttaaaatctacaagatgtgagtatttgttgtaccgggtgtggtgatgttgggtattcatgtctgaagaattcccggcttgacttgttcttacgttgaattcctccggagggaccttgattccttggctttattcatcaatttcatgcatgcctatttggaggaacgccacctttggtgtttggcaggagcggttaagctcagggagttgggtcccggggttggagttccttagggctctactagtgtgtgcggtggtcaagtgttttctccttccttggtcaagtgtttgcctcggttcaacccctcactcttggtttggagtacgggtgtagtttttcttttgtaagaaccttcctttttattctatcttaatttaaagatgcagttcttctgtgtatccaagatttttttcatttatggactagttga

SEQ ID NO: 82777 - DNA, 3888 bp, Zea Mays
cgcttcgttatataaaccctagactaaagcccccgagtccctccgcccccgctcgccacaaccactgcgcgtgatcccatttcgaaacaaaaaaggaggagcgcgctcgcactcaactccgcggagccccaatcccagcgtcgcctgcggtttagatggaggcgcacggcgaccagcggtggctggtggattgcctgacggctacgctcgacaccgcgcgcgatgtccgcgccttcgccgaggagtcgctccgccaggcctcgcttctccctggatatggagctgcccttacaaaagttacaatcaacaaagagatctcgtttggtttacgacagcttgctgctgtcttactaaagcagtttatcaagcagcattggcaggaagacgaagagaattttgtgccccctgttgtttctgcttcagaaaaggtggtcatacgacagctcctgcttacctcattggatgattctaatgggaaaattcgcactgctattagcatggctgtagcagctattggacagcaagattggcctgaagactggcctgagttacttccggttctcttaaagttaattggcgatcaaagcaatgggaatgaagttcgtggagcattaagatgcctagcccttctatcggatgatctagatgatatgtgtgttccaaagctagtgccagagctattcccatcactgtatagaataatatcatctcctcatctgtatgaaaattctcttcgtgcaaaggcttttgcaatagtccattcatgtatttctatgcttggatcaatgagtggtgtctataagagagatacagctagtctgatgacttcagtgcttgatccactaatagagcaattctccatagttctaaattatccggtgcagtcccaaaatcctgatgactggagcatgcagatggaggtgctcaaatgtttacttcagcttgtccagaactttcctagattacctgaagctaaaatttctgccattcttccagcactgtggcagacatttgtttcgtcattcaagacctatcacctgtcatacattcaaggtgcagaaactttggattctattagttatgattctgatggcagtgaaaaaagtcttgagtcattcgagattcagttatttgagctatggacaacaattgtggggaattctagattagcaaaggttattgggggaaacattaaggagctagcatactatactatagccttgcaacagataactgaagaacaggtgcaaaactggtcacgcgatgctaaccagtatgttgctgatgaggatgacctaacctatagctgtcgtgtgtctggatctcttttgctggaagagctagtaacagcttatgaagattatggaattgactcaattgtggaagcttcacaaatgcgttttcatgaatcacgagaattgaaggaagcgggttctgctgactggtggagactgcatgaagcatcactttttgctttaggttcactgtcagaacagttgtgtgaagcacaggattctggtttgacaaaatacaatgtgcgggatttacttgagcaaatgctaattgacattatgggaacaggggtgcatcagtacccatttctccatgcgcgtgcattttctagtgtggctaaattttcttcactgataagtaaaggggtcagtgaacagtatctatgcaatgcggcccatgcgattgcctcagatgtgccacccccggttaaagttggtgcttgtagggcactggcccaacttttaccagaatctaatcagaatctgattcagccaaacattatgggcatactttcatctcttgttgaccttctgcggcaggcatctgatgaaaccctgcatcttgttctagaaaccctgcaatcagcaatcaaatctggtggagaacaatcaactttaattgagcctgtcatttcccccatcatactggatgtttgggcacagcacattgctgacccgttcatcagcattgatgctgtcgaagtgttagaggctatcaagaatgctcctggatgcttacagccacttgtgtctcgaatccttccaacaattggatccattttagtgaaacccaaggtccagccggatggactggttgcaggttcactggaccttttgacgatggtactcaaaaatgctccagttgctgtggttaaagcagtcttcgacacatgctttgtttctactgttcaaattgttcttgaaagtgatgaccatggagagatgcagaatgcgacagaatgcttggcagcattcatatcaggtggccggcaggagttgcttgtctggggtggtgaacaaggacaaacactcaagatgctacttgatgcagcttcaaggcttttagatccagcgttagaaagttcagtatcactatttgttggaagctttgttttgcaactcattttacaaatacctctacacctgtctcctcacataccggaccttattgctgctattatgagacgtatgcaaacgagcagcattgcaggattgaaaagctcccttattgttataatagccagattagtaagtctatctctctcttacctaaggtacatatgagtgcaccaaatgttgatgggttcatcaatctattgctttctatccctgcacaggggtatgacaattcacttgtttatattatgtcagaatggtcacaactacaaggtgaaattcagggagcctaccagataaaggttacaacgactgcattagctcttctcatatcaactcgtcatcctgagctatccaaggttgaagttcaagggcatcttattaagactagtgcaggtataacgacacgttcaaaagctcgagtgactcctgatcaatggaccaagattcctctcccagttaagatcttctcattgctggcagatactttaactgaaattcaggaacaaattggtgctggtgatgacgatgactccgaagaggataatgactgggaagaagttcagaatggtgatgctagtatatcagatgatatcatacactcagcatcggttccttcaatgactaatccatcagttgaacatttaaatgcaatggccaaggtttttgatgaggatgatgatgatagttatgacgatgatctgacaaaaaacgaccctcttaatgaggtgaagttagcggacttcctaacaaacatctttgctaacttgtgggagaataatcgaccaatatttgagtatctttgccagggcctgtcggattcacagagatcagctgttgaaaaggttttgaggaggtgaagcgttaacttgggatcctgtcttccacctttcgggatataatatatcttcatattagttatcgagtcctgtttgcattgctgtggactggttttcttgctcattatatgttcattggtgtaaactgatacatctctgaagccggtgttatgaggttttgttagtgtaggtttctttatgttctttgtatttaaaatctacaagatgtgagtatttgttgtaccgggtgtggtgatgttgggtattcatgtctgaagaattcccggcttgacttgttcttacgttgaattcctccggagggaccttgattccttggctttattcatcaatttcatgcatgcctatttggaggaacgccacctttggtgtttggcaggagcggttaagctcagggagttgggtcccggggttggagttccttagggctctactagtgtgtgcggtggtcaagtgttttctccttccttggtcaagtgtttgcctcggttcaacccctcactcttggtttggagtacgggtgtagtttttcttttgtaagaaccttcctttttattctatcttaatttaaagatgcagttcttctgtgtatccaagatttttttcatttatggactagttga

SEQ ID NO: 82778 - DNA, 3760 bp, Zea Mays
ccacgcttcgttatataaaccctagactaaagcccccgagtccctccgcccccgctcgccacaaccactgcgcgtgatcccatttcgaaacaaaaaaggaggagcgcgctcgcactcaactccgcggagccccaatcccagcgtcgcctgcggtttagatggaggcgcacggcgaccagcggtggctggtggattgcctgacggctacgctcgacaccgcgcgcgatgtccgcgccttcgccgaggagtcgctccgccaggcctcgcttctccctggatatggagctgcccttacaaaagttacaatcaacaaagagatctcgtttggtttacgacagcttgctgctgtcttactaaagcagtttatcaagcagcattggcaggaagacgaagagaattttgtgccccctgttgtttctgcttcagaaaaggtggtcatacgacagctcctgcttacctcattggatgattctaatgggaaaattcgcactgctattagcatggctgtagcagctattggacagcaagattggcctgaagactggcctgagttacttccggttctcttaaagttaattggcgatcaaagcaatgggaatgaagttcgtggagcattaagatgcctagcccttctatcggatgatctagatgatatgtgtgttccaaagctagtgccagagctattcccatcactgtatagaataatatcatctcctcatctgtatgaaaattctcttcgtgcaaaggcttttgcaatagtccattcatgtatttctatgcttggatcaatgagtggtgtctataagagagatacagctagtctgatgacttcagtgcttgatccactaatagagcaattctccatagttctaaattatccggtgcagtcccaaaatcctgatgactggagcatgcagatggaggtgctcaaatgtttacttcagcttgtccagaactttcctagattacctgaagctaaaatttctggcaaaatttgtgcagccattcttccagcactgtggcagacatttgtttcgtcattcaagacctatcacctgtcatacattcaaggtgcagaaactttggattctattagttatgattctgatggcagtgaaaaaagtcttgagtcattcgagattcagttatttgagctatggacaacaattgtggggaattctagattagcaaaggttattgggggaaacattaaggagctagcatactatactatagccttgcaacagataactgaagaacaggtgcaaaactggtcacgcgatgctaaccagtatgttgctgatgaggatgacctaacctatagctgtcgtgtgtctggatctcttttgctggaagagctagtaacagcttatgaagattatggaattgactcaattgtggaagcttcacaaatgcgttttcatgaatcacgagaattgaaggaagcgggttctgctgactggtggagactgcatgaagcatcactttttgctttaggttcactgtcagaacagttgtgtgaagcacaggattctggtttgacaaaatacaatgtgcgggatttacttgagcaaatgctaattgacattatgggaacaggggtgcatcagtacccatttctccatgcgcgtgcattttctagtgtggctaaattttcttcactgataagtaaaggggtcagtgaacagtatctatgcaatgcggcccatgcgattgcctcagatgtgccacccccggttaaagttggtgcttgtagggcactggcccaacttttaccagaatctaatcagaatctgattcagccaaacattatgggcatactttcatctcttgttgaccttctgcggcaggcatctgatgaaaccctgcatcttgttctagaaaccctgcaatcagcaatcaaatctggtggagaacaatcaactttaattgagcctgtcatttcccccatcatactggatgtttgggcacagcacattgctgacccgttcatcagcattgatgctgtcgaagtgttagaggctatcaagaatgctcctggatgcttacagccacttgtgtctcgaatccttccaacaattggatccattttagtgaaacccaaggtccagccggatggactggttgcaggttcactggaccttttgacgatggtactcaaaaatgctccagttgctgtggttaaagcagtcttcgacacatgctttgtttctactgttcaaattgttcttgaaagtgatgaccatggagagatgcagaatgcgacagaatgcttggcagcattcatatcaggtggccggcaggagttgcttgtctggggtggtgaacaaggacaaacactcaagatgctacttgatgcagcttcaaggcttttagatccagcgttagaaagttcagtatcactatttgttggaagctttgttttgcaactcattttacaaatacctctacacctgtctcctcacataccggaccttattgctgctattatgagacattactctgattacttaagcttctccaagacatgtcctcagttcactctgcctgcaggtgaaattcagggagcctaccagataaaggttacaacgactgcattagctcttctcatatcaactcgtcatcctgagctatccaaggttgaagttcaagggcatcttattaagactagtgcaggtataacgacacgttcaaaagctcgagtgactcctgatcaatggaccaagattcctctcccagttaagatcttctcattgctggcagatactttaactgaaattcaggaacaaattggtgctggtgatgacgatgactccgaagaggataatgactgggaagaagttcagaatggtgatgctagtatatcagatgatatcatacactcagcatcggttccttcaatgactaatccatcagttgaacatttaaatgcaatggccaaggtttttgatgaggatgatgatgatagttatgacgatgatctgacaaaaaacgaccctcttaatgaggtgaagttagcggacttcctaacaaacatctttgctaacttgtgggagaataatcgaccaatatttgagtatctttgccagggcctgtcggattcacagagatcagctgttgaaaaggttttgaggaggtgaagcgttaacttgggatcctgtcttccacctttcgggatataatatatcttcatattagttatcgagtcctgtttgcattgctgtggactggttttcttgctcattatatgttcattggtgtaaactgatacatctctgaagccggtgttatgaggttttgttagtgtaggtttctttatgttctttgtatttaaaatctacaagatgtgagtatttgttgtaccgggtgtggtgatgttgggtattcatgtctgaagaattcccggcttgacttgttcttacgttgaattcctccggagggaccttgattccttggctttattcatcaatttcatgcatgcctatttggaggaacgccacctttggtgtttggcaggagcggttaagctcagggagttgggtcccggggttggagttccttagggctctactagtgtgtgcggtggtcaagtgttttctccttccttggtcaagtgtttgcctcggttcaacccctcactcttggtttggagtacgggtgtagtttttcttttgtaagaaccttcctttttattctatcttaatttaaagatgcagttcttctgtgtatccaagatttttttcatttatggactagttga

SEQ ID NO: 82779 - DNA, 3880 bp, Zea Mays
gtctcctccgcctccccacgcttcgttatataaaccctagactaaagcccccgagtccctccgcccccgctcgccacaaccactgcgcgtgatcccatttcgaaacaaaaaaggaggagcgcgctcgcactcaactccgcggagccccaatcccagcgtcgcctgcggtttagatggaggcgcacggcgaccagcggtggctggtggattgcctgacggctacgctcgacaccgcgcgcgatgtccgcgccttcgccgaggagtcgctccgccaggcctcgcttctccctggatatggagctgcccttacaaaagttacaatcaacaaagagatctcgtttggtttacgacagcttgctgctgtcttactaaagcagtttatcaagcagcattggcaggaagacgaagagaattttgtgccccctgttgtttctgcttcagaaaaggtggtcatacgacagctcctgcttacctcattggatgattctaatgggaaaattcgcactgctattagcatggctgtagcagctattggacagcaagattggcctgaagactggcctgagttacttccggttctcttaaagttaattggcgatcaaagcaatgggaatgaagttcgtggagcattaagatgcctagcccttctatcggatgatctagatgatatgtgtgttccaaagctagtgccagagctattcccatcactgtatagaataatatcatctcctcatctgtatgaaaattctcttcgtgcaaaggcttttgcaatagtccattcatgtatttctatgcttggatcaatgagtggtgtctataagagagatacagctagtctgatgacttcagtgcttgatccactaatagagcaattctccatagttctaaattatccggtgcagtcccaaaatcctgatgactggagcatgcagatggaggtgctcaaatgtttacttcagcttgtccagaactttcctagattacctgaagctaaaatttctgccattcttccagcactgtggcagacatttgtttcgtcattcaagacctatcacctgtcatacattcaaggtgcagaaactttggattctattagttatgattctgatggcagtgaaaaaagtcttgagtcattcgagattcagttatttgagctatggacaacaattgtggggaattctagattagcaaaggttattgggggaaacattaaggagctagcatactatactatagccttgcaacagataactgaagaacaggtgcaaaactggtcacgcgatgctaaccagtatgttgctgatgaggatgacctaacctatagctgtcgtgtgtctggatctcttttgctggaagagctagtaacagcttatgaagattatggaattgactcaattgtggaagcttcacaaatgcgttttcatgaatcacgagaattgaaggaagcgggttctgctgactggtggagactgcatgaagcatcactttttgctttaggttcactgtcagaacagttgtgtgaagcacaggattctggtttgacaaaatacaatgtgcgggatttacttgagcaaatgctaattgacattatgggaacaggggtgcatcagtacccatttctccatgcgcgtgcattttctagtgtggctaaattttcttcactgataagtaaaggggtcagtgaacagtatctatgcaatgcggcccatgcgattgcctcagatgtgccacccccggttaaagttggtgcttgtagggcactggcccaacttttaccagaatctaatcagaatctgattcagccaaacattatgggcatactttcatctcttgttgaccttctgcggcaggcatctgatgaaaccctgcatcttgttctagaaaccctgcaatcagcaatcaaatctggtggagaacaatcaactttaattgagcctgtcatttcccccatcatactggatgtttgggcacagcacattgctgacccgttcatcagcattgatgctgtcgaagtgttagaggctatcaagaatgctcctggatgcttacagccacttgtgtctcgaatccttccaacaattggatccattttagtgaaacccaaggtccagccggatggactggttgcaggttcactggaccttttgacgatggtactcaaaaatgctccagttgctgtggttaaagcagtcttcgacacatgctttgtttctactgttcaaattgttcttgaaagtgatgaccatggagagatgcagaatgcgacagaatgcttggcagcattcatatcaggtggccggcaggagttgcttgtctggggtggtgaacaaggacaaacactcaagatgctacttgatgcagcttcaaggcttttagatccagcgttagaaagttcagtatcactatttgttggaagctttgttttgcaactcattttacaaatacctctacacctgtctcctcacataccggaccttattgctgctattatgagacgtatgcaaacgagcagcattgcaggattgaaaagctcccttattgttataatagccagattagtacatatgagtgcaccaaatgttgatgggttcatcaatctattgctttctatccctgcacaggggtatgacaattcacttgtttatattatgtcagaatggtcacaactacaaggtgaaattcagggagcctaccagataaaggttacaacgactgcattagctcttctcatatcaactcgtcatcctgagctatccaaggttgaagttcaagggcatcttattaagactagtgcaggtataacgacacgttcaaaagctcgagtgactcctgatcaatggaccaagattcctctcccagttaagatcttctcattgctggcagatactttaactgaaattcaggaacaaattggtgctggtgatgacgatgactccgaagaggataatgactgggaagaagttcagaatggtgatgctagtatatcagatgatatcatacactcagcatcggttccttcaatgactaatccatcagttgaacatttaaatgcaatggccaaggtttttgatgaggatgatgatgatagttatgacgatgatctgacaaaaaacgaccctcttaatgaggtgaagttagcggacttcctaacaaacatctttgctaacttgtgggagaataatcgaccaatatttgagtatctttgccagggcctgtcggattcacagagatcagctgttgaaaaggttttgaggaggtgaagcgttaacttgggatcctgtcttccacctttcgggatataatatatcttcatattagttatcgagtcctgtttgcattgctgtggactggttttcttgctcattatatgttcattggtgtaaactgatacatctctgaagccggtgttatgaggttttgttagtgtaggtttctttatgttctttgtatttaaaatctacaagatgtgagtatttgttgtaccgggtgtggtgatgttgggtattcatgtctgaagaattcccggcttgacttgttcttacgttgaattcctccggagggaccttgattccttggctttattcatcaatttcatgcatgcctatttggaggaacgccacctttggtgtttggcaggagcggttaagctcagggagttgggtcccggggttggagttccttagggctctactagtgtgtgcggtggtcaagtgttttctccttccttggtcaagtgtttgcctcggttcaacccctcactcttggtttggagtacgggtgtagtttttcttttgtaagaaccttcctttttattctatcttaatttaaagatgcagttcttctgtgtatccaagatttttttcatttatggactagttga

SEQ ID NO: 82780 - DNA, 3877 bp, Zea Mays
ctcgtctcttcttccgtctcctccgcctccccacgcttcgttatataaaccctagactaaagcccccgagtccctccgcccccgctcgccacaaccactgcgcgtgatcccatttcgaaacaaaaaaggaggagcgcgctcgcactcaactccgcggagccccaatcccagcgtcgcctgcggtttagatggaggcgcacggcgaccagcggtggctggtggattgcctgacggctacgctcgacaccgcgcgcgatgtccgcgccttcgccgaggagtcgctccgccaggcctcgcttctccctggatatggagctgcccttacaaaagttacaatcaacaaagagatctcgtttggtttacgacagcttgctgctgtcttactaaagcagtttatcaagcagcattggcaggaagacgaagagaattttgtgccccctgttgtttctgcttcagaaaaggtggtcatacgacagctcctgcttacctcattggatgattctaatgggaaaattcgcactgctattagcatggctgtagcagctattggacagcaagattggcctgaagactggcctgagttacttccggttctcttaaagttaattggcgatcaaagcaatgggaatgaagttcgtggagcattaagatgcctagcccttctatcggatgatctagatgatatgtgtgttccaaagctagtgccagagctattcccatcactgtatagaataatatcatctcctcatctgtatgaaaattctcttcgtgcaaaggcttttgcaatagtccattcatgtatttctatgcttggatcaatgagtggtgtctataagagagatacagctagtctgatgacttcagtgcttgatccactaatagagcaattctccatagttctaaattatccggtgcagtcccaaaatcctgatgactggagcatgcagatggaggtgctcaaatgtttacttcagcttgtccagaactttcctagattacctgaagctaaaatttctgccattcttccagcactgtggcagacatttgtttcgtcattcaagacctatcacctgtcatacattcaaggtgcagaaactttggattctattagttatgattctgatggcagtgaaaaaagtcttgagtcattcgagattcagttatttgagctatggacaacaattgtggggaattctagattagcaaaggttattgggggaaacattaaggagctagcatactatactatagccttgcaacagataactgaagaacaggtgcaaaactggtcacgcgatgctaaccagtatgttgctgatgaggatgacctaacctatagctgtcgtgtgtctggatctcttttgctggaagagctagtaacagcttatgaagattatggaattgactcaattgtggaagcttcacaaatgcgttttcatgaatcacgagaattgaaggaagcgggttctgctgactggtggagactgcatgaagcatcactttttgctttaggttcactgtcagaacagttgtgtgaagcacaggattctggtttgacaaaatacaatgtgcgggatttacttgagcaaatgctaattgacattatgggaacaggggtgcatcagtacccatttctccatgcgcgtgcattttctagtgtggctaaattttcttcactgataagtaaaggggtcagtgaacagtatctatgcaatgcggcccatgcgattgcctcagatgtgccacccccggttaaagttggtgcttgtagggcactggcccaacttttaccagaatctaatcagaatctgattcagccaaacattatgggcatactttcatctcttgttgaccttctgcggcaggcatctgatgaaaccctgcatcttgttctagaaaccctgcaatcagcaatcaaatctggtggagaacaatcaactttaattgagcctgtcatttcccccatcatactggatgtttgggcacagcacattgctgacccgttcatcagcattgatgctgtcgaagtgttagaggctatcaagaatgctcctggatgcttacagccacttgtgtctcgaatccttccaacaattggatccattttagtgaaacccaaggtccagccggatggactggttgcaggttcactggaccttttgacgatggtactcaaaaatgctccagttgctgtggttaaagcagtcttcgacacatgctttgtttctactgttcaaattgttcttgaaagtgatgaccatggagagatgcagaatgcgacagaatgcttggcagcattcatatcaggtggccggcaggagttgcttgtctggggtggtgaacaaggacaaacactcaagatgctacttgatgcagcttcaaggcttttagatccagcgttagaaagttcagtatcactatttgttggaagctttgttttgcaactcattttacaaatacctctacacctgtctcctcacataccggaccttattgctgctattatgagacgtatgcaaacgagcagcattgcaggattgaaaagctcccttattgttataatagccagattagtacatatgagtgcaccaaatgttgatgggttcatcaatctattgctttctatccctgcacaggggtatgacaattcacttgtttatattatgtcagaatggtcacaactacaaggtgaaattcagggagcctaccagataaaggttacaacgactgcattagctcttctcatatcaactcgtcatcctgagctatccaaggttgaagttcaagggcatcttattaagactagtgcaggtataacgacacgttcaaaagctcgagtgactcctgatcaatggaccaagattcctctcccagttaagatcttctcattgctggcagatactttaactgaaattcaggaacaaattggtgctggtgatgacgatgactccgaagaggataatgactgggaagaagttcagaatggtgatgctagtatatcagatgatatcatacactcagcatcggttccttcaatgactaatccatcagttgaacatttaaatgcaatggccaaggtttttgatgaggatgatgatgatagttatgacgatgatctgacaaaaaacgaccctcttaatgaggtgaagttagcggacttcctaacaaacatctttgctaacttgtgggagaataatcgaccaatatttgagtatctttgccagagatcagctgttgaaaaggttttgaggaggtgaagcgttaacttgggatcctgtcttccacctttcgggatataatatatcttcatattagttatcgagtcctgtttgcattgctgtggactggttttcttgctcattatatgttcattggtgtaaactgatacatctctgaagccggtgttatgaggttttgttagtgtaggtttctttatgttctttgtatttaaaatctacaagatgtgagtatttgttgtaccgggtgtggtgatgttgggtattcatgtctgaagaattcccggcttgacttgttcttacgttgaattcctccggagggaccttgattccttggctttattcatcaatttcatgcatgcctatttggaggaacgccacctttggtgtttggcaggagcggttaagctcagggagttgggtcccggggttggagttccttagggctctactagtgtgtgcggtggtcaagtgttttctccttccttggtcaagtgtttgcctcggttcaacccctcactcttggtttggagtacgggtgtagtttttcttttgtaagaaccttcctttttattctatcttaatttaaagatgcagttcttctgtgtatccaagatttttttcatttatggactagttga

SEQ ID NO: 82781 - DNA, 3906 bp, Zea Mays
ctcggccgccacctctcgtctcttcttccgtctcctccgcctccccacgcttcgttatataaaccctagactaaagcccccgagtccctccgcccccgctcgccacaaccactgcgcgtgatcccatttcgaaacaaaaaaggaggagcgcgctcgcactcaactccgcggagccccaatcccagcgtcgcctgcggtttagatggaggcgcacggcgaccagcggtggctggtggattgcctgacggctacgctcgacaccgcgcgcgatgtccgcgccttcgccgaggagtcgctccgccaggcctcgcttctccctggatatggagctgcccttacaaaagttacaatcaacaaagagatctcgtttggtttacgacagcttgctgctgtcttactaaagcagtttatcaagcagcattggcaggaagacgaagagaattttgtgccccctgttgtttctgcttcagaaaaggtggtcatacgacagctcctgcttacctcattggatgattctaatgggaaaattcgcactgctattagcatggctgtagcagctattggacagcaagattggcctgaagactggcctgagttacttccggttctcttaaagttaattggcgatcaaagcaatgggaatgaagttcgtggagcattaagatgcctagcccttctatcggatgatctagatgatatgtgtgttccaaagctagtgccagagctattcccatcactgtatagaataatatcatctcctcatctgtatgaaaattctcttcgtgcaaaggcttttgcaatagtccattcatgtatttctatgcttggatcaatgagtggtgtctataagagagatacagctagtctgatgacttcagtgcttgatccactaatagagcaattctccatagttctaaattatccggtgcagtcccaaaatcctgatgactggagcatgcagatggaggtgctcaaatgtttacttcagcttgtccagaactttcctagattacctgaagctaaaatttctggcaaaatttgtgcagccattcttccagcactgtggcagacatttgtttcgtcattcaagacctatcacctgtcatacattcaaggtgcagaaactttggattctattagttatgattctgatggcagtgaaaaaagtcttgagtcattcgagattcagttatttgagctatggacaacaattgtggggaattctagattagcaaaggttattgggggaaacattaaggagctagcatactatactatagccttgcaacagataactgaagaacaggtgcaaaactggtcacgcgatgctaaccagtatgttgctgatgaggatgacctaacctatagctgtcgtgtgtctggatctcttttgctggaagagctagtaacagcttatgaagattatggaattgactcaattgtggaagcttcacaaatgcgttttcatgaatcacgagaattgaaggaagcgggttctgctgactggtggagactgcatgaagcatcactttttgctttaggttcactgtcagaacagttgtgtgaagcacaggattctggtttgacaaaatacaatgtgcgggatttacttgagcaaatgctaattgacattatgggaacaggggtgcatcagtacccatttctccatgcgcgtgcattttctagtgtggctaaattttcttcactgataagtaaaggggtcagtgaacagtatctatgcaatgcggcccatgcgattgcctcagatgtgccacccccggttaaagttggtgcttgtagggcactggcccaacttttaccagaatctaatcagaatctgattcagccaaacattatgggcatactttcatctcttgttgaccttctgcggcaggcatctgatgaaaccctgcatcttgttctagaaaccctgcaatcagcaatcaaatctggtggagaacaatcaactttaattgagcctgtcatttcccccatcatactggatgtttgggcacagcacattgctgacccgttcatcagcattgatgctgtcgaagtgttagaggctatcaagaatgctcctggatgcttacagccacttgtgtctcgaatccttccaacaattggatccattttagtgaaacccaaggtccagccggatggactggttgcaggttcactggaccttttgacgatggtactcaaaaatgctccagttgctgtggttaaagcagtcttcgacacatgctttgtttctactgttcaaattgttcttgaaagtgatgaccatggagagatgcagaatgcgacagaatgcttggcagcattcatatcaggtggccggcaggagttgcttgtctggggtggtgaacaaggacaaacactcaagatgctacttgatgcagcttcaaggcttttagatccagcgttagaaagttcagtatcactatttgttggaagctttgttttgcaactcattttacaaatacctctacacctgtctcctcacataccggaccttattgctgctattatgagacgtatgcaaacgagcagcattgcaggattgaaaagctcccttattgttataatagccagattagtacatatgagtgcaccaaatgttgatgggttcatcaatctattgctttctatccctgcacaggggtatgacaattcacttgtttatattatgtcagaatggtcacaactacaaggtgaaattcagggagcctaccagataaaggttacaacgactgcattagctcttctcatatcaactcgtcatcctgagctatccaaggttgaagttcaagggcatcttattaagactagtgcaggtataacgacacgttcaaaagctcgagtgactcctgatcaatggaccaagattcctctcccagttaagatcttctcattgctggcagatactttaactgaaattcaggaacaaattggtgctggtgatgacgatgactccgaagaggataatgactgggaagaagttcagaatggtgatgctagtatatcagatgatatcatacactcagcatcggttccttcaatgactaatccatcagttgaacatttaaatgcaatggccaaggtttttgatgaggatgatgatgatagttatgacgatgatctgacaaaaaacgaccctcttaatgaggtgaagttagcggacttcctaacaaacatctttgctaacttgtgggagaataatcgaccaatatttgagtatctttgccagagatcagctgttgaaaaggttttgaggaggtgaagcgttaacttgggatcctgtcttccacctttcgggatataatatatcttcatattagttatcgagtcctgtttgcattgctgtggactggttttcttgctcattatatgttcattggtgtaaactgatacatctctgaagccggtgttatgaggttttgttagtgtaggtttctttatgttctttgtatttaaaatctacaagatgtgagtatttgttgtaccgggtgtggtgatgttgggtattcatgtctgaagaattcccggcttgacttgttcttacgttgaattcctccggagggaccttgattccttggctttattcatcaatttcatgcatgcctatttggaggaacgccacctttggtgtttggcaggagcggttaagctcagggagttgggtcccggggttggagttccttagggctctactagtgtgtgcggtggtcaagtgttttctccttccttggtcaagtgtttgcctcggttcaacccctcactcttggtttggagtacgggtgtagtttttcttttgtaagaaccttcctttttattctatcttaatttaaagatgcagttcttctgtgtatccaagatttttttcatttatggactagttga

SEQ ID NO: 82782 - DNA, 1594 bp, Zea Mays
tcggccgccacctctcgtctcttcttccgtctcctccgcctccccacgcttcgttatataaaccctagactaaagcccccgagtccctccgcccccgctcgccacaaccactgcgcgtgatcccatttcgaaacaaaaaaggaggagcgcgctcgcactcaactccgcggagccccaatcccagcgtcgcctgcggtttagatggaggcgcacggcgaccagcggtggctggtggattgcctgacggctacgctcgacaccgcgcgcgatgtccgcgccttcgccgaggagtcgctccgccaggcctcgcttctccctggatatggagctgcccttacaaaagttacaatcaacaaagagatctcgtttggtttacgacagcttgctgctgtcttactaaagcagtttatcaagcagcattggcaggaagacgaagagaattttgtgccccctgttgtttctgcttcagaaaaggtggtcatacgacagctcctgcttacctcattggatgattctaatgggaaaattcgcactgctattagcatggctgtagcagctattggacagcaagattggcctgaagactggcctgagttacttccggttctcttaaagttaattggcgatcaaagcaatgggaatgaagttcgtggagcattaagatgcctagcccttctatcggatgatctagatgatatgtgtgttccaaagctagtgccagagctattcccatcactgtatagaataatatcatctcctcatctgtatgaaaattctcttcgtgcaaaggcttttgcaatagtccattcatgtatttctatgcttggatcaatgagtggtgtctataagagagatacagctagtctgatgacttcagtgcttgatccactaatagagcaattctccatagttctaaattatccggtgcagtcccaaaatcctgatgactggagcatgcagatggaggtgctcaaatgtttacttcagcttgtccagaactttcctagattacctgaagctaaaatttctgccattcttccagcactgtggcagacatttgtttcgtcattcaagacctatcacctgtcatacattcaaggtgcagaaactttggattctattagttatgattctgatggcagtgaaaaaagtcttgagtcattcgagattcagttatttgagctatggacaacaattgtggggaattctagattagcaaaggttattgggggaaacattaaggagctagcatactatactatagccttgcaacagataactgaagaacaggtgcaaaactggtcacgcgatgctaaccagtatgttgctgatgaggatgacctaacctatagctgtcgtgtgtctggatctcttttgctggaagagctagtaacagcttatgaagattatggaattgactcaattgtggaagcttcacaaatgcgttttcatgaatcacgagaattgaaggaagcgggttctgctgactggtggagactgcatgaagcatcactttttgctttaggttcactgtcagaacagttgtgtgaagcacagttggcagatttgacagttcataccaactgcccaactc

SEQ ID NO: 82783 - DNA, 3510 bp, Zea Mays
aaagtccagtccagcagacagcagctaaccgaagtgaggcgcaggccaggaaggcatcactcgccgagtctgttctagcagccatctccgagctgatgccttcagcggcagccgccgtcgatgctgagcacgagagcttcatggatgtcggcagccacctccaccatggagccctgcccacagtgtcagtggaggcgcagaaggtgcagggttccccagccaacgcgctgcacgtgatggagtatctggctgccaatgttgacctcgccaaggacctcgtcacaaggtgcagcgccatcgcgcagcagctcatggacgacgacctcctgggcataaccgaggacttggacaaggtcatcaagaacataagcaatgagctcaacaagatgccagcagcgacgttcgagagcagcaggtttgcggaaccagcggtcagtggacaccttcaggttgtcaggaaccagcatgatctgttcgagcagcaatcctttgatggctactcggagggagatatgccaatggtcgtggcaatcgagaggccacccaagagaagaacgctgcacaacagtgacatgccgaggctggtggacttcctgcagggaatgtaccaggagtcacatgagatcggtggtcagtcatttggttcactccctgaagtcgcggaatatgtggagccattgtatgattctttcttctgccctctcacaaacaaggttatggttgatccagtgacaacggagagtggcatcacttatgacaggaaagctatagaggattactttgacaagtttacagatggctctgaacctgtgatatgtcctgttacaaagatggccatgcagagcaagacactgaggagtaatcttccgttgaagagcacaattgcagagtggattacaaggaatgaagcgacacgggtcaggatcgcacgcaccgcgctctctatggcgaccacagaggctatggtgcttgaggccatacatgagctgaaggtgctggctaggctgaggagaaagaacagggatcagatgcacaagattggcatcaccaagttcctagcacggcttctggaccacaaggatgcacttattcgctgtgactccctcgacctcctctgcttgttggttgaggatgatacaggaaaggaaatcatagcgaaaaccagagccgtctcaaggacaataaagctgctatccagcagtagtactgatgagaggcatgcatctatatctttcttgctagagctttcgaagtcagagttgctgttggagaacattggatcaactgctgggagcatactgatcctcaccacgatgaagtttaatagctcatctgatcctattgctgccgagaaggctggagaagtcctcgagaacctggagaaatgccccaagaatatcaagtacatggctgaaagtggctacttggatcctctgcaaaggcacctagttgaaggaccagaagatgtgcagatggagatggtgagctacctcggcgagctggtccagaagcaggagatgaccatcaatatagcagggagtgcatcagagatcctcatcaaaatggtgtgcagtggtaatacggcaattcgaaaggcgaccctcgatgtcctggttcagatctcgtcccaccaccccaacgccaagacgcttgtggatgctggtgccgtccctgtcatggtagaggagctcttcatacgaaagattgatgatgagcccatgggctctaagacagaggctgccgcggtgctcgccaacatcgtcgagtctggcttggatccagaggccatcaccgtgaacaaggaaggccacgtcatcacgtccaagtactcggtatacaacttcgctcacatgctcaagtgctccatgcctgacaccctcaacctaagcattgtgcgcgtgctgctcgcgctgaccgctctccccaagcctctcgccacggtggtctcggtcatgaaggagcaagacagtggacagacggtgattgagctgatgggctcgctgacagagtcgcttgtcatcgccgcaatgaggctgcttattgcgttgtccccgcagatggggcacaccattgccgagaagctgtgcaaggccccggggcagccagggaggcttgtcaagagcattggcctgcacgggcggatcatggagcggcacgccatgtcagctactctcctggcgaagctgccgtaccagcacatcgctctgaacctggcgctgatcaaccagggcgcgatggttaccgtgctagccaagatagaggagatgcagcgcggcgagacgcgggcaagccgccatgcgaaggcgtatatggagggcctcatgggtgtgctggtccggctaacgacgacgctgtatgacccggacgtgctcttggcggccatggatcacaacctcacgtcggtgctcacagatctcgtgcggtccgcaggcagcgacgaggtccagcggctcgccgcgattggtctcgagaacctcagcagccagtcgcccaacctttcccagcccccgaccgaggagcggcgcccgaagaagaagaacatcctccggcgcctgcgcgaggcgcacgcggggcgggtgcacgacaaccggaggccgccggcgcacagccgggtttgcccggtgcaccgtggggtgtgttccccgtccaccacgttctgcctggtggaggctggcgcggtggagggcctcttgtgcgtcctggagagcagcgagaacgggcgcgtggtggaggccgcgctcggtgcgctgtgcacgctcatggacgacgcggtggacgtgacgagcggcgtggccgtgctcgcggagcacgacgcggcgcggcacgtgcttcgcgcgctgcggcagcaccgtgacgacgggcggagagggggcggcggcgctgccgcaggcgagacggtcactcggaggtgtttctgggcggtggagaggttcctggctcacggcagcgagcggtgcgtgagggaggtcaccagcgatcgggcgctgccgagcctgctggtgggcgccttccacaagggcgacgccgccaccaagcaggtggccgagagcgtgctccggtgcctgcaccgcatgccggattactccgcgacctacgaatccgtcgaactgtaaccaacacatgacgcgcacgactgcgcatgtcttgcctctcttttatcaagcttcgtctcttggttatgtttgtaaaattggtttttgtgtgtaacatgggttgatgtattgtttggtgtagctaaaggaaaatagaaaaggaaaaactgaagatgcagttatgtatgcaagtataaccaaagtttatagcaagggaagatactagtcttttgattcttcttactatttttttgtgtgtgtgttcagtagttcttttttagggaccgtgttcaattcagtaggttttgacaagagtgcctcctaaaatcagtctccagataatttgttttgtaattttgatgtttcgtttgacatgcctctctagccttttctcgacacgactactagcaagtattcc

SEQ ID NO: 82784 - DNA, 2654 bp, Zea Mays
ccctctgcccaacaggagcgactccgactccgactccgactccgagggcggtgcgagtgaccttgcccttgtttggattggacgacgactgggtccgcgagctgccagcgcggtctcccaccactatccctctctcccctctccgtttgtctccatcctttctacctcggctgctgcgttgcgtgtggcgctgtgcttgggcagacgtgggcaccatgcctgggtgacttggtgtagcactgtagctgtggcatggagctgaggaagacgacgacgggggagagaagaatgctccccgggtgctaacttggccgccgctgctcaggggacgagtcgagggggagaagaggaaagtccagtttcttcagcttcttggttggatgcagagctttcgaagtcagagttgctgttggagaacattggatcaactgctgggagcatactgatcctcaccacgatgaagtttaatagctcatctgatcctattgctgccgagaaggctggagaagtcctcgagaacctggagaaatgccccaagaatatcaagtacatggctgaaagtggctacttggatcctctgcaaaggcacctagttgaaggaccagaagatgtgcagatggagatggtgagctacctcggcgagctggtccagaagcaggagatgaccatcaatatagcagggagtgcatcagagatcctcatcaaaatggtgtgcagtggtaatacggcaattcgaaaggcgaccctcgatgtcctggttcagatctcgtcccaccaccccaacgccaagacgcttgtggatgctggtgccgtccctgtcatggtagaggagctcttcatacgaaagattgatgatgagcccatgggctctaagacagaggctgccgcggtgctcgccaacatcgtcgagtctggcttggatccagaggccatcaccgtgaacaaggaaggccacgtcatcacgtccaagtactcggtatacaacttcgctcacatgctcaagtgctccatgcctgacaccctcaacctaagcattgtgcgcgtgctgctcgcgctgaccgctctccccaagcctctcgccacggtggtctcggtcatgaaggagcaagacagtggacagacggtgattgagctgatgggctcgctgacagagtcgcttgtcatcgccgcaatgaggctgcttattgcgttgtccccgcagatggggcacaccattgccgagaagctgtgcaaggccccggggcagccagggaggcttgtcaagagcattggcctgcacgggcggatcatggagcggcacgccatgtcagctactctcctggcgaagctgccgtaccagcacatcgctctgaacctggcgctgatcaaccagggcgcgatggttaccgtgctagccaagatagaggagatgcagcgcggcgagacgcgggcaagccgccatgcgaaggcgtatatggagggcctcatgggtgtgctggtccggctaacgacgacgctgtatgacccggacgtgctcttggcggccatggatcacaacctcacgtcggtgctcacagatctcgtgcggtccgcaggcagcgacgaggtccagcggctcgccgcgattggtctcgagaacctcagcagccagtcgcccaacctttcccagcccccgaccgaggagcggcgcccgaagaagaagaacatcctccggcgcctgcgcgaggcgcacgcggggcgggtgcacgacaaccggaggccgccggcgcacagccgggtttgcccggtgcaccgtggggtgtgttccccgtccaccacgttctgcctggtggaggctggcgcggtggagggcctcttgtgcgtcctggagagcagcgagaacgggcgcgtggtggaggccgcgctcggtgcgctgtgcacgctcatggacgacgcggtggacgtgacgagcggcgtggccgtgctcgcggagcacgacgcggcgcggcacgtgcttcgcgcgctgcggcagcaccgtgacgacgggcggagagggggcggcggcgctgccgcaggcgagacggtcactcggaggtgtttctgggcggtggagaggttcctggctcacggcagcgagcggtgcgtgagggaggtcaccagcgatcgggcgctgccgagcctgctggtgggcgccttccacaagggcgacgccgccaccaagcaggtggccgagagcgtgctccggtgcctgcaccgcatgccggattactccgcgacctacgaatccgtcgaactgtaaccaacacatgacgcgcacgactgcgcatgtcttgcctctcttttatcaagcttcgtctcttggttatgtttgtaaaattggtttttgtgtgtaacatgggttgatgtattgtttggtgtagctaaaggaaaatagaaaaggaaaaactgaagatgcagttatgtatgcaagtataaccaaagtttatagcaagggaagatactagtcttttgattcttcttactatttttttgtgtgtgtgttcagtagttcttttttagggaccgtgttcaattcagtaggttttgacaagagtgcctcctaaaatcagtctccagataatttgttttgtaattttgatgtttcgtttgacatgcctctctagccttttctcgacacgactactagcaagtattcc

SEQ ID NO: 82785 - DNA, 2751 bp, Zea Mays
ccctctgcccaacaggagcgactccgactccgactccgactccgagggcggtgcgagtgaccttgcccttgtttggattggacgacgactgggtccgcgagctgccagcgcggtctcccaccactatccctctctcccctctccgtttgtctccatcctttctacctcggctgctgcgttgcgtgtggcgctgtgcttgggcagacgtgggcaccatgcctgggtgacttggtgtagcactgtagctgtggcatggagctgaggaagacgacgacgggggagagaagaatgctccccgggtgctaacttggccgccgctgctcaggggacgagtcgagggggagaagaggaaagtccagtttcttcagcttcttggttggatgcaggaaatcatagcgaaaaccagagccgtctcaaggacaataaagctgctatccagcagtagtactgatgagaggcatgcatctatatctttcttgctagagctttcgaagtcagagttgctgttggagaacattggatcaactgctgggagcatactgatcctcaccacgatgaagtttaatagctcatctgatcctattgctgccgagaaggctggagaagtcctcgagaacctggagaaatgccccaagaatatcaagtacatggctgaaagtggctacttggatcctctgcaaaggcacctagttgaaggaccagaagatgtgcagatggagatggtgagctacctcggcgagctggtccagaagcaggagatgaccatcaatatagcagggagtgcatcagagatcctcatcaaaatggtgtgcagtggtaatacggcaattcgaaaggcgaccctcgatgtcctggttcagatctcgtcccaccaccccaacgccaagacgcttgtggatgctggtgccgtccctgtcatggtagaggagctcttcatacgaaagattgatgatgagcccatgggctctaagacagaggctgccgcggtgctcgccaacatcgtcgagtctggcttggatccagaggccatcaccgtgaacaaggaaggccacgtcatcacgtccaagtactcggtatacaacttcgctcacatgctcaagtgctccatgcctgacaccctcaacctaagcattgtgcgcgtgctgctcgcgctgaccgctctccccaagcctctcgccacggtggtctcggtcatgaaggagcaagacagtggacagacggtgattgagctgatgggctcgctgacagagtcgcttgtcatcgccgcaatgaggctgcttattgcgttgtccccgcagatggggcacaccattgccgagaagctgtgcaaggccccggggcagccagggaggcttgtcaagagcattggcctgcacgggcggatcatggagcggcacgccatgtcagctactctcctggcgaagctgccgtaccagcacatcgctctgaacctggcgctgatcaaccagggcgcgatggttaccgtgctagccaagatagaggagatgcagcgcggcgagacgcgggcaagccgccatgcgaaggcgtatatggagggcctcatgggtgtgctggtccggctaacgacgacgctgtatgacccggacgtgctcttggcggccatggatcacaacctcacgtcggtgctcacagatctcgtgcggtccgcaggcagcgacgaggtccagcggctcgccgcgattggtctcgagaacctcagcagccagtcgcccaacctttcccagcccccgaccgaggagcggcgcccgaagaagaagaacatcctccggcgcctgcgcgaggcgcacgcggggcgggtgcacgacaaccggaggccgccggcgcacagccgggtttgcccggtgcaccgtggggtgtgttccccgtccaccacgttctgcctggtggaggctggcgcggtggagggcctcttgtgcgtcctggagagcagcgagaacgggcgcgtggtggaggccgcgctcggtgcgctgtgcacgctcatggacgacgcggtggacgtgacgagcggcgtggccgtgctcgcggagcacgacgcggcgcggcacgtgcttcgcgcgctgcggcagcaccgtgacgacgggcggagagggggcggcggcgctgccgcaggcgagacggtcactcggaggtgtttctgggcggtggagaggttcctggctcacggcagcgagcggtgcgtgagggaggtcaccagcgatcgggcgctgccgagcctgctggtgggcgccttccacaagggcgacgccgccaccaagcaggtggccgagagcgtgctccggtgcctgcaccgcatgccggattactccgcgacctacgaatccgtcgaactgtaaccaacacatgacgcgcacgactgcgcatgtcttgcctctcttttatcaagcttcgtctcttggttatgtttgtaaaattggtttttgtgtgtaacatgggttgatgtattgtttggtgtagctaaaggaaaatagaaaaggaaaaactgaagatgcagttatgtatgcaagtataaccaaagtttatagcaagggaagatactagtcttttgattcttcttactatttttttgtgtgtgtgttcagtagttcttttttagggaccgtgttcaattcagtaggttttgacaagagtgcctcctaaaatcagtctccagataatttgttttgtaattttgatgtttcgtttgacatgcctctctagccttttctcgacacgactactagcaagtattcc

SEQ ID NO: 82786 - DNA, 2441 bp, Zea Mays
ccctctgcccaacaggagcgactccgactccgactccgactccgagggcggtgcgagtgaccttgcccttgtttggattggacgacgactgggtccgcgagctgccagcgcggtctcccaccactatccctctctcccctctccgtttgtctccatcctttctacctcggctgctgcgttgcgtgtggcgctgtgcttgggcagacgtgggcaccatgcctgggtgacttggtgtagcactgtagctgtggcatggagctgaggaagacgacgacgggggagagaagaatgctccccgggtgctaacttggccgccgctgctcaggggacgagtcgagggggagaagaggaaagtccagtttcttcagcttcttggttggatgcaggaccagaagatgtgcagatggagatggtgagctacctcggcgagctggtccagaagcaggagatgaccatcaatatagcagggagtgcatcagagatcctcatcaaaatggtgtgcagtggtaatacggcaattcgaaaggcgaccctcgatgtcctggttcagatctcgtcccaccaccccaacgccaagacgcttgtggatgctggtgccgtccctgtcatggtagaggagctcttcatacgaaagattgatgatgagcccatgggctctaagacagaggctgccgcggtgctcgccaacatcgtcgagtctggcttggatccagaggccatcaccgtgaacaaggaaggccacgtcatcacgtccaagtactcggtatacaacttcgctcacatgctcaagtgctccatgcctgacaccctcaacctaagcattgtgcgcgtgctgctcgcgctgaccgctctccccaagcctctcgccacggtggtctcggtcatgaaggagcaagacagtggacagacggtgattgagctgatgggctcgctgacagagtcgcttgtcatcgccgcaatgaggctgcttattgcgttgtccccgcagatggggcacaccattgccgagaagctgtgcaaggccccggggcagccagggaggcttgtcaagagcattggcctgcacgggcggatcatggagcggcacgccatgtcagctactctcctggcgaagctgccgtaccagcacatcgctctgaacctggcgctgatcaaccagggcgcgatggttaccgtgctagccaagatagaggagatgcagcgcggcgagacgcgggcaagccgccatgcgaaggcgtatatggagggcctcatgggtgtgctggtccggctaacgacgacgctgtatgacccggacgtgctcttggcggccatggatcacaacctcacgtcggtgctcacagatctcgtgcggtccgcaggcagcgacgaggtccagcggctcgccgcgattggtctcgagaacctcagcagccagtcgcccaacctttcccagcccccgaccgaggagcggcgcccgaagaagaagaacatcctccggcgcctgcgcgaggcgcacgcggggcgggtgcacgacaaccggaggccgccggcgcacagccgggtttgcccggtgcaccgtggggtgtgttccccgtccaccacgttctgcctggtggaggctggcgcggtggagggcctcttgtgcgtcctggagagcagcgagaacgggcgcgtggtggaggccgcgctcggtgcgctgtgcacgctcatggacgacgcggtggacgtgacgagcggcgtggccgtgctcgcggagcacgacgcggcgcggcacgtgcttcgcgcgctgcggcagcaccgtgacgacgggcggagagggggcggcggcgctgccgcaggcgagacggtcactcggaggtgtttctgggcggtggagaggttcctggctcacggcagcgagcggtgcgtgagggaggtcaccagcgatcgggcgctgccgagcctgctggtgggcgccttccacaagggcgacgccgccaccaagcaggtggccgagagcgtgctccggtgcctgcaccgcatgccggattactccgcgacctacgaatccgtcgaactgtaaccaacacatgacgcgcacgactgcgcatgtcttgcctctcttttatcaagcttcgtctcttggttatgtttgtaaaattggtttttgtgtgtaacatgggttgatgtattgtttggtgtagctaaaggaaaatagaaaaggaaaaactgaagatgcagttatgtatgcaagtataaccaaagtttatagcaagggaagatactagtcttttgattcttcttactatttttttgtgtgtgtgttcagtagttcttttttagggaccgtgttcaattcagtaggttttgacaagagtgcctcctaaaatcagtctccagataatttgttttgtaattttgatgtttcgtttgacatgcctctctagccttttctcgacacgactactagcaagtattcc

SEQ ID NO: 82787 - DNA, 3770 bp, Zea Mays
ccctctgcccaacaggagcgactccgactccgactccgactccgagggcggtgcgagtgaccttgcccttgtttggattggacgacgactgggtccgcgagctgccagcgcggtctcccaccactatccctctctcccctctccgtttgtctccatcctttctacctcggctgctgcgttgcgtgtggcgctgtgcttgggcagacgtgggcaccatgcctgggtgacttggtgtagcactgtagctgtggcatggagctgaggaagacgacgacgggggagagaagaatgctccccgggtgctaacttggccgccgctgctcaggggacgagtcgagggggagaagaggaaagtccagtttcttcagcttcttggttggatgcagcgaagtgaggcgcaggccaggaaggcatcactcgccgagtctgttctagcagccatctccgagctgatgccttcagcggcagccgccgtcgatgctgagcacgagagcttcatggatgtcggcagccacctccaccatggagccctgcccacagtgtcagtggaggcgcagaaggtgcagggttccccagccaacgcgctgcacgtgatggagtatctggctgccaatgttgacctcgccaaggacctcgtcacaaggtgcagcgccatcgcgcagcagctcatggacgacgacctcctgggcataaccgaggacttggacaaggtcatcaagaacataagcaatgagctcaacaagatgccagcagcgacgttcgagagcagcaggtttgcggaaccagcggtcagtggacaccttcaggttgtcaggaaccagcatgatctgttcgagcagcaatcctttgatggctactcggagggagatatgccaatggtcgtggcaatcgagaggccacccaagagaagaacgctgcacaacagtgacatgccgaggctggtggacttcctgcagggaatgtaccaggagtcacatgagatcggtggtcagtcatttggttcactccctgaagtcgcggaatatgtggagccattgtatgattctttcttctgccctctcacaaacaaggttatggttgatccagtgacaacggagagtggcatcacttatgacaggaaagctatagaggattactttgacaagtttacagatggctctgaacctgtgatatgtcctgttacaaagatggccatgcagagcaagacactgaggagtaatcttccgttgaagagcacaattgcagagtggattacaaggaatgaagcgacacgggtcaggatcgcacgcaccgcgctctctatggcgaccacagaggctatggtgcttgaggccatacatgagctgaaggtgctggctaggctgaggagaaagaacagggatcagatgcacaagattggcatcaccaagttcctagcacggcttctggaccacaaggatgcacttattcgctgtgactccctcgacctcctctgcttgttggttgaggatgatacaggaaagagctttcgaagtcagagttgctgttggagaacattggatcaactgctgggagcatactgatcctcaccacgatgaagtttaatagctcatctgatcctattgctgccgagaaggctggagaagtcctcgagaacctggagaaatgccccaagaatatcaagtacatggctgaaagtggctacttggatcctctgcaaaggcacctagttgaaggaccagaagatgtgcagatggagatggtgagctacctcggcgagctggtccagaagcaggagatgaccatcaatatagcagggagtgcatcagagatcctcatcaaaatggtgtgcagtggtaatacggcaattcgaaaggcgaccctcgatgtcctggttcagatctcgtcccaccaccccaacgccaagacgcttgtggatgctggtgccgtccctgtcatggtagaggagctcttcatacgaaagattgatgatgagcccatgggctctaagacagaggctgccgcggtgctcgccaacatcgtcgagtctggcttggatccagaggccatcaccgtgaacaaggaaggccacgtcatcacgtccaagtactcggtatacaacttcgctcacatgctcaagtgctccatgcctgacaccctcaacctaagcattgtgcgcgtgctgctcgcgctgaccgctctccccaagcctctcgccacggtggtctcggtcatgaaggagcaagacagtggacagacggtgattgagctgatgggctcgctgacagagtcgcttgtcatcgccgcaatgaggctgcttattgcgttgtccccgcagatggggcacaccattgccgagaagctgtgcaaggccccggggcagccagggaggcttgtcaagagcattggcctgcacgggcggatcatggagcggcacgccatgtcagctactctcctggcgaagctgccgtaccagcacatcgctctgaacctggcgctgatcaaccagggcgcgatggttaccgtgctagccaagatagaggagatgcagcgcggcgagacgcgggcaagccgccatgcgaaggcgtatatggagggcctcatgggtgtgctggtccggctaacgacgacgctgtatgacccggacgtgctcttggcggccatggatcacaacctcacgtcggtgctcacagatctcgtgcggtccgcaggcagcgacgaggtccagcggctcgccgcgattggtctcgagaacctcagcagccagtcgcccaacctttcccagcccccgaccgaggagcggcgcccgaagaagaagaacatcctccggcgcctgcgcgaggcgcacgcggggcgggtgcacgacaaccggaggccgccggcgcacagccgggtttgcccggtgcaccgtggggtgtgttccccgtccaccacgttctgcctggtggaggctggcgcggtggagggcctcttgtgcgtcctggagagcagcgagaacgggcgcgtggtggaggccgcgctcggtgcgctgtgcacgctcatggacgacgcggtggacgtgacgagcggcgtggccgtgctcgcggagcacgacgcggcgcggcacgtgcttcgcgcgctgcggcagcaccgtgacgacgggcggagagggggcggcggcgctgccgcaggcgagacggtcactcggaggtgtttctgggcggtggagaggttcctggctcacggcagcgagcggtgcgtgagggaggtcaccagcgatcgggcgctgccgagcctgctggtgggcgccttccacaagggcgacgccgccaccaagcaggtggccgagagcgtgctccggtgcctgcaccgcatgccggattactccgcgacctacgaatccgtcgaactgtaaccaacacatgacgcgcacgactgcgcatgtcttgcctctcttttatcaagcttcgtctcttggttatgtttgtaaaattggtttttgtgtgtaacatgggttgatgtattgtttggtgtagctaaaggaaaatagaaaaggaaaaactgaagatgcagttatgtatgcaagtataaccaaagtttatagcaagggaagatactagtcttttgattcttcttactatttttttgtgtgtgtgttcagtagttcttttttagggaccgtgttcaattcagtaggttttgacaagagtgcctcctaaaatcagtctccagataatttgttttgtaattttgatgtttcgtttgacatgcctctctagccttttctcgacacgactactagcaagtattcc

SEQ ID NO: 82788 - DNA, 3929 bp, Zea Mays
gcgctgcctgcctgcctgctgctggtaaacaagtgagtgagctgtgtgattagaaaaaaagggggcgccctctgcccaacaggagcgactccgactccgactccgactccgagggcggtgcgagtgaccttgcccttgtttggattggacgacgactgggtccgcgagctgccagcgcggtctcccaccactatccctctctcccctctccgtttgtctccatcctttctacctcggctgctgcgttgcgtgtggcgctgtgcttgggcagacgtgggcaccatgcctgggtgacttggtgtagcactgtagctgtggcatggagctgaggaagacgacgacgggggagagaagaatgctccccgggtgctaacttggccgccgctgctcaggggacgagtcgagggggagaagaggaaagtccagtttcttcagcttcttggttggatgcagtgaggcgcaggccaggaaggcatcactcgccgagtctgttctagcagccatctccgagctgatgccttcagcggcagccgccgtcgatgctgagcacgagagcttcatggatgtcggcagccacctccaccatggagccctgcccacagtgtcagtggaggcgcagaaggtgcagggttccccagccaacgcgctgcacgtgatggagtatctggctgccaatgttgacctcgccaaggacctcgtcacaaggtgcagcgccatcgcgcagcagctcatggacgacgacctcctgggcataaccgaggacttggacaaggtcatcaagaacataagcaatgagctcaacaagatgccagcagcgacgttcgagagcagcaggtttgcggaaccagcggtcagtggacaccttcaggttgtcaggaaccagcatgatctgttcgagcagcaatcctttgatggctactcggagggagatatgccaatggtcgtggcaatcgagaggccacccaagagaagaacgctgcacaacagtgacatgccgaggctggtggacttcctgcagggaatgtaccaggagtcacatgagatcggtggtcagtcatttggttcactccctgaagtcgcggaatatgtggagccattgtatgattctttcttctgccctctcacaaacaaggttatggttgatccagtgacaacggagagtggcatcacttatgacaggaaagctatagaggattactttgacaagtttacagatggctctgaacctgtgatatgtcctgttacaaagatggccatgcagagcaagacactgaggagtaatcttccgttgaagagcacaattgcagagtggattacaaggaatgaagcgacacgggtcaggatcgcacgcaccgcgctctctatggcgaccacagaggctatggtgcttgaggccatacatgagctgaaggtgctggctaggctgaggagaaagaacagggatcagatgcacaagattggcatcaccaagttcctagcacggcttctggaccacaaggatgcacttattcgctgtgactccctcgacctcctctgcttgttggttgaggatgatacaggaaaggaaatcatagcgaaaaccagagccgtctcaaggacaataaagctgctatccagcagtagtactgatgagaggcatgcatctatatctttcttgctagagctttcgaagtcagagttgctgttggagaacattggatcaactgctgggagcatactgatcctcaccacgatgaagtttaatagctcatctgatcctattgctgccgagaaggctggagaagtcctcgagaacctggagaaatgccccaagaatatcaagtacatggctgaaagtggctacttggatcctctgcaaaggcacctagttgaaggaccagaagatgtgcagatggagatggtgagctacctcggcgagctggtccagaagcaggagatgaccatcaatatagcagggagtgcatcagagatcctcatcaaaatggtgtgcagtggtaatacggcaattcgaaaggcgaccctcgatgtcctggttcagatctcgtcccaccaccccaacgccaagacgcttgtggatgctggtgccgtccctgtcatggtagaggagctcttcatacgaaagattgatgatgagcccatgggctctaagacagaggctgccgcggtgctcgccaacatcgtcgagtctggcttggatccagaggccatcaccgtgaacaaggaaggccacgtcatcacgtccaagtactcggtatacaacttcgctcacatgctcaagtgctccatgcctgacaccctcaacctaagcattgtgcgcgtgctgctcgcgctgaccgctctccccaagcctctcgccacggtggtctcggtcatgaaggagcaagacagtggacagacggtgattgagctgatgggctcgctgacagagtcgcttgtcatcgccgcaatgaggctgcttattgcgttgtccccgcagatggggcacaccattgccgagaagctgtgcaaggccccggggcagccagggaggcttgtcaagagcattggcctgcacgggcggatcatggagcggcacgccatgtcagctactctcctggcgaagctgccgtaccagcacatcgctctgaacctggcgctgatcaaccagggcgcgatggttaccgtgctagccaagatagaggagatgcagcgcggcgagacgcgggcaagccgccatgcgaaggcgtatatggagggcctcatgggtgtgctggtccggctaacgacgacgctgtatgacccggacgtgctcttggcggccatggatcacaacctcacgtcggtgctcacagatctcgtgcggtccgcaggcagcgacgaggtccagcggctcgccgcgattggtctcgagaacctcagcagccagtcgcccaacctttcccagcccccgaccgaggagcggcgcccgaagaagaagaacatcctccggcgcctgcgcgaggcgcacgcggggcgggtgcacgacaaccggaggccgccggcgcacagccgggtttgcccggtgcaccgtggggtgtgttccccgtccaccacgttctgcctggtggaggctggcgcggtggagggcctcttgtgcgtcctggagagcagcgagaacgggcgcgtggtggaggccgcgctcggtgcgctgtgcacgctcatggacgacgcggtggacgtgacgagcggcgtggccgtgctcgcggagcacgacgcggcgcggcacgtgcttcgcgcgctgcggcagcaccgtgacgacgggcggagagggggcggcggcgctgccgcaggcgagacggtcactcggaggtgtttctgggcggtggagaggttcctggctcacggcagcgagcggtgcgtgagggaggtcaccagcgatcgggcgctgccgagcctgctggtgggcgccttccacaagggcgacgccgccaccaagcaggtggccgagagcgtgctccggtgcctgcaccgcatgccggattactccgcgacctacgaatccgtcgaactgtaaccaacacatgacgcgcacgactgcgcatgtcttgcctctcttttatcaagcttcgtctcttggttatgtttgtaaaattggtttttgtgtgtaacatgggttgatgtattgtttggtgtagctaaaggaaaatagaaaaggaaaaactgaagatgcagttatgtatgcaagtataaccaaagtttatagcaagggaagatactagtcttttgattcttcttactatttttttgtgtgtgtgttcagtagttcttttttagggaccgtgttcaattcagtaggttttgacaagagtgcctcctaaaatcagtctccagataatttgttttgtaattttgatgtttcgtttgacatgcctctctagccttttctcgacacgactactagcaagtattcc

SEQ ID NO: 82789 - DNA, 3999 bp, Zea Mays
aataaccagctcctggttaagaaaaaaggtcaacatctttgtactcttcccgtccagcccgtggtgcgctgcctgcctgcctgctgctggtaaacaagtgagtgagctgtgtgattagaaaaaaagggggcgccctctgcccaacaggagcgactccgactccgactccgactccgagggcggtgcgagtgaccttgcccttgtttggattggacgacgactgggtccgcgagctgccagcgcggtctcccaccactatccctctctcccctctccgtttgtctccatcctttctacctcggctgctgcgttgcgtgtggcgctgtgcttgggcagacgtgggcaccatgcctgggtgacttggtgtagcactgtagctgtggcatggagctgaggaagacgacgacgggggagagaagaatgctccccgggtgctaacttggccgccgctgctcaggggacgagtcgagggggagaagaggaaagtccagtttcttcagcttcttggttggatgcagcgaagtgaggcgcaggccaggaaggcatcactcgccgagtctgttctagcagccatctccgagctgatgccttcagcggcagccgccgtcgatgctgagcacgagagcttcatggatgtcggcagccacctccaccatggagccctgcccacagtgtcagtggaggcgcagaaggtgcagggttccccagccaacgcgctgcacgtgatggagtatctggctgccaatgttgacctcgccaaggacctcgtcacaaggtgcagcgccatcgcgcagcagctcatggacgacgacctcctgggcataaccgaggacttggacaaggtcatcaagaacataagcaatgagctcaacaagatgccagcagcgacgttcgagagcagcaggtttgcggaaccagcggtcagtggacaccttcaggttgtcaggaaccagcatgatctgttcgagcagcaatcctttgatggctactcggagggagatatgccaatggtcgtggcaatcgagaggccacccaagagaagaacgctgcacaacagtgacatgccgaggctggtggacttcctgcagggaatgtaccaggagtcacatgagatcggtggtcagtcatttggttcactccctgaagtcgcggaatatgtggagccattgtatgattctttcttctgccctctcacaaacaaggttatggttgatccagtgacaacggagagtggcatcacttatgacaggaaagctatagaggattactttgacaagtttacagatggctctgaacctgtgatatgtcctgttacaaagatggccatgcagagcaagacactgaggagtaatcttccgttgaagagcacaattgcagagtggattacaaggaatgaagcgacacgggtcaggatcgcacgcaccgcgctctctatggcgaccacagaggctatggtgcttgaggccatacatgagctgaaggtgctggctaggctgaggagaaagaacagggatcagatgcacaagattggcatcaccaagttcctagcacggcttctggaccacaaggatgcacttattcgctgtgactccctcgacctcctctgcttgttggttgaggatgatacaggaaaggaaatcatagcgaaaaccagagccgtctcaaggacaataaagctgctatccagcagtagtactgatgagaggcatgcatctatatctttcttgctagagctttcgaagtcagagttgctgttggagaacattggatcaactgctgggagcatactgatcctcaccacgatgaagtttaatagctcatctgatcctattgctgccgagaaggctggagaagtcctcgagaacctggagaaatgccccaagaatatcaagtacatggctgaaagtggctacttggatcctctgcaaaggcacctagttgaaggaccagaagatgtgcagatggagatggtgagctacctcggcgagctggtccagaagcaggagatgaccatcaatatagcagggagtgcatcagagatcctcatcaaaatggtgtgcagtggtaatacggcaattcgaaaggcgaccctcgatgtcctggttcagatctcgtcccaccaccccaacgccaagacgcttgtggatgctggtgccgtccctgtcatggtagaggagctcttcatacgaaagattgatgatgagcccatgggctctaagacagaggctgccgcggtgctcgccaacatcgtcgagtctggcttggatccagaggccatcaccgtgaacaaggaaggccacgtcatcacgtccaagtactcggtatacaacttcgctcacatgctcaagtgctccatgcctgacaccctcaacctaagcattgtgcgcgtgctgctcgcgctgaccgctctccccaagcctctcgccacggtggtctcggtcatgaaggagcaagacagtggacagacggtgattgagctgatgggctcgctgacagagtcgcttgtcatcgccgcaatgaggctgcttattgcgttgtccccgcagatggggcacaccattgccgagaagctgtgcaaggccccggggcagccagggaggcttgtcaagagcattggcctgcacgggcggatcatggagcggcacgccatgtcagctactctcctggcgaagctgccgtaccagcacatcgctctgaacctggcgctgatcaaccagggcgcgatggttaccgtgctagccaagatagaggagatgcagcgcggcgagacgcgggcaagccgccatgcgaaggcgtatatggagggcctcatgggtgtgctggtccggctaacgacgacgctgtatgacccggacgtgctcttggcggccatggatcacaacctcacgtcggtgctcacagatctcgtgcggtccgcaggcagcgacgaggtccagcggctcgccgcgattggtctcgagaacctcagcagccagtcgcccaacctttcccagcccccgaccgaggagcggcgcccgaagaagaagaacatcctccggcgcctgcgcgaggcgcacgcggggcgggtgcacgacaaccggaggccgccggcgcacagccgggtttgcccggtgcaccgtggggtgtgttccccgtccaccacgttctgcctggtggaggctggcgcggtggagggcctcttgtgcgtcctggagagcagcgagaacgggcgcgtggtggaggccgcgctcggtgcgctgtgcacgctcatggacgacgcggtggacgtgacgagcggcgtggccgtgctcgcggagcacgacgcggcgcggcacgtgcttcgcgcgctgcggcagcaccgtgacgacgggcggagagggggcggcggcgctgccgcaggcgagacggtcactcggaggtgtttctgggcggtggagaggttcctggctcacggcagcgagcggtgcgtgagggaggtcaccagcgatcgggcgctgccgagcctgctggtgggcgccttccacaagggcgacgccgccaccaagcaggtggccgagagcgtgctccggtgcctgcaccgcatgccggattactccgcgacctacgaatccgtcgaactgtaaccaacacatgacgcgcacgactgcgcatgtcttgcctctcttttatcaagcttcgtctcttggttatgtttgtaaaattggtttttgtgtgtaacatgggttgatgtattgtttggtgtagctaaaggaaaatagaaaaggaaaaactgaagatgcagttatgtatgcaagtataaccaaagtttatagcaagggaagatactagtcttttgattcttcttactatttttttgtgtgtgtgttcagtagttcttttttagggaccgtgttcaattcagtaggttttgacaagagtgcctcctaaaatcagtctccagataatttgttttgtaattttgatgtttcgtttgacatgcctctctagccttttctcgacacgactactagcaagtattcc

SEQ ID NO: 82790 - DNA, 583 bp, Zea Mays
agaagtggtctacccaaaacacaagaaagaagagaaatataaggatgctgaaccgagtgcaatagatcttttcaaggacatgcattgcagcaagaagaaaggtttttctgaaaatgtaaagaaagcaattgttgacatggaagcaagggtgacaacaccagttgaggatggacaacaacaaaagtctcctatagaagttgtttctgaagtgctatggggctccagtttatttctacagaatgttggtctgcaagataactccaagaaaagctccacaacaactgtttttgctaaggttcaagaacttcataatcaattggagtctgagaggctagaaaaagatgggcttcaagaagaagtagaaaccttaaaggctcaggcacaggcctcaaaggagaccatggacaatatgaagagatcgatggaagaaaataacagtctcctccgtcaactgttgagcttcaatcgaagccaaacgtccccatcttaagtctgctatagtatcatgttatattagttctggattcaggttttataaatttggaatatgtttaaaactttcatactttgagttgaagttata

SEQ ID NO: 82791 - DNA, 626 bp, Zea Mays
gacaatgatagcaaggcagtggaagatgcatgtctagatatgctaaagggtggacaatgccaaatgagaaagaagagaaatataaggatgctgaaccgagtgcaatagatcttttcaaggacatgcattgcagcaagaagaaaggtttttctgaaaatgtaaagaaagcaattgttgacatggaagcaagggtgacaacaccagttgaggatggacaacaacaaaagtctcctatagaagttgtttctgaagtgctatggggctccagtttatttctacagaatgttggtctgcaagataactccaagaaaagctccacaacaactgtttttgctaaggttcaagaacttcataatcaattggagtctgagaggctagaaaaagatgggcttcaagaagaagtagaaaccttaaaggctcaggcacaggcctcaaaggagaccatggacaatatgaagagatcgatggaagaaaataacagtctcctccgtcaactgttgagcttcaatcgaagccaaacgtccccatcttaagtctgctatagtatcatgttatattagttctggattcaggttttataaatttggaatatgtttaaaactttcatactttgagttgaagttata

SEQ ID NO: 82792 - DNA, 1216 bp, Zea Mays
cgcaggtgtgggaaacatggttgctgtcggcgaacggcgttaacagccgcacctccgttcctccgggcgtgcctccgttcctccggctgcgcccccgctcctccgaccgcccccggtcgaccgttgtatctaatggtcgttgatccggtgacctcccccacaacaactctacccaaagactacgatggctctagggaagaggtccacatggacctcacggaaacccgaagaacttgtgccaactgattacgagaaaataagggctatgaatatgatgaagaacaatcaattgtttcaacggctaggccttggacaattgaaatcactggtgactgctacagctgcaaacaacaaagaagactgtcctcagcaatcagagagtttatatgatggtgaaaacactgacaattctaatgaagaggaatcccaatgtactaacggtggttgtgccaacatctccaatgatggtgatcagatctcaacaaaagtaacaagaggaaataaaataattgtggcacctacggaggagcgaacaattagagtcactaggcaaagaattgctaaagatagttgtatgaagaataaacttaatcgtgaaaaagtacagtatcaacaatgcataggatcccaatcatatattgcaaaagcttatttactgaaagaagagaaatataaggatgctgaaccgagtgcaatagatcttttcaaggacatgcattgcagcaagaagaaaggtttttctgaaaatgtaaagaaagcaattgttgacatggaagcaagggtgacaacaccagttgaggatggacaacaacaaaagtctcctatagaagttgtttctgaagtgctatggggctccagtttatttctacagaatgttggtctgcaagataactccaagaaaagctccacaacaactgtttttgctaaggttcaagaacttcataatcaattggagtctgagaggctagaaaaagatgggcttcaagaagaagtagaaaccttaaaggctcaggcacaggcctcaaaggagaccatggacaatatgaagagatcgatggaagaaaataacagtctcctccgtcaactgttgagcttcaatcgaagccaaacgtccccatcttaagtctgctatagtatcatgttatattagttctggattcaggttttataaatttggaatatgtttaaaactttcatactttgagttgaagttata

SEQ ID NO: 82793 - DNA, 1300 bp, Zea Mays
cgcaggtgtgggaaacatggttgctgtcggcgaacggcgttaacagccgcacctccgttcctccgggcgtgcctccgttcctccggctgcgcccccgctcctccgaccgcccccggtacctctggttgacctcgcccccattcctccggctccgcttcgtgttctccggcctcgcccctgttcatccaaccttcggttctagcccctcgtgaaggtcgaccgttgtatctaatggtcgttgatccggtgacctcccccacaacaactctacccaaagactacgatggctctagggaagaggtccacatggacctcacggaaacccgaagaacttgtgccaactgattacgagaaaataagggctatgaatatgatgaagaacaatcaattgtttcaacggctaggccttggacaattgaaatcactggtgactgctacagctgcaaacaacaaagaagactgtcctcagcaatcagagagtttatatgatggtgaaaacactgacaattctaatgaagaggaatcccaatgtactaacggtggttgtgccaacatctccaatgatggtgatcagatctcaacaaaagtaacaagaggaaataaaataattgtggcacctacggaggagcgaacaattagagtcactaggcaaagaattgctaaagatagttgtatgaagaataaacttaatcgtgaaaaagtacagtatcaacaatgcataggatcccaatcatatattgcaaaagcttatttactgaaagaagagaaatataaggatgctgaaccgagtgcaatagatcttttcaaggacatgcattgcagcaagaagaaaggtttttctgaaaatgttgacatggaagcaagggtgacaacaccagttgaggatggacaacaacaaaagtctcctatagaagttgtttctgaagtgctatggggctccagtttatttctacagaatgttggtctgcaagataactccaagaaaagctccacaacaactgtttttgctaaggttcaagaacttcataatcaattggagtctgagaggctagaaaaagatgggcttcaagaagaagtagaaaccttaaaggctcaggcacaggcctcaaaggagaccatggacaatatgaagagatcgatggaagaaaataacagtctcctccgtcaactgttgagcttcaatcgaagccaaacgtccccatcttaagtctgctatagtatcatgttatattagttctggattcaggttttataaatttggaatatgtttaaaactttcatactttgagttgaagttata

SEQ ID NO: 82794 - DNA, 1326 bp, Zea Mays
gcctgattcatcgcaggtgtgggaaacatggttgctgtcggcgaacggcgttaacagccgcacctccgttcctccgggcgtgcctccgttcctccggctgcgcccccgctcctccgaccgcccccggtacctctggttgacctcgcccccattcctccggctccgcttcgtgttctccggcctcgcccctgttcatccaaccttcggttctagcccctcgtgaaggtcgaccgttgtatctaatggtcgttgatccggtgacctcccccacaacaactctacccaaagactacgatggctctagggaagaggtccacatggacctcacggaaacccgaagaacttgtgccaactgattacgagaaaataagggctatgaatatgatgaagaacaatcaattgtttcaacggctaggccttggacaattgaaatcactggtgactgctacagctgcaaacaacaaagaagactgtcctcagcaatcagagagtttatatgatggtgaaaacactgacaattctaatgaagaggaatcccaatgtactaacggtggttgtgccaacatctccaatgatggtgatcagatctcaacaaaagtaacaagaggaaataaaataattgtggcacctacggaggagcgaacaattagagtcactaggcaaagaattgctaaagatagttgtatgaagaataaacttaatcgtgaaaaagtacagtatcaacaatgcataggatcccaatcatatattgcaaaagcttatttactgaaagaagagaaatataaggatgctgaaccgagtgcaatagatcttttcaaggacatgcattgcagcaagaagaaaggtttttctgaaaatgtaaagaaagcaattgttgacatggaagcaagggtgacaacaccagttgaggatggacaacaacaaaagtctcctatagaagttgtttctgaagtgctatggggctccagtttatttctacagaatgttggtctgcaagataactccaagaaaagctccacaacaactgtttttgctaaggttcaagaacttcataatcaattggagtctgagaggctagaaaaagatgggcttcaagaagaagtagaaaccttaaaggctcaggcacaggcctcaaaggagaccatggacaatatgaagagatcgatggaagaaaataacagtctcctccgtcaactgttgagcttcaatcgaagccaaacgtccccatcttaagtctgctatagtatcatgttatattagttctggattcaggttttataaatttggaatatgtttaaaactttcatactttgagttgaagttata

SEQ ID NO: 82795 - DNA, 1263 bp, Zea Mays
gcctgattcatcgcaggtgtgggaaacatggttgctgtcggcgaacggcgttaacagccgcacctccgttcctccgggcgtgcctccgttcctccggctgcgcccccgctcctccgaccgcccccggtacctctggttgacctcgcccccattcctccggctccgcttcgtgttctccggcctcgcccctgttcatccaaccttcggttctagcccctcgtgaagactacgatggctctagggaagaggtccacatggacctcacggaaacccgaagaacttgtgccaactgattacgagaaaataagggctatgaatatgatgaagaacaatcaattgtttcaacggctaggccttggacaattgaaatcactggtgactgctacagctgcaaacaacaaagaagactgtcctcagcaatcagagagtttatatgatggtgaaaacactgacaattctaatgaagaggaatcccaatgtactaacggtggttgtgccaacatctccaatgatggtgatcagatctcaacaaaagtaacaagaggaaataaaataattgtggcacctacggaggagcgaacaattagagtcactaggcaaagaattgctaaagatagttgtatgaagaataaacttaatcgtgaaaaagtacagtatcaacaatgcataggatcccaatcatatattgcaaaagcttatttactgaaagaagagaaatataaggatgctgaaccgagtgcaatagatcttttcaaggacatgcattgcagcaagaagaaaggtttttctgaaaatgtaaagaaagcaattgttgacatggaagcaagggtgacaacaccagttgaggatggacaacaacaaaagtctcctatagaagttgtttctgaagtgctatggggctccagtttatttctacagaatgttggtctgcaagataactccaagaaaagctccacaacaactgtttttgctaaggttcaagaacttcataatcaattggagtctgagaggctagaaaaagatgggcttcaagaagaagtagaaaccttaaaggctcaggcacaggcctcaaaggagaccatggacaatatgaagagatcgatggaagaaaataacagtctcctccgtcaactgttgagcttcaatcgaagccaaacgtccccatcttaagtctgctatagtatcatgttatattagttctggattcaggttttataaatttggaatatgtttaaaactttcatactttgagttgaagttata

SEQ ID NO: 82796 - DNA, 1073 bp, Zea Mays
cgcaggtgtgggaaacatggttgctgtcggcgaacggcgttaacagccgcacctccgttcctccgggcgtgcctccgttcctccggctgcgcccccgctcctccgaccgcccccggtacctctggttgacctcgcccccattcctccggctccgcttcgtgttctccggcctcgcccctgttcatccaaccttcggttctagcccctcgtgaagactacgatggctctagggaagaggtccacatggacctcacggaaacccgaagaacttgtgccaactgattacgagaaaataagggctatgaatatgatgaagaacaatcaattgtttcaacggctaggccttggacaattgaaatcactggtgactgctacagctgcaaacaacaaagaagactgtcctcagcaatcagagagtttatatgatggtgaaaacactgacaattctaatgaagaggaatcccaatgtactaacggtggttgtgccaacatctccaatgatggtgatcagatctcaacaaaagtaacaagaggaaataaaataattgtggcacctacggaggagcgaacaattagagtcactaggcaaagaattgctaaagtaaaccaagaaaatagccacaacctgtctattcataaacaactcagttcatgtcctgctacaaaccatgattcgatagaaactcttgttgttcctacacaacctagttcaaatgccaccataaacaataacacaacacataacgtagataatgctatagagcctaattctctgatataggaggagagtgataaccacaatgcagttgaaggtaactaaacattttaactgtttagacattgaactatccttgagcaaataacttttatgttttccagcattagtttaggtaactagtataacttaaatttgaacaaaattactcatatgtttttgtatgatttatggcaactaattcttagttatatgcagcatcacacatatcaacaagtttttgtgtcctgaccaggaacaatagatatcataccaaggagaaaaagtatgggctaacaacttgaatcgttaagcagag

SEQ ID NO: 82797 - DNA, 1037 bp, Zea Mays
cgcaggtgtgggaaacatggttgctgtcggcgaacggcgttaacagccgcacctccgttcctccgggcgtgcctccgttcctccggctgcgcccccgctcctccgaccgcccccggtcgaccgttgtatctaatggtcgttgatccggtgacctcccccacaacaactctacccaaagactacgatggctctagggaagaggtccacatggacctcacggaaacccgaagaacttgtgccaactgattacgagaaaataagggctatgaatatgatgaagaacaatcaattgtttcaacggctaggccttggacaattgaaatcactggtgactgctacagctgcaaacaacaaagaagactgtcctcagcaatcagagagtttatatgatggtgaaaacactgacaattctaatgaagaggaatcccaatgtactaacggtggttgtgccaacatctccaatgatggtgatcagatctcaacaaaagtaacaagaggaaataaaataattgtggcacctacggaggagcgaacaattagagtcactaggcaaagaattgctaaagtaaaccaagaaaatagccacaacctgtctattcataaacaactcagttcatgtcctgctacaaaccatgattcgatagaaactcttgttgttcctacacaacctagttcaaatgccaccataaacaataacacaacacataacgtagataatgctatagagcctaattctctgatataggaggagagtgataaccacaatgcagttgaaggtaactaaacattttaactgtttagacattgaactatccttgagcaaataacttttatgttttccagcattagtttaggtaactagtataacttaaatttgaacaaaattactcatatgtttttgtatgatttatggcaactaattcttagttatatgcagcatcacacatatcaacaagtttttgtgtcctgaccaggaacaatagatatcataccaaggagaaaaagtatgggctaacaacttgaatcgttaagcagag

SEQ ID NO: 82798 - DNA, 968 bp, Zea Mays
ccatcttagattacgtttcccttcaaattatattggtgtgggaaacatggttgctgtcggcgaacggcgttaacagccgcacctccgttcctccgggcgtgcctccgttcctccggctgcgcccccgctcctccgaccgcccccggtacctctggttgacctcgcccccattcctccggctccgcttcgtgttctccggcctcgcccctgttcatccaaccttcggttctagcccctcgtgaaggtcgaccgttgtatctaatggtcgttgatccggtgacctcccccacaacaactctacccaaagactacgatggctctagggaagaggtccacatggacctcacggaaacccgaagaacttgtgccaactgattacgagaaaataagggctatgaatatgatgaagaacaatcaattgtttcaacggctaggccttggacaattgaaatcactggtgactgctacagctgcaaacaacaaagaagactgtcctcagcaatcagagagtttatatgatggtgaaaacactgacaattctaatgaagaggaatcccaatgtactaacggtggttgtgccaacatctccaatgatggtgatcagatctcaacaaaagtaacaagaggaaataaaataattgtggcacctacggaggagcgaacaattagagtcactaggcaaagaattgctaaagtaaaccaagaaaatagccacaacctgtctattcataaacaactcagttcatgtcctgctacaaaccatgattcgatagaaactcttgttgttcctacacaacctagttcaaatgccaccataaacaataacacaacacataacgtagataatgctatagagcctaattctctgatataggaggagagtgataaccacaatgcagttgaaggaacaatagatatcataccaaggagaaaaagtatgggctaacaacttgaatcgttaagcagag

SEQ ID NO: 82799 - DNA, 3499 bp, Zea Mays
atggttgctatattactatcttcatacctgaataagagaagggggtgtctgttatacagaaatgaaaaagaagttgactctggaagcccatctgatgttgagatattagaaaagccaacagattctaataagaggaaactactccacgtgcttgatgatagcgaagtagtgtatgaagatgaggaaggccctattactcaagcagacttgcaaaggtggtttgttgatgattgggataaaagagctcatgtaaaagtctctcccgatgggtgcaccaatgactttttaatggttggtctttccacaaaggacatgccagtgaccaaagccgattcaatagatgttttatgtgattatatcatggcaatagaagacaatacgacactagagtttaataccagctacctcgttctacaagctatggccatgtgggggaatgacagactactgaaatttgttagggaccgaaaaacgctgctgcagcagcactacctgaatgtagggactggaatttggacgacaccaggaacggttgaacaagcgtgggtgggagctgggaagcaggggcggccagtgggggcaccgggaggtggagccgttgtgccaaccgagagttggtggcgcggcgccggccgccgggcagggactggtggtgctgccttctcggagtgtggcagcggcggcggcggagcagtgccagatctgcgactccgacggcgcaatccaccattccctggccagtgggggcaccgggaggtggagccgttgttccagcaaccgagagttggtggcgcggcgccggccgccgggcagggattggtggtgctgccttctcggagtgcggcggcggcggagcagtgccagatctgcgaccccgacggcgcaatccaccattccctggcctccgcattgcatcaggatctaacaatcaacaagcaagcttgtccagtctcataagtaacagctacctggtgtagaagggttgctgctatctgcctgtcttcaccttatgaaggaaacaagagaggagcaagaaaggccggattctggcagcttcctctagtacattggctgcaatttctctttcagtttctaccatgcctcgcaacttggaatgcccagtgcagacccagatggcagtctcagccttggaccgaactcttagcagtgagtatcctactaaaagcaaaagcgagaccaaggttggtggatggaaacgtgtttttgtccaaaccgatgttggttgtgtcctggctattcaattgaattgtggtgacaatgcacatacggtcaaaagaaagctgcaggtggccctaaattttcccactgatgagagtgttctgaaaaatgatctcagcaccattagaaatgatttccctttgcttctcaccaagactttcatgcatcgaagttcctccacaccatgcttgtctcctagtggcaaggatctccaacagcaaaaagataggggctgtccaattgaactgttagtatgcccgagccgctgttctcgaacaaggcagctcgtgaaggatgttgctagggcaatcaagaaaggtgtggatccagtacctatcaaaagtgggcttggtggtgcttactatttcaggaacagcaaaggtgagaatgcagcaattgtgaagccaaatgatgaagagccttttgctcccaacaacccaaaaggttttatagggaaatcccttgggcagccaggcctcaaaagatcagttcgaattggcgagacctgttttagagaggttgcggcgtaccttctggactatgataactctgctaatgttcctccgacgttacttgttaagatttctcatcctgtgtttcatatgaatgaagacatcaattttgctaacaaaaatattgctgatggtagcattcaagctgttagcaagactgcatcatttcagcagtttattcctcacgattttgatgccagtgatcatggcacctcaagctttcctgtttctgctgtccataggatcggtattcttgacatcaggatcttcaacactgatagacatgctggcaatcttctggtaaggaagcaaaccggagcaggaaaatttgggaatcatactgaacttattcctattgatcatggtctctgccttccagagtgtttagaggatccttattttgaatggatccactggcctcaggcatcagtcccattctctgaggatgagctcgagtacatagcaaatcttgatccagtaaaagatgctgacatgctgcggatggagttgcctatgatccgtgaagcatgcctgagagtactaatactctcaaccatatttctgaaagaagccacagcatttggtatgtgccttgcagagattggggagatgatgagcagggaatttactgggatggaagatcagccaagtgagctagagtttgtctgcatggaggcaaggaggctggcagcagagcaagaagacagttccacagaacttgactctggtgaggaggatttaactcagtttgaacttgacaatgaatatcatgaaatgctaaaagaaccatcgacccgccagtttgagtttaagacaagaaactccagaaaccaactgtccaaattagatgaagccaatgaagaagaggaagaagaggaagatgatactgaggaggtagaaagtgatgctggaaaattagcatgtcctaggcctgttaataagtggcttgctaacatttcaaagctgtcgacctcactgaagggtgtcaatctaacaaacaaaacccagcgtcaactgtatgctggtcctaagtttgtggatcctgtgaagagcaacagcaatgacagcggctctcagcattgtaactggggaagtgcaaacgacatgctcccttcaagtgtgagcttcgtcaagctggctgacatgaaacctgagacgtggtgcctgttcctcgagaagttccatgagctccttcctgagacattccgctcacgcaagtgcattgtcaaagagcaaagggcgaagcagaggcttggcacttcttgccagttttgagttggcacaggagtagagaggatttgagtgagtgggggcctgaacctgatgtccatgctgatatgatggcctcgctttgtaaatacattttccccctttttcttagctaggctctgctagacatgagttgcttgaaagaagttgggattcaatgtctgcctgtttctggccgcccgactcttccactcatgatatgcactcaaaagtttcattcgaatgaacattcagcagaaagtttctcgtgtcgtaactaacattgtggcagataaacgctaaagatattacaatcgttttgttgtgttgcgattgacatgttcagcaagtcttgtaatttagtcgtttctgcagacctgcagtgactgaattcgttttgttattcacatggcaatggtaaaaatccagtgtctttactcacactgagctactactgtcgaattcagtgtctgtactcacatggccatggtaaaaatgca

SEQ ID NO: 82800 - DNA, 2088 bp, Zea Mays
cgctccgacgacgcgcccggccagcctgtgctcctctcccgcgtcttcaagtccgagcgcatcgagctctcggaggaccgcctcatcgcggccagcaccaagggcttccgcatggtgcgcgcgacccgcggcgttgtggcaggggcgtggtacttcgaggtcaaggtcgtgcacctcggccccaccggccacacccgccttggatgggccaccaacaaggctgacctccagatgcccgtcggcttcgacgcctatgggtttgggtaccgtgacgtcgatggcgccaaggtgactaaggcttggagggacaagtacgctgatgaagggtacggggaaggagatgtcctggggttctacatttctctgcctgatggggagcggtatgaaccgaagcagcctgacctgattcagtacaagggaatgccttttcacgtccaagtccccaaggaggagcagaagacgccggatcctgtccctggtaccctcttctgatcaatcgaaataggcaatttgcattgccaacaatgagattatggctggttcatatgttcattaaaacatgcatatttttattatttttattagtgatcttacaaatgtggattagaatggttggacatcaagttttcctcaacgagggagctgaattacaaaatggcaatatatgcatacttattatggattgtttagagcacttacatagatgtttgttaggaatgtttccgacctatgttgcaacggcggaggaggtgaaacattattttggtacaagctcgacaccgacaccgacaccgacaaggctctataatagcaaatatcttttgctttctacttagatgacatctattaaatataaatttgtgtacaacaatttcctgccaggtcaatgaatctgatcaatgaagggtaagtatttatatttcttaatatattggttgatcattcagaggtcaatgaatctgtccggtaagtcctccttgatttgtacaatctagagtggagtggtcctctaatcggtacattttttggtaattccacaaaaaaattttggagtggccatcagtgactaaatgttctttctgaatttggatctttgctagcaagattatttgcttgctcttctgcttccaaaagttcacaaaatggatagatagttccagttaatcttagtccattataggtatggtgatgcttgcaaaggctctattttcatttgaactactatacaccactttaggatgggagtcgtttcattgaaacatgagtttttttaatcatcaagattttggattaagtgttagtacttagtagaaatgtgatattagtataaggctaattaccagtttgttgcaatcaatgccacctatggttggtgtttctttagttgctgatgcaactgaggagctcgagcacgacacgattaactcgggaattttatgtaacgttgatgcaaggacactgacttttatcatcagaaagacttcctactgttgttggcattagcataaatcatatgaaggaagtagattcacatgcacccgtgaagcagaagctacaattatttccaataaatgaagctactcttaagccatttgagaaggttgatttattagacagccctattgccagactacctgacatagagaccacaacacttggagccacatatgttgctagcttagatgcaggagtttggaccaaggaacagttatttgcaggttagcacaaggagaacgcgacagtctttggcccaaaactggatgaagcgcacaagaagaagagggctgattcatggtacaagacggtttcaaatcattcgatttggctgacctttctctgtaaatgtttcttgtccgcgctgctctatctgtttttagaagatgcaaatgaataaattggtctttgctggtattattcttaactactttttatttactgtctttacaaaagcgagtacaagaatatcctcaaattttcgtcaggaagtgtttttctagaatatttatgtgtgcagtgtgcttccatagacttgaatggtttgcatagactatcccatcaacatagacaattggagaagctcaatttccg

SEQ ID NO: 82801 - DNA, 1918 bp, Zea Mays
cgctccgacgacgcgcccggccagcctgtgctcctctcccgcgtcttcaagtccgagcgcatcgagctctcggaggaccgcctcatcgcggccagcaccaagggcttccgcatggtgcgcgcgacccgcggcgttgtggcaggggcgtggtacttcgaggtcaaggtcgtgcacctcggccccaccggccacacccgccttggatgggccaccaacaaggctgacctccagatgcccgtcggcttcgacgcctatgggtttgggtaccgtgacgtcgatggcgccaaggtgactaaggcttggagggacaagtacgctgatgaagggtacggggaaggagatgtcctggggttctacatttctctgcctgatggggagcggtatgaaccgaagcagcctgacctgattcagtacaagggaatgccttttcacgtccaagtccccaaggaggagcagaagacgccggatcctgtccctggtaccctcttctgatcaatcgaaataggcaatttgcattgccctcttctgatcaatcgaaatacaggaatgtttccgacctatgttgcaacggcggaggaggtgaaacattattttggtacaagctcgacaccgacaccgacaccgacaaggctctataatagcaaatatcttttgctttctacttagatgacatctattaaatataaatttgtgtacaacaatttcctgccaggtcaatgaatctgatcaatgaagggtaagtatttatatttcttaatatattggttgatcattcagaggtcaatgaatctgtccggtaagtcctccttgatttgtacaatctagagtggagtggtcctctaatcggtacattttttggtaattccacaaaaaaattttggagtggccatcagtgactaaatgttctttctgaatttggatctttgctagcaagattatttgcttgctcttctgcttccaaaagttcacaaaatggatagatagttccagttaatcttagtccattataggtatggtgatgcttgcaaaggctctattttcatttgaactactatacaccactttaggatgggagtcgtttcattgaaacatgagtttttttaatcatcaagattttggattaagtgttagtacttagtagaaatgtgatattagtataaggctaattaccagtttgttgcaatcaatgccacctatggttggtgtttctttagttgctgatgcaactgaggagctcgagcacgacacgattaactcgggaattttatgtaacgttgatgcaaggacactgacttttatcatcagaaagacttcctactgttgttggcattagcataaatcatatgaaggaagtagattcacatgcacccgtgaagcagaagctacaattatttccaataaatgaagctactcttaagccatttgagaaggttgatttattagacagccctattgccagactacctgacatagagaccacaacacttggagccacatatgttgctagcttagatgcaggagtttggaccaaggaacagttatttgcaggttagcacaaggagaacgcgacagtctttggcccaaaactggatgaagcgcacaagaagaagagggctgattcatggtacaagacggtttcaaatcattcgatttggctgacctttctctgtaaatgtttcttgtccgcgctgctctatctgtttttagaagatgcaaatgaataaattggtctttgctggtattattcttaactactttttatttactgtctttacaaaagcgagtacaagaatatcctcaaattttcgtcaggaagtgtttttctagaatatttatgtgtgcagtgtgcttccatagacttgaatggtttgcatagactatcccatcaacatagacaattggagaagctcaatttccg

SEQ ID NO: 82802 - DNA, 1591 bp, Zea Mays
gtggacacgggcatccccaactgctaccacgttaaaacctacaaaaaaatcaatagtgcagaatgagatgaactaaaactttgttgattaaaaagcaaggagtgcacgattgaagtgacatagggcaagtttttgccataatgcagtttggcacaattaacctatgaaattactgaaaccagagggccactctggagctaaggaaacatagaaaggacttgaagacatcaaaaagggcttcatgaattttaaagagggatgaagattatacttgtggattgtgattctgcagtaacaggccaatagagcttgtcccctctccaatcagttattgatcctccagctccttcaatgacagatgtccaaggttccgaactgctctgtctgagcaacaggggggcaagaaacattaaaaagaagcgagaaacattataagaacacacacctgacttgggtcaggaattgcatgaatctaaaaggcaaaatgcacaagagattgctgagggattgcagtttcacaagtcatagaccaaatgacaacttatcatgatgatgtattattcgatagagatgtagggaaagaaaaatattgttactgtattgtatattattttttgggagcggatgggaaggaaaactcgttccttcctttgtactcattattcagattgtcaacctgttttaaatgttttacaaacagaaagtacacctaaagcactaaaacaactgaactccacactatagcaagatttgaaaaaatacagatgagacaaaaattccactggcaaggacatacctgaaggactgagaagatcacagagaggaaggtgattttgttgggcctaacaactaagttggatggatgaagttgtgcatgagatcttcatttttcccaatactaattagtgaactgtactttagtgtggaaactaagactgcatcagttacatggtagtttggttttcttcttgttttatgtctccttaatttttcagcttatgttttgtctctaaatttattttagattataaaaatgaatgtatgtctatcttaaagactgaagtggtactatcatggcttgctgcaattataatgatgatctgagttaaacctctatactttggataaacattagatcactaagctaactgtgacccagtcagagttttaaaatgggcatttcggcactggagtaagggcttgtatgtttggaattatttgcccagattatataaactggagctacaggcaagcaactgctaggaccggtgattttggtaggataagataattgtttttggagtagaaggcaatacatttttgtatcatctatagatataaaatagaaagaaaatatatcttttttcaggtatatgctggtacatgctttggccttaaagagattttttcatgtgtatcgtttggatctgtttttgtagttatcatacaacagcactgcataataaggtttcggatttcaacaatgcagcaatatgatacctatgctgactggaaagcatatattttaaattttatatctctactactccttaagatgataaggagggcgtccacaccctcaccacggctc

SEQ ID NO: 82803 - DNA, 1315 bp, Zea Mays
aacaatcaaactctcgattaagcatccccaagcactgcacaatggagctgaattgctgggtgcaagggaagctcacactaagatgtccaaggttccgaactgctctgtctgagcaacaggggggcaagaaacattaaaaagaagcgagaaacattataagaacacacacctgacttgggtcaggaattgcatgaatctaaaaggcaaaatgcacaagagattgctgagggattgcagtttcacaagtcatagaccaaatgacaacttatcatgatgatgtattattcgatagagatgtagggaaagaaaaatattgttactgtattgtatattattttttgggagcggatgggaaggaaaactcgttccttcctttgtactcattattcagattgtcaacctgttttaaatgttttacaaacagaaagtacacctaaagcactaaaacaactgaactccacactatagcaagatttgaaaaaatacagatgagacaaaaattccactggcaaggacatacctgaaggactgagaagatcacagagaggaaggtgattttgttgggcctaacaactaagttggatggatgaagttgtgcatgagatcttcatttttcccaatactaattagtgaactgtactttagtgtggaaactaagactgcatcagttacatggtagtttggttttcttcttgttttatgtctccttaatttttcagcttatgttttgtctctaaatttattttagattataaaaatgaatgtatgtctatcttaaagactgaagtggtactatcatggcttgctgcaattataatgatgatctgagttaaacctctatactttggataaacattagatcactaagctaactgtgacccagtcagagttttaaaatgggcatttcggcactggagtaagggcttgtatgtttggaattatttgcccagattatataaactggagctacaggcaagcaactgctaggaccggtgattttggtaggataagataattgtttttggagtagaaggcaatacatttttgtatcatctatagatataaaatagaaagaaaatatatcttttttcaggtatatgctggtacatgctttggccttaaagagattttttcatgtgtatcgtttggatctgtttttgtagttatcatacaacagcactgcataataaggtttcggatttcaacaatgcagcaatatgatacctatgctgactggaaagcatatattttaaattttatatctctactactccttaagatgataaggagggcgtccacaccctcaccacggctc

SEQ ID NO: 82804 - DNA, 3212 bp, Zea Mays
cacgattctggcatcgcgcgattcctcctccatcccgcgtaggccggcgagatccacggacggatgcccccgcccgcgattcccctccccgcgcccgcagccgccgctgccgtcctcgcgcccgtagccgaggacagccgccgcacccgttcttccctgcattcaagtcgtcgccccactgcagccgcatccaaggcgtcctccattccatccatggctccatccagggcatccctgccctcaccgattcttcccttcagccgcgcccacaactcccctttccatgtcctcgcgtcttccattacagccgcatccaaggcgtcacccccttccatccatggcagcccgcgcaagattcttccctgcagccgcgcccacaaatcacgcgaattccccttccatggcgtcgccccttccatccatggcagtcgcgcaccctctgcgcccttccatccatggacgcggctccctacgcgccgcgattcttcccatacgctccctccgtgctgtttgcggctgccaatcctctccctccgcgccgcgattcttcccatcctctcgcggctgccttcccccattagtgtaggcgtccactctccctccctccgcacaccacatctgcgcactccgcgtccacaaccgtcgtcggtgctctctctaagtgtggcaccactgcgtgctccaggcacatcatcggtgtgtcgctgccggtgacgaagaaggagccccgctcccaccggccggtgtgccgccactccgcatccgtgcccagcgctggtgttccacgttgcgaagggaatctcaaataacaaaatttgtcgattttaagtttcttcatcaaccagcgaggggtgcgaagaaggaagggatttgcgcttggttgacccggaccggatggcaggacaccgtcgggggttcgctacaacgcagcgacggcttccgcagcttctcaagccaagggggtctttgcatatcattaaagtttggggtgacctactaaacaaaaatgcactccgcaggacgttggctaaggaggattatggcataataattgagactatgtttaggcggttcagaagacaaggtaccagcgagaggaaatcatatggctgcaccaagccaccaaaaaaattagttactgtagtgaagaactttcattcatctgggcactaaatgtatattagattggcagctgttattctgtaacatattatcacgttttttcttttccctaagattgcagtagcaactatagtcatgtgaaatcaaatctgagtttagagaaaaaaaaattctaaacttctgttctctatcatgtgtgaagataacttcctcatgatatctcatatatcttttcaaatggttagccagctatttcaagtattaaatgatccagaagttgagaaaacatagattgatttcctagagacataaaaacagtacctaaatgcatatcaaggcttagcagcaagacataaaaaactcaaagttaggcccctcaacaatagcatcgactgggcaagcctcttggtagaacccacagtaaacgcatttggtcatgtcaatatcatatctgtgaagagataaaaacaaaataagatcatattaaagtttaattactaaacacagtgagtagctagagcagtaggcgcgtgttgcacgcctacagtagcatgcgtctggtatcagacgataaaagtgtagctaaaccaaaattgattatctttcctattctctacttcatttattaatttgctcttgctttgatgaactgtaatgcttgctactgtttcttggtatttcctccttttggtttggtcatctgtctgattttctattgattctttttaaaaatcaccattctttttttgtaataacatacgtatatgatggatgaatgtaccatacgaatggccaagttcttttgagtagtaatgaacaaactgtttgtttttgttttcctcttcattcctgatcagatgtccaaggttccgaactgctctgtctgagcaacaggggggcaagaaacattaaaaagaagcgagaaacattataagaacacacacctgacttgggtcaggaattgcatgaatctaaaaggcaaaatgcacaagagattgctgagggattgcagtttcacaagtcatagaccaaatgacaacttatcatgatgatgtattattcgatagagatgtagggaaagaaaaatattgttactgtattgtatattattttttgggagcggatgggaaggaaaactcgttccttcctttgtactcattattcagattgtcaacctgttttaaatgttttacaaacagaaagtacacctaaagcactaaaacaactgaactccacactatagcaagatttgaaaaaatacagatgagacaaaaattccactggcaaggacatacctgaaggactgagaagatcacagagaggaaggtgattttgttgggcctaacaactaagttggatggatgaagttgtgcatgagatcttcatttttcccaatactaattagtgaactgtactttagtgtggaaactaagactgcatcagttacatggtagtttggttttcttcttgttttatgtctccttaatttttcagcttatgttttgtctctaaatttattttagattataaaaatgaatgtatgtctatcttaaagactgaagtggtactatcatggcttgctgcaattataatgatgatctgagttaaacctctatactttggataaacattagatcactaagctaactgtgacccagtcagagttttaaaatgggcatttcggcactggagtaagggcttgtatgtttggaattatttgcccagattatataaactggagctacaggcaagcaactgctaggaccggtgattttggtaggataagataattgtttttggagtagaaggcaatacatttttgtatcatctatagatataaaatagaaagaaaatatatcttttttcaggtatatgctggtacatgctttggccttaaagagattttttcatgtgtatcgtttggatctgtttttgtagttatcatacaacagcactgcataataaggtttcggatttcaacaatgcagcaatatgatacctatgctgactggaaagcatatattttaaattttatatctctactactccttaagatgataaggagggcgtccacaccctcaccacggctc

SEQ ID NO: 82805 - DNA, 1517 bp, Zea Mays
cacgattctggcatcgcgcgattcctcctccatcccgcgtaggccggcgagatccacggacggatgcccccgcccgcgattcccctccccgcgcccgcagccgccgctgccgtcctcgcgcccgtagccgaggacagccgccgcacccgttcttccctgcattcaagtcgtcgccccactgcagccgcatccaaggcgtcctccattccatccatggctccatccagggcatccctgccctcaccgattcttcccttcagccgcgcccacaactcccctttccatgtcctcgcgtcttccattacagccgcatccaaggcgtcacccccttccatccatggcagcccgcgcaagattcttccctgcagccgcgcccacaaatcacgcgaattccccttccatggcgtcgccccttccatccatggcagtcgcgcaccctctgcgcccttccatccatggacgcggctccctacgcgccgcgattcttcccatacgctccctccgtgctgtttgcggctgccaatcctctccctccgcgccgcgattcttcccatcctctcgcggctgccttcccccattagtgtaggcgtccactctccctccctccgcacaccacatctgcgcactccgcgtccacaaccgtcgtcggtgctctctctaagtgtggcaccactgcgtgctccaggcacatcatcggtgtgtcgctgccggtgacgaagaaggagccccgctcccaccggccggtgtgccgccactccgcatccgtgcccagcgctggtgttccacgttgcgaagggaatctcaaataacaaaatttgtcgattttaagtttcttcatcaaccagtttgttgttttggctagcgaggggtgcgaagaaggaagggatttgcgcttggttgacccggaccggatggcaggacaccgtcgggggttcgctacaacgcagcgacggcttccgcagcttctcaagccaagggggtctttgcatatcattaaagtttggggtgacctactaaacaaaaatgcactccgcaggacgttggctaaggaggattatggcataataattgagactatgtttaggcggttcagaagacaaggtaccagcgagaggaaatcatatggctgcaccaagccaccaaaaaaattagttactgtagtgaagaactttcattcatctgggcactaaatgtatattagattggcagctgttattctgtaacatattatcacgttttttcttttccctaagattgcagtagcaactatagtcatgtgaaatcaaatctgagtttagagaaaaaaaaattctaaacttctgttctctatcatgtgtgaagataacttcctcatgatatctcatatatcttttcaaatggttagccagctatttcaagtattaaatgatccagaagttgagaaaacatagattgatttcctagagacataaaaacagtacctaaatgcatatcaaggcttagcagcaagacataaaaaactcaaagttaggcccctc

SEQ ID NO: 82806 - DNA, 1237 bp, Zea Mays
  misc_feature (1236)..(1237): n is a, c, g, or t
gtcagttaggaatgatgttatctctagaaacattcctactttggtgcatcgctgcaaagtaatcttcaaagcagagtttgctctagttattttaagagcaaaaggaaaataccacccccaaattgaattatggctcaaagcttatgtgaatatataggaataatggttacttgatggtttcgtgcaatggtgggcttaaccaaatgcgagctgcaatatgtgacatggttgtaattgcaagatatttgaatgtcactttagttgtgccagagttggataagacttcattttggaatgatccaagtgagttccaagatatatttgatgtggagcactttataacctcgttacgaggtgaagttcgcatcctgagagaattacccccaaggatgaagagaagagttgaacttggaatgtttcactccatgcctccaattagttggtctgatatctcctactatcaaaatcagattcttcctttgattcgtaaatacaaggttgtccatctgaatagaactgatgctaggctagcaaacaatggtttaccgatggagactcagaaactgcgatgccgagtaaattatgcctctcttaaatttaccccacaaattgaagagctgggcaagagagtaattagaattcttcgccaaaatggacctttcttggtacttcatttacgttatgaaatggatatgttggctttctctggctgtactcaaggttgcagtactgaagaggcagaagaactcacaagaatgaggtatgcttatccatggtggaaagaaaaagtgattgactcagacttgaaaagaaaagatggcctttgcccattgacgcctgaggagactgctcttgtcctcagagcacttgacattgatagaagtatgcaaatatacattgctgctggggaaatatatggtggaaagcgcaggatggctgctctaacttcagcatacccgaatgtggtgaggaaggagacacttttggaaccttctgatctgatgttcttccagaaccattcatcacaaatggcagcactggattacttagtatccttagaaagtgatatatttgttccaacatatgatgggaatatggctaaagttgttgagggtcatcggagattcatgggctacaagaagacagtcttgttagatcgaaaactcattgttgagctagtggaccggtacacaaatggttctctgcaatgggatgagttctctgcattgatcaagnn

SEQ ID NO: 82807 - DNA, 2521 bp, Zea Mays
cacgcaccaccaccatcactggccaaaccaccagcaccacctcaccgaggcgggcgcaggcagcgaggctggcaggcattcgcaaggcaaaccgaggcaccgacgcccaaaaataaactaggcgtccccacaaatcgctccaccttccttccctctcccctccccttctcgctccgcttgcgctagccccgagatccacgccgcctcctctccggcgcccccgccctcgcctacggcggctcacgctgcctcctggccatctctgcgcggccgcgaccgaccgccggttttgctaaccggtccagggagcactgggcaggaggaggaggaggtgggttccgtagaggcgcggtgccagcctgagcaagagggcgggcgggcggccgggcgccggtgacgttctcagcttcctgcaagctcgccgagttgccgggcggcgtcctgggcggggttgttggtggcgcagggaagcggggaggaggctcgccttgctcgtagctgcattggccgcgtgcgccgaggaggcggccgatttaatcccaggaggagcctccccagcttgtttcgcacgctcccggcgccctaggtgcttctcgctccgcttccgcttggtccatggtccatggggtggaaggtggcgtcagggtgtaaggcggccggcgacaagctcaggctcccaacctcctccgccgccgcgcggtcgcggatgaagctctggttggtgcgcgccaccaccacggtgctgctctggacctgtgtcgtgcagctcacggccgtcggggacacctggggcccgcgggtgctcaagggctggccctcctgcctcacgccgcgcgaggaggaggcggccgccgcgcgcccgcgccctctcgtcgtcgacagggccgcgctgccgcccaaaagaatatataggaataatggttacttgatggtttcgtgcaatggtgggcttaaccaaatgcgagctgcaatatgtgacatggttgtaattgcaagatatttgaatgtcactttagttgtgccagagttggataagacttcattttggaatgatccaagtgagttccaagatatatttgatgtggagcactttataacctcgttacgaggtgaagttcgcatcctgagagaattacccccaaggatgaagagaagagttgaacttggaatgtttcactccatgcctccaattagttggtctgatatctcctactatcaaaatcagattcttcctttgattcgtaaatacaaggttgtccatctgaatagaactgatgctaggctagcaaacaatggtttaccgatggagactcagaaactgcgatgccgagtaaattatgcctctcttaaatttaccccacaaattgaagagctgggcaagagagtaattagaattcttcgccaaaatggacctttcttggtacttcatttacgttatgaaatggatatgttggctttctctggctgtactcaaggttgcagtactgaagaggcagaagaactcacaagaatgaggtatgcttatccatggtggaaagaaaaagtgattgactcagacttgaaaagaaaagatggcctttgcccattgacgcctgaggagactgctcttgtcctcagagcacttgacattgatagaagtatgcaaatatacattgctgctggggaaatatatggtggaaagcgcaggatggctgctctaacttcagcatacccgaatgtggtgaggaaggagacacttttggaaccttctgatctgatgttcttccagaaccattcatcacaaatggcagcactggattacttagtatccttagaaagtgatatatttgttccaacatatgatgggaatatggctaaagttgttgagggtcatcggaggtttgcactattccacttagtcatatacaatttatattatgcatatcggcctatgcagtttcaacataccaggcagcaggctagtcttatttttgtaattgtttcttctgagcgttgcataatgatgcccgtaaaaagatgaactgttaaagtattaaagcacattgatgatcttgtcttcaacctccatcaattctttactactaacactgttgcttcgagatttgtgtaattgaggtttgagacggcataaaaacactacaatatactttgaaaaccacagtttttgaaaataccacaatatactttagtcatgacaataccacaatttaaaataccgcagtttcggaaactgaggttcagacccaagtttagaatactttaaaacagctacaatatttgcaatactttagttttaaaaacagagattttaaatatcttgccaaacaccattatgtatataatactgcagtatttttttttccaaaactgtgaaaaaactgcactcccaaacaccccctagaactttttcttaccctattttctgaagctgaaatctggaaatatgtccattgaagtttattattaatgactacacattagatatcttatctttgcaatttctaagtagcatgttaattac

SEQ ID NO: 82808 - DNA, 1747 bp, Zea Mays
cagttatatcaaaagaaatctgctcgtcgtggagctcccacgcgcgcagctccctcctgccctctgtccatccatggccgcacgctgctcggctctcacgccgttgatttggagcgccagtgcgagcccttctctggtcctcatctcctcagccgctcggcctctgcttctcccatggtcgtcgcgccctctgctcctcctagcccgtcgagtccctccccatccgtgagctcgccctgctccccggcctccctcatcttcctcaggtccagccgttacatcattggtcacgctcgggttttcctctcttcgcctcggcgtccttgtccaagcgccttgcctctcctatctctgtcttgcacttcgtcgcctcaacgcgctcgcatcccttggggccgttttgcctccgcgagacgccagcagcgagctgagtttggtttcgccgggttgctcggattttgggtccgatccggtcttaggcgttcgccatggcgtctggctcctcccctctgttgtctccctcctcaggcaccagccgtgtcgacctccctgctcgctgttctcaagctcgctccggccgtgagtgccgtcgagcccgtcgaaccccgtcctcccttgctcgaccttgtcctcgcccttctggtggccactgtcagcatggtgcttgactgtgctccactatcgtcgctgctgcgtgcctcattgtgtgctcgtcgggggtgctgtctgttgcgcctctgcacccgcccttatcgctagtgccaactccggccgtcgcaacatctactccatcccggcaccctgcactagtgctcgacaaaaataccaaacaagtcatcatgccattgtcttcgtcgaatggaaatcgttgtgctgacacatcgatgtcgttgatcgccatcctcgtccacgccaacaagccgtgaagatgctcttgtgctagccacgcgccacctgctcgaccaaactgaatccccggagtatctggtcaagaattgagattgtgtgcatcgctcgccaggtgtgtgtggtcaaagacgtcaaccgaaaaccatcgtcgttcctctgactatcgcgtcaaattggtcatggtaagccaatttgttattggtgttagttggattgatgaatggtctaacttggtatattaatcgtgatgatactgtggtgagccgaatggctatttcagttattggttcgatgatagggtttgttagatatactaattatatcggtcttcttgccttaagcttatgggtgtcgtggttgtaggtattgttgggggccttcgtcctccgaaggtcctcaaaaacgtaatttaacagtgtttgccaagcatggtttataaacaggtaccttcggattcagcattaaatgcatatacgatgaagaggacatgatcgtgacgaaggttgctgctactttgaagctatgcacaaaggaactttgactcaatcacgggaaaatgaaccgacttaaaggggaaaaggctatctagtcctcatagatttttctataagccaatagtaaatgtaaagggcatgactgtaatttctcataggctgtgtcctgtgcctataaataggtgaacagtacccacgtactgttcatgctgacttgtgcttgcttttgcatcacgcttgtacttttctgccttctatcaagtcgaaggtacttttgtaatttaatattgtatctgcttttccatgattatatatgataagaatatgttgataatgttatatga

SEQ ID NO: 82809 - DNA, 6607 bp, Zea Mays
ggaattcatcccaagaatgtgcaagaggctgatggccactatatctcaaatctgtcaacccttcatctgcaacatagcacacatctctaggctgcaggaaaaaagcaagaggaaaaggtacctggatcagtggcttcctaccaacactacacaattattattagataaaagttcgcttccccaactgatgggaaatacattctcctcagcaatcgaagaatcacaaatctcgtttaccactctaccaatgtccatctggcaaaacttgacgtttttgctttgtttattaacgtaattggagacagaagagacagtgagatgtggcgacatggtctcctacatgtttctttgccacacctgatttttctctgtttgcggagcatacaagtactcaataaatttttggcttcatagaaattactacaagaaatcatgcattgggagcatcgggtctaaattatactttgtctagaaaatacctgtagaaaccatgcattgggactgcccttagtatgattggcaagggtcttaccagtaagctgtattaatggagatttttgtctcaatgaccctacatatgagttccaccctcagcctctttcagccacagaatttgtactactgctcaacactagcgtttagtttgatgaactatggtatgacgatcaatcagtttacatgatctgcaactgtttcacataacttagacttcattaggagcaaaaattccaaaaccccaacatagcaaggcgcatgtaccaacattattatagctagctattttttgaggtgtgccgttgagaaactcaagaaaccccaacatagcaaggcgcatgtaccaacattattatagctagctattttttgaaaagtgccattgagaaactcaagaaactgtgccaatgctattataactgtaccaaagtttgaggtacgtcactatccacacctaggggtgataataagctctaaattttacactataaaatttaagaatcataatggattaggatcagactctatttctattcatttttgaactaaaattaattaagacctcaaacaaattgtgaagaaacatttggatcataatccattaccaccctgttacgaacttccctctagtaagctcatgacctgggtctcctggtatctctcaagggggagtggagagggagctgtgaatggtgtagggcgtaggggtgaggaggacgttgatctcctagatcacctgagcccgcgctgtgcctagccaggatgatcctgctctgagggaatatctttatttcttggatgcctattacaaacgatgcccagccgcccttatagtggaaggcgccctggcgcatcctactgtagagctaatcctctgctattatttaggaaatcatacaaaaaggaaaccaatcctctaagaaaacttatcttctattattcatgaactgatcggctctacttccctttcctacgcctagaaaagtggcggcccacaaaagcatctataacatttccatcctctccgacaaacaactcaccctcgagttggacttctggataacgcctcttcaattaagtacattgttcccaggtagcatcagatggcgcgcgccccatccactgtaccagaagctcccagacacctctgttcaagcgagccttcaccacttttgatagaacagggagcatcttgccacggaggaccgccggtaagggcactggtgctgccggaggatccccttgaaacttcttgagaagtgctacatgaaacacttcatggatcctagcatttgccggcaactggagcttgtacaagacatccccgatatgctgcagaatttgataaggaccataaaacttaggtcctagtttgcaggatgctgctgttgtgacaccaactgctgactgttgttgcaaacgtagccaaacccaatcctcaacattgtattgcacctctcggcgacttttaccttgagtactcttcattgttacctgagcttggagtaacctttgtttgatgtcttccaagaaaacgtaccgatcctggagttgctggtctactgcagccacattggccatccctggcttataggataacatggttggaggatcacgaccatacacaattctgaatggagtacatttgacaacagtttggtatgaggtattataaaaaaaattcagccaaaggaagccactataaccaagtcttgggtcgatcacccgccaaacaacgtaggtacaagacaataatcaggttcaccacctctgctggtactgccgtggccgttgtgggttggcggaacttcattgttgtcggtcaccgtctgggactcaccggaccgatttgccagagtccagactcgggcgctttggcggcctagtgcaccagaccacttgtacggttgaacttcgaggtctcgaaatgttattttataaaatcattggactgatactctgcacggtctggtggctgtcagatctcggagatggtgcacatggacccggatcgatcaggtgcccccgcagacagcagatttttggcatcttttagatggaaggagcaacaactatggggttgcctttggctataaaaagggccccatggcgcactcctttagcaccccaagcactgccaagagcaatacttcactccggtactctgccacaacgcattctagtgattctagtaagatccgagcgccgttctaggttgttcttgtgatttcgtgtgattgcgctcttgtgatcttctctcttgcgttgtgttgttgcgcttgctcttgtgtgtgtactctcccctctcttgttgtgcttgtgagttgtaaactccatcaaactgtgtacggttgtaagtgtaagcaacggaactcttactctcatcaaggatgacactatgagttggggcgattttctgtttattttctcaaacactacacaatgacataaccttagaagggtcggggacacatatttatagccctataggctgcactagaatacactacatactacactacacactacagcacataggtgctatcctctagatgctaaagtgcagtcaaaagactgcattttgactgcactgcagctgccgctgctgctgtactgcctgctgctgccacactacaacagtcaaaagactgctgctgctgtgctgcctgcctatagcagaaatgttgccctccacatgttgtagcagagatgttgtcctccacacgaaaaccacatgacttattctatcattctccccctaatttttgtgtgtcgtcttgtggaaaagtttagccatcccggacctggaacaaagctcaaggaacttgatcctcccaaggggtttggtgagcaggtccacaagttgattcttggtgttgatgtagcgcgccttgatgctctcttctgccaaacagtcacagatgaagtggtacctcacccggatgtgcttgctccgttcatgaaacacggggttcttggccaacgccagggcagactggctgtccacccagagttccactgctccaacgtctctcccgagaagatcaccgagcaggcgagcaagccagagcgcctgagttgaagcggtggagaccgctatgtactcggcctcgcagctggacatggccaccacctgctgcttgacctcgcagatggggcacttgccgaggaagaagaggatctggcttgtgctcttgctggtgtcgatgtcaccggcgtggtcgttgtcgctgtacccgacaagatgtgcctccccagggcacctcggctagtagagaccgtggtcgagagtccccgcaacatagcggacgatcctcttcacagcttgctcgtgctccatcatcggtcgctgcaggaaccgactaacgtagccaacagagtatgccagatccggtcgtgtgtggacgaggtagcgaaggctccccacaagacgccggtactgagtagcatccacctcctccgtcgtgctgtcacggctcagcttcagcgtctcctccatcggagtgagagctgggttgcaattagtgagcctagccaactcaacaatgcgcttggcgtaggccgactggcgaagtgtgatcccagtgtcactctggtgcacctcaatccccaggtaggagagatgccccaggtcgctcatctggaaggtggccttcatctcttccttaaacgtcgtcacctttgcatccttggcgtcggtgattatcaaatcgtcgacgtagacacccaccagcagggcattgtctccattgccccgccgatagatggccgcctcgtgcgggcttggcatgaagcccatcctcttgagcgtggaatccagcttggcattcaacgccctcggtgcctgtcgcaagccataaagggccttgcgcaggcgcaacaccttgccctccttgccagggatcgcaaaacctgacagctggtgtacatagacctcctcctttaagtcgccgttaagaaacgccgacttgacgtccatgtaatgaacgtgccagccctcctaggctaacaacgcaaggaggagtcgcacggattccatccatgccacgggggtgaaagcatcgtcgaagtcgatcccctcctgctgtaaaaaaccgtgtgccaccaagcgagccttgtacttgacgatggcgccggcttcatccctcttcagtttgaacacccacttaagggtgatcgtgcgatgaccatgagggagatcagcgagctcccaggtgcggttcgtctcaacgcgtccatctccgactgcatcgcggcacgccaagccgcgtgtttctcggcctctgtgaaagaccgaggctcaccatcgttgcatgcaagatgcaactctcccgccagaatgcgagaggccaagtccggcaccgacgggtcgatgagaaggccctccaccgtaagataccacaacggcttgccgtcgtagcacgcgtcgacgcactcctcgtcgtgggaaagcggggtcacgagctccaccgggtcgtgcatgacatgggctggtgtcggcgatgacgttcccggagagggtatcgtcggtgctggagtacgtggtgacgaagagcttgctgtagccggagtcgtggctggattgcatggtggcgaagagctcgttgtagccggagctggagagcgtggcgctagagttggagacttggggactggggtagacctgctcgaagaagagttgccgattcccccggctccctcaaagtggacgtactcgatggtgaagtcgtcgtacgtcggagtcgtgtcgtcgtccatcgccttgtcccaggcccatcctcacccttcgtcgaacactacgtcgcgcgccttcgagccctccgcgtagccaatgaacacccctggggtgctcctgtcgtcgagcttgccaatgtggccaagctccttggtgaacacgaggcagccgaagacccgtaggtgagagaccgccgacttgcgcccatgccaagcctcatacagtgttatcccgttgagtgtcttggtgggtgagcggttgaggatgtagaccgctgtcaccaccgcctctccccagaagacagccgacgttcccctctgcttgacgagagcccgagccatccccacaaccgtttggttgcgatgctcgacgacgccgttctgctgcgagctgtatggcgcggagtagtggcgttgaacgccctcatccgcacagtacgaagcgaactcagccgtcgtgaattcaccgccattgtcggtgcgcagcacgtgcagcttgcggccgcactccgcctccgcagcgacctgtacacgcttgatggcgttcgcagcctctcccttgctgccaaggaccatcacccacatgtagcgggagaggtcatcgacgagcagcaagtagtgtcgtcctcctagtgtggctggtgtcaccgggccacacaagtccccatgcacgagctcgagcctctccttggctcggaagctcgactgctagggaaaggggagccgtctctgctttgtcaacacgcagacatcgcagaattgctccacatggtcaaggcacggcaagcctcgtaccatctccttggcactgagccgcttcagggccttgaagttaagatgcctgaagcgctcgtgccactgccatgccccgtcgtcctgacgagcagcaaggcagcaaggttgtgccaccttcacgttaaggatgtaaagccgatttaaactcctgtgtaccttggcaagaaggcgacgagaggggtcccagatcctcatgactccgtgctcgacctccacgcgcgaaccgttctcatccagctgtctcaagctgatgatagagttcctcaacgcagggatgtagtagactccggtgagcagcctgtgctcaccagacgcgacggtgaatacgactgagccggcgcccttgatctctacgccggaggcatccccaaacttgacggagcctcggacgctagagtcgagctcgatgaagaactctcgtcggccggtcatgtgatgagtggcgccggtgtcgaggcaccatccttcgatcatgtcgttgctggagccatcgccgaggaaagcgcgtgccttcgactcatcaaggtggagtgccactgcggccggtgccgctggagattgagtgtgctagaagcaaagtttc

SEQ ID NO: 82810 - DNA, 721 bp, Zea Mays
aggacatcattttggctaaaagatctttacagaggagttgcaaaatgtattgttgcagaatgataagttgctacagcaaacctatcccatattcttctcttatgccaagaacaaaaacatctgtctccaagttcatctcatcagtctttggagtagcacttctatttacccctgtcttcacaagcgtatcaggaattccaagatctcaacgcaatgcttgcaactgaacagatcctcaacaattcaagagatcaatgtatttacatattttggggggtggggggcacacaattttagctcaaagaaaatttatcgtcttccatacagaaacatgcaaccactagatcactttgtttggatatggaaatccaagtgctgcaataagttgagagtttttatctggctactccttatggataggcttcacacacgtaacattctaagaaggaagaactatcagcttgagaacaatgactacgattgcattctttatgatatggaaaggaaggagacaacatatcacctatttttttgcttgtcaatccactcaaaattgttgggcttagattcgaattcagtgacagcttcattgtgatttcaatggcatgctaaagagagtgtgtcaccgcagtacatgcctgaaagtcagattgatccttggtgagctcactttggctcgcttcggaaccgagtgctgccagtcccgctgggtgtagcctct

SEQ ID NO: 82811 - DNA, 4185 bp, Zea Mays
atgggtttaagatgtggttttctttctttctattttggtttaccgaggactggcattagttgaaatgtctcatgacatctgtaacaatattcatggatgaatgattttggcaatatctagtttctttccatctcttttggctggacttgaagaagacattgttgaactcctgaaagaggataatgaagtgcttaaagagggtattgcacatgtgttatcaaaggctggtgtcaatattcgtgaacagttagcctcaacaagttcccttgatcttctattagagcgtttatgcttagagggtacgcggaggcaggctaaatactctgttcatgcacttgctgccattacaaaagatgatggtcttatgtcactatctgttctttacaagaggcttgtggatttgttggaagagaagaaagtgaatataccatctatcttgcaatctttgggttgtatagcccaaatagcgatgccgatttttgaaacacggaaagaagagatattaagtttcataattaaaaaaattcttgactgcaatgatgatatggttcaaaattcttctaataaatctgaatggggtgatagtacacataattgtttgctgaagatttatggcatcaaaactttggtgaagagctatataccttgcaaggatgctcatgcacagccaggaatagagaagttaattgatattctgaagaatattcttacctatggtgatatatctccaaatatggtctcaagtgctgctgataaggcccatttgaggcttgcagcagcaaaagctgttctccgcttatcaaaacaatgggaccataaagtgcctgttgatgtattttatttgactttgaggatttcacaggacgattttcctcaggtgaggaaattatttctttgtaaagtacttcaatatatcaaggaaagggccttggatgcaaaatatgcttgcgccttcatgtttggtgttaacgattatcatggcccacagttagaagagttcaagtacaatctgactgaagtggttcagatatgccaacaagttaagatgcgccaactttcagtccaagcagatatgaatttgttgacggcttacccagaatatataatttcctttttggttcatgcccttgctcatgatccttcatccccggacattgaagaacatgaaaatgtcaaagcatttggtccaacttactggcgactttacctgattctttcaatcctcctgggggaagaaggtttgcaacatagtgttccaggcatgaaaaaggatagcttcactacaataatatctatattcaaaagtatcaaatcttcacaggatgtggttgatggaaataagaacaagactctgtgggctatatgtgatcttggtactcttattgcaaagaggctatgccaagaccaaacgagtttatcagaagctcaaaccgttccattgcctccccaactttatgcaccgcttcaggataaccaaaatgaaaattctgtggagagttatgggcagatttggccgggatgtgagaaagtactggctcattttgaggctgtaatgactgcaaacatggataaggttgaatctcccaaacataagatgcttattgatatgactgatgaatttggaaatgaagttcctcttgggaaaattgtcaaacttcttaaattgcgaggagaaaagaaggcggagaaaaagcagaaggcaccatctagtagttcagtaaatgccgagaacgatgatgatgtcctgggtttagtaagagaaattaacttgagcaaccaagaagatttggaggaattgcaaaagggcaagcctaagaagcgccagacagatacaaaaaatagtaacaagaagccacttgatttttcttcacctaaacgcaaaagatcaatttctaagagtagaccacattcagcaaaaggtagtaaaaacagtgatgaccgtctaatacatactcctaacacagagaggaccagtatctccttggaaactaaattgaaggagaaaaacagagatgattcaatcgatacggaactgttagtatctcccagcattagaacccctgtatctaaaggaaataagggtgctaagagatctcatattgatattttgagcagtgttccaaagaagtctgctgatgcagagagtactaagagaactgttgagccgagaagtctaaatgggtcactcaaaagtcaaaagtcaaaaccgatttctgggttagtacagtgctcaacacaggactcaagcggtaccgacttggtaggacaccgaataaaagtttggtggcctttggataagcgattttatgaaggtactgttcaatcatacgattcatccaagaaaaaacatacggtgctatatgatgacggagatgttgaagtgcttatattggctaaagagaagtggatattgattgaaagtaatgattcatcagtgaagaagcaaaagaaggatcttgggacaaaccaaggaaggtaagctggtattttgtttgctttagaatctactatagcaaactgctgtgacactgttggaagctaagaaacaggcccatgcagtattggattaacataaataactaaacataaatttagtattgaagtccttgtattctatagtaacatgtgtcatttataaactattgacccctagttaccttgcagagcatgggagggaactagcagcaacaagtctccgcctagccaaccaaagtcaaaaaagaggtccttgcctccaaagaagaaagggcaacccaatgataagcgaagaaagactgcagaaagaaacaattctgtagaagaggagggtattggagctggtgacaatgattcagattcatccagtcctcttgcgcactcagatgttgacaaagatgtaaactctgttggccacatggaggaagtaatagttagcttagctgagaaagagaagaccaggaaggactccaaaggcatggaaatgaaagagaagggagggaaggactccaaagacgtgaaaataaaagagaaggctgggaaggagtccaaagacgtggaaatgaaagagaagatagggaaggagtccaaagatgtggaaatgaaagagaagacagggaaggaatccaaatatgcaaaaatgaaagagaaggcagggaaagaatccaaagatctggaagtgaaagagaaggcagggaaggactccaaagacgtggaattgaaacatgaggcagggaaggactccaaagacgtgaaaatgaaagagaaggcagggaaggagtccaaagactcggaaatgaaagagaagatagggaaggagtccaaagatgtaaaaatgaaagataagtcagtgaaagaatccaaagatgtggaaatgaaagagaagcccgggaaggactcaaaagatgtaaaaacgaaagagaaggcagggaaagagtccaaagacctggaagtgaaaggggaggcagggaaagaatccaaacatggcgaagcgaagaagccagggaaggactcaaaagatgtaaaaacgaaagagaatgcggcaggcaaagagtcgaaagacgcggaagtgaaagaaaaggcagtcaaggacccaaaagatgtggaaatggaagggatggcaggaaaggagcccaaagatgtggaaaagctggatggccatactttgagcaacgaggaatcagacaacgatactcttagcgtgtggaaaaaacgtacagcaaaagcaacatagtcttgctttctcagctgaccattcatagtaggatttgcagatttcacaggcaggcaaacgttcggagatgtggatatctcattgattgaccctttgcaatttgacagttgtactgtagaaaatgtttgtttggatagcaacacgttagtatacaacagtggaataggatttgtttgtaatgttattagatgcgggcacctgttgcccattaagctatggcatggtatccctggtttcttgtatatcttggagagcgtcagctcttttgcaggacatagtgctatgccgtcgaactcttgtagaaatgttgtaggcaataaaccagtgacacttgtcgaactacctgtgggcatccatttttcgtttgccatattactttggatctagaatctgacgctggaggtttagtatttgtactcggtatggtttctgtttagagttttggcataattaccgcacaagttttgtactgtcaa

SEQ ID NO: 82812 - DNA, 6174 bp, Zea Mays
gaacaacccgatctcaacccactctgctttgccattccgctcacgagctctccgcctctctctctctctctctctcgctcttttccgccaccccgtcacgccaaatttcgaaacagcgcgagagcagcaaaagccgagggagcccttctttctcagattagaacctaacgagtgcgcttggaggcggaggctgcgagcttgctgcgcgaatttgggcggtcgatccggcgcggcggccgggtatggcggccgcggagcagctgaaggagctgggggagaagctgcaggcggtggcgccggctcctgcggacgaactcgccaagctcctcgagaaagctgtggaatgcttacgtggaatagagcaatcaccggggtcctcagtgatggaagctattcaaccaagtcttaaggctgttaccagagaagaattgctgaagcatgaggatgacaatgtcaaagttctcttggcaacatgtttctgtgaaattacaagaataactgcacctgatgctccctacaacgatgacattttaagggatatattctatctgattgtgggtacatttggcggactcagtgatgttaatagtcaatcctttggcaggagagttgctattcttgaaacagttgctagataccgagcatgtgttgtgatgttagatcttgaatgtgatgatcttattacaaacatgtttcaaacatttttaggagttgtcagcgacagtcatgaagaaaacattgtaaagtcaatgcaggcaataatgatccttattatagatgagagtgaagatgtacaggagagtcttctacgtgtactgctgtcagcattggggcagaaaaaaactggtgctgcaatgtctgctcgtaaacttgctcgcagtgtcattgagcattccgctacaaagcttgaaccttacataaagaagtttctaacgtcatcatgggctgggaatggcagttcttctaatgatcaaattgatcaccagggagttgtatttgatttatatcagtgtgctccgaaggttcttaaggcgatcgtgccgtatattactggggagctactggcagatgaagtagataacaggtctaagtcagttgaattacttggggaaattttttccttacctggagcctctattgtggaatgtttcaagactcttttcacagaattcctcaagagactgactgatagagttgttgaaatccgtatttctgtggttgagtatttgaagagatgtctaatatcaaatccttccagagctgaagctcctgaaatcatcaaggcactttgtgacagattgttggattatgaagaaaatgtgcggaagggagtggtggctgcactttgtgatgtagctacccattctccttatgctattccaattgatacaattaaagtagtagcagagcgtgtccgcgataaatcgcaggctgtgaagtgctataccatggagaggttggcagatatttacaagctgtactgccagagggattctgatagctcaacaaattctgatgattttgagtggatacctggaaaaatattaagatgtctttatgacaaagagtttaggccagagtcaatcgactctattttgagtggttcattgttctcaccagagtaccaaatgaagggaagagtgaaacattggattacagctgcgacatacttcgataaagttgagatgaaagcccttgaacaaattctcctgcacaagcaaagactgcaacaagaaatgctgaaatacatatcgcttcgggaaccaagccaggaagatgcccctgatctgcaaaaaagaatctttggatgtttccggaacatctctcgcttatttagtgactccgcgaagtgcgaggagaacttgaacatgcttcatcagctaaaagatgccgatttctggaaaatattcactagcctgcttaattgttcaactacatttgagaaggcttggtctcttcgggcagagttgcttaagatacttggtgaaaaccatgtgctttataattttgttggcacattaacaatgagatgttcatatttacttgtaaacaaggagtatgcaaaagagatccttgcagaagcttctgcacagaagacttctgggaatacaaaactcatctcatcgtgcatgaatcttctaacggcaatatctagtttctttccatctcttttggctggacttgaagaagacattgttgaactcctgaaagaggataatgaagtgcttaaagagggtattgcacatgtgttatcaaaggctggtgtcaatattcgtgaacagttagcctcaacaagttcccttgatcttctattagagcgtttatgcttagagggtacgcggaggcaggctaaatactctgttcatgcacttgctgccattacaaaagatgatggtcttatgtcactatctgttctttacaagaggcttgtggatttgttggaagagaagaaagtgaatataccatctatcttgcaatctttgggttgtatagcccaaatagcgatgccgatttttgaaacacggaaagaagagatattaagtttcataattaaaaaaattcttgactgcaatgatgatatggttcaaaattcttctaataaatctgaatggggtgatagtacacataattgtttgctgaagatttatggcatcaaaactttggtgaagagctatataccttgcaaggatgctcatgcacagccaggaatagagaagttaattgatattctgaagaatattcttacctatggtgatatatctccaaatatggtctcaagtgctgctgataaggcccatttgaggcttgcagcagcaaaagctgttctccgcttatcaaaacaatgggaccataaagtgcctgttgatgtattttatttgactttgaggatttcacaggacgattttcctcaggtgaggaaattatttctttgtaaagtacttcaatatatcaaggaaagggccttggatgcaaaatatgcttgcgccttcatgtttggtgttaacgattatcatggcccacagttagaagagttcaagtacaatctgactgaagtggttcagatatgccaacaagttaagatgcgccaactttcagtccaagcagatatgaatttgttgacggcttacccagaatatataatttcctttttggttcatgcccttgctcatgatccttcatccccggacattgaagaacatgaaaatgtcaaagcatttggtccaacttactggcgactttacctgattctttcaatcctcctgggggaagaaggtttgcaacatagtgttccaggcatgaaaaaggatagcttcactacaataatatctatattcaaaagtatcaaatcttcacaggatgtggttgatggaaataagaacaagactctgtgggctatatgtgatcttggtactcttattgcaaagaggctatgccaagaccaaacgagtttatcagaagctcaaaccgttccattgcctccccaactttatgcaccgcttcaggataaccaaaatgaaaattctgtggagagttatgggcagatttggccgggatgtgagaaagtactggctcattttgaggctgtaatgactgcaaacatggataaggttgaatctcccaaacataagatgcttattgatatgactgatgaatttggaaatgaagttcctcttgggaaaattgtcaaacttcttaaattgcgaggagaaaagaaggcggagaaaaagcagaaggcaccatctagtagttcagtaaatgccgagaacgatgatgatgtcctgggtttagtaagagaaattaacttgagcaaccaagaagatttggaggaattgcaaaagggcaagcctaagaagcgccagacagatacaaaaaatagtaacaagaagccacttgatttttcttcacctaaacgcaaaagatcaatttctaagagtagaccacattcagcaaaaggtagtaaaaacagtgatgaccgtctaatacatactcctaacacagagaggaccagtatctccttggaaactaaattgaaggagaaaaacagagatgattcaatcgatacggaactgttagtatctcccagcattagaacccctgtatctaaaggaaataagggtgctaagagatctcatattgatattttgagcagtgttccaaagaagtctgctgatgcagagagtactaagagaactgttgagccgagaagtctaaatgggtcactcaaaagtcaaaagtcaaaaccgatttctgggttagtacagtgctcaacacaggactcaagcggtaccgacttggtaggacaccgaataaaagtttggtggcctttggataagcggtgctatatgatgacggagatgttgaagtgcttatattggctaaagagaagtggatattgattgaaagtaatgattcatcagtgaagaagcaaaagaaggatcttgggacaaaccaaggaagagcatgggagggaactagcagcaacaagtctccgcctagccaaccaaagtcaaaaaagaggtccttgcctccaaagaagaaagggcaacccaatgataagcgaagaaagactgcagaaagaaacaattctgtagaagaggagggtattggagctggtgacaatgattcagattcatccagtcctcttgcgcactcagatgttgacaaagatgtaaactctgttggccacatggaggaagtaatagttagcttagctgagaaagagaagaccaggaaggactccaaaggcatggaaatgaaagagaagggagggaaggactccaaagacgtgaaaataaaagagaaggctgggaaggagtccaaagacgtggaaatgaaagagaagatagggaaggagtccaaagatgtaaaaatcaaagaaaaggcagggaaagaatccaaagatgcggaagtgaaagagaagacagggaaggactccaaagacgtggaaacgaaagacaaggcagagaaagactccaaggacgtggaaatggaagaggaggcagggaagcactccaaagacgtgaatatgaaagagaaggcagggaaggagtccaaagatgtggaaatgaaagagaagacagggaaggaatccaaatatgcaaaaatgaaagagaaggcagggaaagaatccaaagatctggaagtgaaagagaaggcagggaaggactccaaagacgtggaattgaaacatgaggcagggaaggactccaaagacgtgaaaatgaaagagaaggcagggaaggagtccaaagactcggaaatgaaagagaagatagggaaggagtccaaagatgtaaaaatgaaagataagtcagtgaaagaatccaaagatgtggaaatgaaagagaagcccgggaaggactcaaaagatgtaaaaacgaaagagaaggcagggaaagagtccaaagacctggaagtgaaaggggaggcagggaaagaatccaaacatggcgaagcgaagaagccagggaaggactcaaaagatgtaaaaacgaaagagaatgcggcaggcaaagagtcgaaagacgcggaagtgaaagaaaaggcagtcaaggacccaaaagatgtggaaatggaagggatggcaggaaaggagcccaaagatgtggaaaagctggatggccatactttgagcaacgaggaatcagacaacgatactcttagcgtgtggaaaaaacgtacagcaaaagcaacatagtcttgctttctcagctgaccattcatagtaggatttgcagatttcacaggcaggcaaacgttcggagatgtggatatctcattgattgaccctttgcaatttgacagttgtactgtagaaaatgtttgtttggatagcaacacgttagtatacaacagtggaataggatttgtttgtaatgttattagatgcgggcacctgttgcccattaagctatggcatggtatccctggtttcttgtatatcttggagagcgtcagctcttttgcaggacatagtgctatgccgtcgaactcttgtagaaatgttgtaggcaataaaccagtgacacttgtcgaactacctgtgggcatccatttttcgtttgccatattactttggatctagaatctgacgctggaggtttagtatttgtactcggtatggtttctgtttagagttttggcataattaccgcacaagttttgtactgtcaa

SEQ ID NO: 82813 - DNA, 6239 bp, Zea Mays
tggactccgagacaccgaaaccagaacaacccgatctcaacccactctgctttgccattccgctcacgagctctccgcctctctctctctctctctctcgctcttttccgccaccccgtcacgccaaatttcgaaacagcgcgagagcagcaaaagccgagggagcccttctttctcagattagaacctaacgagtgcgcttggaggcggaggctgcgagcttgctgcgcgaatttgggcggtcgatccggcgcggcggccgggtatggcggccgcggagcagctgaaggagctgggggagaagctgcaggcggtggcgccggctcctgcggacgaactcgccaagctcctcgagaaagctgtggaatgcttacgtggaatagagcaatcaccggggtcctcagtgatggaagctattcaaccaagtcttaaggctgttaccagagaagaattgctgaagcatgaggatgacaatgtcaaagttctcttggcaacatgtttctgtgaaattacaagaataactgcacctgatgctccctacaacgatgacattttaagggatatattctatctgattgtgggtacatttggcggactcagtgatgttaatagtcaatcctttggcaggagagttgctattcttgaaacagttgctagataccgagcatgtgttgtgatgttagatcttgaatgtgatgatcttattacaaacatgtttcaaacatttttaggagttgtcagcgacagtcatgaagaaaacattgtaaagtcaatgcaggcaataatgatccttattatagatgagagtgaagatgtacaggagagtcttctacgtgtactgctgtcagcattggggcagaaaaaaactggtgctgcaatgtctgctcgtaaacttgctcgcagtgtcattgagcattccgctacaaagcttgaaccttacataaagaagtttctaacgtcatcatgggctgggaatggcagttcttctaatgatcaaattgatcaccagggagttgtatttgatttatatcagtgtgctccgaaggttcttaaggcgatcgtgccgtatattactggggagctactggcagatgaagtagataacaggtctaagtcagttgaattacttggggaaattttttccttacctggagcctctattgtggaatgtttcaagactcttttcacagaattcctcaagagactgactgatagagttgttgaaatccgtatttctgtggttgagtatttgaagagatgtctaatatcaaatccttccagagctgaagctcctgaaatcatcaaggcactttgtgacagattgttggattatgaagaaaatgtgcggaagggagtggtggctgcactttgtgatgtagctacccattctccttatgctattccaattgatacaattaaagtagtagcagagcgtgtccgcgataaatcgcaggctgtgaagtgctataccatggagaggttggcagatatttacaagctgtactgccagagggattctgatagctcaacaaattctgatgattttgagtggatacctggaaaaatattaagatgtctttatgacaaagagtttaggccagagtcaatcgactctattttgagtggttcattgttctcaccagagtaccaaatgaagggaagagtgaaacattggattacagctgcgacatacttcgataaagttgagatgaaagcccttgaacaaattctcctgcacaagcaaagactgcaacaagaaatgctgaaatacatatcgcttcgggaaccaagccaggaagatgcccctgatctgcaaaaaagaatctttggatgtttccggaacatctctcgcttatttagtgactccgcgaagtgcgaggagaacttgaacatgcttcatcagctaaaagatgccgatttctggaaaatattcactagcctgcttaattgttcaactacatttgagaaggcttggtctcttcgggcagagttgcttaagatacttggtgaaaaccatgtgctttataattttgttggcacattaacaatgagatgttcatatttacttgtaaacaaggagtatgcaaaagagatccttgcagaagcttctgcacagaagacttctgggaatacaaaactcatctcatcgtgcatgaatcttctaacggcaatatctagtttctttccatctcttttggctggacttgaagaagacattgttgaactcctgaaagaggataatgaagtgcttaaagagggtattgcacatgtgttatcaaaggctggtgtcaatattcgtgaacagttagcctcaacaagttcccttgatcttctattagagcgtttatgcttagagggtacgcggaggcaggctaaatactctgttcatgcacttgctgccattacaaaagatgatggtcttatgtcactatctgttctttacaagaggcttgtggatttgttggaagagaagaaagtgaatataccatctatcttgcaatctttgggttgtatagcccaaatagcgatgccgatttttgaaacacggaaagaagagatattaagtttcataattaaaaaaattcttgactgcaatgatgatatggttcaaaattcttctaataaatctgaatggggtgatagtacacataattgtttgctgaagatttatggcatcaaaactttggtgaagagctatataccttgcaaggatgctcatgcacagccaggaatagagaagttaattgatattctgaagaatattcttacctatggtgatatatctccaaatatggtctcaagtgctgctgataaggcccatttgaggcttgcagcagcaaaagctgttctccgcttatcaaaacaatgggaccataaagtgcctgttgatgtattttatttgactttgaggatttcacaggacgattttcctcaggtgaggaaattatttctttgtaaagtacttcaatatatcaaggaaagggccttggatgcaaaatatgcttgcgccttcatgtttggtgttaacgattatcatggcccacagttagaagagttcaagtacaatctgactgaagtggttcagatatgccaacaagttaagatgcgccaactttcagtccaagcagatatgaatttgttgacggcttacccagaatatataatttcctttttggttcatgcccttgctcatgatccttcatccccggacattgaagaacatgaaaatgtcaaagcatttggtccaacttactggcgactttacctgattctttcaatcctcctgggggaagaaggtttgcaacatagtgttccaggcatgaaaaaggatagcttcactacaataatatctatattcaaaagtatcaaatcttcacaggatgtggttgatggaaataagaacaagactctgtgggctatatgtgatcttggtactcttattgcaaagaggctatgccaagaccaaacgagtttatcagaagctcaaaccgttccattgcctccccaactttatgcaccgcttcaggataaccaaaatgaaaattctgtggagagttatgggcagatttggccgggatgtgagaaagtactggctcattttgaggctgtaatgactgcaaacatggataaggttgaatctcccaaacataagatgcttattgatatgactgatgaatttggaaatgaagttcctcttgggaaaattgtcaaacttcttaaattgcgaggagaaaagaaggcggagaaaaagcagaaggcaccatctagtagttcagtaaatgccgagaacgatgatgatgtcctgggtttagtaagagaaattaacttgagcaaccaagaagatttggaggaattgcaaaagggcaagcctaagaagcgccagacagatacaaaaaatagtaacaagaagccacttgatttttcttcacctaaacgcaaaagatcaatttctaagagtagaccacattcagcaaaaggtagtaaaaacagtgatgaccgtctaatacatactcctaacacagagaggaccagtatctccttggaaactaaattgaaggagaaaaacagagatgattcaatcgatacggaactgttagtatctcccagcattagaacccctgtatctaaaggaaataagggtgctaagagatctcatattgatattttgagcagtgttccaaagaagtctgctgatgcagagagtactaagagaactgttgagccgagaagtctaaatgggtcactcaaaagtcaaaagtcaaaaccgatttctggtgctcaacacaggactcaagcggtaccgacttggtaggacaccgaataaaagtttggtggcctttggataagcgattttatgaaggtactgttcaatcatacgattcatccaagaaaaaacatacggtgctatatgatgacggagatgttgaagtgcttatattggctaaagagaagtggatattgattgaaagtaatgattcatcagtgaagaagcaaaagaaggatcttgggacaaaccaaggaagagcatgggagggaactagcagcaacaagtctccgcctagccaaccaaagtcaaaaaagaggtccttgcctccaaagaagaaagggcaacccaatgataagcgaagaaagactgcagaaagaaacaattctgtagaagaggagggtattggagctggtgacaatgattcagattcatccagtcctcttgcgcactcagatgttgacaaagatgtaaactctgttggccacatggaggaagtaatagttagcttagctgagaaagagaagaccaggaaggactccaaaggcatggaaatgaaagagaagggagggaaggactccaaagacgtgaaaataaaagagaaggctgggaaggagtccaaagacgtggaaatgaaagagaagatagggaaggagtccaaagatgtaaaaatcaaagaaaaggcagggaaagaatccaaagatgcggaagtgaaagagaagacagggaaggactccaaagacgtggaaacgaaagacaaggcagagaaagactccaaggacgtggaaatggaagaggaggcagggaagcactccaaagacgtgaatatgaaagagaaggcagggaaggagtccaaagatgtggaaatgaaagagaagacagggaaggaatccaaatatgcaaaaatgaaagagaaggcagggaaagaatccaaagatctggaagtgaaagagaaggcagggaaggactccaaagacgtggaattgaaacatgaggcagggaaggactccaaagacgtgaaaatgaaagagaaggcagggaaggagtccaaagactcggaaatgaaagagaagatagggaaggagtccaaagatgtaaaaatgaaagataagtcagtgaaagaatccaaagatgtggaaatgaaagagaagcccgggaaggactcaaaagatgtaaaaacgaaagagaaggcagggaaagagtccaaagacctggaagtgaaaggggaggcagggaaagaatccaaacatggcgaagcgaagaagccagggaaggactcaaaagatgtaaaaacgaaagagaatgcggcaggcaaagagtcgaaagacgcggaagtgaaagaaaaggcagtcaaggacccaaaagatgtggaaatggaagggatggcaggaaaggagcccaaagatgtggaaaagctggatggccatactttgagcaacgaggaatcagacaacgatactcttagcgtgtggaaaaaacgtacagcaaaagcaacatagtcttgctttctcagctgaccattcatagtaggatttgcagatttcacaggcaggcaaacgttcggagatgtggatatctcattgattgaccctttgcaatttgacagttgtactgtagaaaatgtttgtttggatagcaacacgttagtatacaacagtggaataggatttgtttgtaatgttattagatgcgggcacctgttgcccattaagctatggcatggtatccctggtttcttgtatatcttggagagcgtcagctcttttgcaggacatagtgctatgccgtcgaactcttgtagaaatgttgtaggcaataaaccagtgacacttgtcgaactacctgtgggcatccatttttcgtttgccatattactttggatctagaatctgacgctggaggtttagtatttgtactcggtatggtttctgtttagagttttggcataattaccgcacaagttttgtactgtcaa

SEQ ID NO: 82814 - DNA, 1403 bp, Zea Mays
ccgtcactgaaactctccctcccacgctgtccctgtctcctcccgacatcgccgtcgtcgcccccgtccccgcagtcgcccgtgctccgcccgctccaccagggcgcctcgccttgggggacggtctccgaccactggcctcccttcaccgcctaccagcgaccacatgctcagtgacgcctaggtcatcggcgccgaagtttggaggccctgtacgtgcttcacgtgcgggttcttcaagaatgcctctgtcacttcctccatggccgaagtctgggagcggcaaggcctagagcctgttttggctggaggattttccagctgccacagagaataatgaagtaagttggagaaacatgattcatgagctaacaacaaaaatatactagaaagtaaaaaaatagtggcaagctcaaaagcagaatctgtggatgtagttaaatattctacaatgataacaagccaaatatactttccacattatgcaaaggggctcacggcaagtggcaatagctttctgcaattgttccttctttctgtcaagttatttcaattgtcttatgcaatgattctgcaattattctgcaattgtttctgcaagtggcatatctgtggatgtagttaaatattctgcaatgataacaagccaaatataactttctgcaaaggggctcatgagcaattgtcttaactttctgtcaagttcaattcacctattcctcatcaatttcaccatatatgtcaatcattgtcataacttacaactacttagttattttaggtattgtgccttctttgttgtttgaatctaaataatatacccttaaagtactgaaagctattacaaagttttaaattacatagacatctaaaattttcacaggaaaatgtttaaatctaaataatgtacccttaaggtacagaaaagagcaggaccagctatactattacatagttctaaatttcacagacatctgaaatcagtgtagaagccggctcaactccttaagccatgggatgatcctgtcattggtgtcacacagtcgatgtaagatgtttacatgcatgctggactaattcatgatcaaccctattacacgatctattctctattacagtggacaaactccacctctttaagctcaatgccaagcagttcagcctcagttaaaccaattgtcttttttattttagagcttagttcactgataattgttttgttttttctctgaaaaattagagaaattaataacttattttcctgttcctacaacttaataaagtctcattacaagtcatgtttttaagcaggctatgcactctttctccgagaaagatattctttctccaattgctaaacttgtactaaggggtgttgaacaaggtgttctggacaaagaaag

SEQ ID NO: 82815 - DNA, 2038 bp, Zea Mays
aaacacaagcgcagccgccgtcactgaaactctccctcccacgctgtccctgtctcctcccgacatcgccgtcgtcgcccccgtccccgcagtcgcccgtgctccgcccgctccaccagggcgcctcgccttgggggacggtctccgaccactggcctcccttcaccgcctaccagcgaccacatgctcagtgacgcctaggtcatcggcgccgaagtttggaggccctgtacgtgcttcacgtgcgggttcttcaagaatgcctctgtcacttcctccatggccgaagtctgggagcggcaaggtaccggccccctacccttacaactcctagagctctaccctcacgcttaccttagggagacgggatgctttgctcgcctacttgaggacatgctctgatggtgttccctctactaccatttttagttcttgcttgtttcaataaggcatattaggttttgtactaatctgctagggttttgcttcacctacgaggcaatttccttcttctctgttttggttggggttgggtggggttaagtttggttaaacaattccccttttggattagaggggacataggataagtagcagcttctataactgttgttatgcaaaaaaaataatcctataccagcagtaatacactaatactactatactctgctttgtacttctataatacataagaatacatataatcaagtataaacataatccgcctaattttctcatggcagcttgaatcaacatgaattgaggggtgtggggcaatcataatatgatgggaagtaaactcagggaaacatgtacacagcacattagcaaagctagaatgcaacaaatgatgaagtttagagcttcagtgttttttacactagtttctgaatctgattgtacatgcatacctttcttgaaggcctagagcctgttttggctggaggattttccagctgccacagagaataatgaagtaagttggagaaacatgattcatgagctaacaacaaaaatatactagaaagtaaaaaaatagtggcaagctcaaaagcagaatctgtggatgtagttaaatattctacaatgataacaagccaaatatactttccacattatgcaaaggggctcacggcaagtggcaatagctttctgcaattgttccttctttctgtcaagttatttcaattgtcttatgcaatgattctgcaattattctgcaattgtttctgcaagtggcatatctgtggatgtagttaaatattctgcaatgataacaagccaaatataactttctgcaaaggggctcatgagcaattgtcttaactttctgtcaagttcaattcacctattcctcatcaatttcaccatatatgtcaatcattgtcataacttacaactacttagttattttaggtattgtgccttctttgttgtttgaatctaaataatatacccttaaagtactgaaagctattacaaagttttaaattacatagacatctaaaattttcacaggaaaatgtttaaatctaaataatgtacccttaaggtacagaaaagagcaggaccagctatactattacatagttctaaatttcacagacatctgaaatcagtgtagaagccggctcaactccttaagccatgggatgatcctgtcattggtgtcacacagtcgatgtaagatgtttacatgcatgctggactaattcatgatcaaccctattacacgatctattctctattacagtggacaaactccacctctttaagctcaatgccaagcagttcagcctcagttaaaccaattgtcttttttattttagagcttagttcactgataattgttttgttttttctctgaaaaattagagaaattaataacttattttcctgttcctacaacttaataaagtctcattacaagtcatgtttttaagcaggctatgcactctttctccgagaaagatattctttctccaattgctaaacttgtactaaggggtgttgaacaaggtgttctggacaaagaaag

SEQ ID NO: 82816 - DNA, 391 bp, Zea Mays
ccgtcactgaaactctccctcccacgctgtccctgtctcctcccgacatcgccgtcgtcgcccccgtccccgcagtcgcccgtgctccgcccgctccaccagggcgcctcgccttgggggacggtctccgaccactggcctcccttcaccgcctaccagcgaccacatgctcagtgacgcctaggtcatcggcgccgaagtttggaggccctgtacgtgcttcacgtgcgggttcttcaagaatgcctctgtcacttcctccatggccgaagtctgggagcggcaagaagtctcattacaagtcatgtttttaagcaggctatgcactctttctccgagaaagatattctttctccaattgctaaacttgtactaaggggtgttgaacaag

SEQ ID NO: 82817 - DNA, 396 bp, Zea Mays
aaaccctattccacgcaccaaacacaagcgcagccgccgtcactgaaactctccctcccacgctgtccctgtctcctcccgacatcgccgtcgtcgcccccgtccccgcagtcgcccgtgctccgcccgctccaccagggcgcctcgccttgggggacggtctccgaccactggcctcccttcaccgcctaccagcgaccacatgctcagtgacgcctaggtcatcggcgccgaagtttggaggccctgtacgtgcttcacgtgcgggttcttcaagaatgcctctgtcacttcctccatggccgaagtctgggagcggcaaggctatgcactctttctccgagaaagatattctttctccaattgctaaacttgtactaaggggtgttgaacaag

SEQ ID NO: 82818 - DNA, 467 bp, Zea Mays
aaacacaagcgcagccgccgtcactgaaactctccctcccacgctgtccctgtctcctcccgacatcgccgtcgtcgcccccgtccccgcagtcgcccgtgctccgcccgctccaccagggcgcctcgccttgggggacggtctccgaccactggcctcccttcaccgcctaccagcgaccacatgctcagtgacgcctaggtcatcggcgccgaagtttggaggccctgtacgtgcttcacgtgcgggttcttcaagaatgcctctgtcacttcctccatggccgaagtctgggagcggcaagtctcattacaagtcatgtttttaagcaggctatgcactctttctccgagaaaggtaatccttcttttatcaatttaaagaaaaccatttgtattatgatttttctatcctaattcctggaaactgaattctgaattttctatttcttgtaatgttcatttcag

SEQ ID NO: 82819 - DNA, 1936 bp, Zea Mays
ctcgagttgtgctgctggccatggctgtagatgtcgatgttcctctagagatgcggaacttagatgggcaccatacaaacgatagggttgcatgtgtacaaccacctcgtagtttggcagaggtactaagagttgccctggggtcaaaagagttgccttggggtttggacgaggagtcacccaaggggcctgacgaaggaggtgccttggggaccaaaataaatgccctagaggccagggcacaaggtgtctcgagaggcagaacaggtgcctcgaggggggagaagaagtggctcgggggccaaaagagtagccttggtgccaaaagaggagttgccccacgggccaacgcaggagatgctctgagggccgaaatagatgccccagggccagcacatgaggtgcctcgagtgatggaacaggtgcctcagagggtagaacatgtgccccaagggccagaagagttgccccagaggccaacgtaggagatgcccctagggctggaaaagctgcctcaaaaccagaacaggtgccccggcgagtgaacacttcacaaggaactattcgcaattagggatgaaaacaatcggaacagtcgaaaacaatatcgtctatatgaaaacgattgtcggacggtcagaaatttacatggtttcatagttaatctacttattggtgacaacaatacaatgttgatagatatttgaaattcaaattttaaatatgatttttttgcaaacgatattgtctttatggaaacgatacgattatgaggcccctgttatagaatttttttgttacggtttccatccatgttcacactagttgagccagttcagagggtcctctttcccgttgtaggtggagaaaaaaaactcggccgaggaaggaaagatcgttctcccggtattatattaataagagatcgaaacatggtcctgaccgagaaaatctccgaaccgtggccatcattactagcgggccgtcaccatccactctacaacagcccagccaaagggtggcgcggacgtactcggaagccttaaccattacgatagggacctagaggtggagaaggatgggaacgtcatcatttcgtacccagacatcccatagggaaagtcctagggtatggcgcccaccgacgaggatgcctgatggctcccaacaaatggaatcagaagtggaggcgcagcaggtggtagagagaagtgtgggcatagccacgtagctagtgttatactagaggtcactggtatgccgtcgtacttaggcggcccaaaagaaaagccaggcaggtagacgattgaagaggcggcgatctgccgagcttccaggaaagcgagctgcatggactatcgtgcttccattgcactcagtcgtgccaagagcgacatgagctgttgcatgatcaagcgctggaagttccagttagcgtactaggagtcatacatggcgggggagacagtggagtcgatggtagtcgctgtggcgatggagacgacaacggagaagaccaccaggttgttgtcgtcgtcatgtcctggcatctccggtaccagattgttgtataggttatagtggtggctagtgttgagggagcacaaggggtggccagggccttttccatgggcgagcaagagggaaagatcttccttcttaattcttgcttgattagattgatactgttagagtggacacactaaccaattcaacccaaaagcttaagctgttaggagaaggtaggcaatccacttgtacacttcatcatccccactcacgtgtagccagagagaaaggcgcaaaggtggaaataaaggagcggaggcacaaataaaacatctgctatgattcaaacttgatacctctgactctggtaccatgttagagtggacacactaaccaattcaacccaaaagcttactgttaggagaag

SEQ ID NO: 82820 - DNA, 3038 bp, Zea Mays
cccacctccccagttccccaatcccagcgcgccaccgacgcatagcagcaggcagcaccgcagcagcactgcaacactgtattcttctccgcagtcccagtcccagtcggccagtccccacctccagcaggccagcagcaataaactttgagtgagtgaagtgttgaattgctgttaaactttgagcagcaataaatttgcagcaggcccactgaagatgagtaatacttcatcttcgtctagcgcgatggagggctgtggagattttattcccttctgaagcagaagctgctgctgatttcgtggatgatggtgtttctataccaagggtgtctgcaactgcaagtgcaactgtagctccatctgctggttctggtaatatggaagattcacaaaccttaattgataaggctttagcagagctgccacaagagcttgctgacctcgctaaagatcctaagaatcatgctagatcaaaggatccgggctggaagtatggattttggcccaatgagacaaagaaggaaatggtacagtgcatattttgtaaaaaggttgtgcctgcagggataaggagattcaagcaacacctttgtggtggttttggagacactgaaaaatgtccaaaggcacctgccattgttaggaaagagatgcgtgattaccttgttcagaatacaaggtcaaaagccacgctgatggaagaagagaatgtacaaactgcagaagaggaatgtcaaggtgaagttgttgttgtgccaagttctggaacaaaggcaaaggaagcaaaaagaaaagttattgctcaagcttccattacttcttttgttggaaagaaatacgtaaaatcagtgagttcgatgttgtgtaagactcctgaagaggtagtcaatcagaggcatagttccacatcttctcaacctacacttgagcattgtacaaagaagtcaaaggaagcaaaacaaattgtagatgatcatgttgcagattttttttatgagaatggaattccattgaatgcaatcaattcaagaagctgggaaatcatggtggagtcaattgggcaatatggacctggttaccgatctccttcttacaatgccatgagggaacccgtacttgagagggcagttgtgaagacaaatgaattaaggaaaaggcatgaggaatcttggaaggagtatggttgcacactaatgtctgatggatggactgaccaacgacaccgccatctcatcaatttccttgccaacagtccagcaggcaccttttttctaggttatgtggatgcttctagtgaggttgttgatggcattatgttagcaaacttacttgagaaacaaattgagatgattgggaaggaatatgtggtacatgttgtaacagacaatggtgctaacttcaaggcagcaggtaggattttaatggagaggataccaactttgttttggaccccttgtgccgcccattgcttagatttgttgcttgaggaccttggtaaaataaaggatttcagttcttgcatcaatgatgcaaaaaaggtgtctaggtttatatataagcatgggagaattcttgatatgatgagagcaaaggtgggtggagatttggttaggccggctgttacacgttttgcaacctcctttcttacacttgctagcatgcataggcataagcaagcactgaaaaacttatttgtcagtgaagattggtaccgcaacaaattatctacatctatggaagggaaagctgcagagaacattgtgttgtctgtacccttttggaatcatgtagaagattgtttgaaagcttcacagcccattctaattgctttgaggatagcagatggtgatgagacacctgcagttcctgagatcgtgtcagccatgaatacagcaaggacgagcataaaggaatctttgaaaaaaaagccacagctgttgaatgaagttctagggtactttgagaagagatgggagaatcaaatggagcaaaaactatatggggcagcattgtttttgaatccagccaagttttttcctataagagagaatgatagaagggaagcaactagacttaggtcattgttcaatgatgttctatggaaaatggtgtcggacgatgatgagcaaagcataattagcaaacaggctgatgattacgagaggtctgaaggtgaagccttctcaaaggcaatagcaataaaggataggaaccgaaaaaatcctattctttggtggggtgcatatggtgggcttgcatatgagcttcaaacattagcaaaaaggattgttagcctttgttgctcggcatcaggatgtgagcgcagctggagcacattttctcagatacacaccaaaaggaggaatcgattagagcacaagaggttgaataaattggtttatgttagctacaacagaaaaatggcaaataggtttacaaagatacgtgagctcggttcgaagggaaagagaagcaacccattgcaccttgaagaatttcagtgggaaaatgagtgggttgtggctgataatgattcagttcatcaaggagctgcacatgatgaggcaattggtgcatctcaaggtttaagtggccacaatttgccaatggttactgctgcacatgccagaaacttatggactactagtgagtttccaacaaggaaaagaacctcaagaaagcgtcctagggtacctgaaccaactattaatgaagaggagatccttgaagatggcgaagaatctgaatctgaggaaatgcaaaagaatggggaagatggttctgggccttctacctcatttgggactgaaaatgcatttcaagtggatgaagatttgctttagatagtatatcaattaccagtggactttcatttgagaactttaaactttagacttatgtaataattgttgtactcttttgctggaagcctgcaatggcttgttatcctgttcctctgaccttgaaatagcttgagtgcttgacaacttgcagctctactttatgtaaattctaagatggttcaataattgaat

SEQ ID NO: 82821 - DNA, 4004 bp, Zea Mays
ctgtctttcaccttcgtcgtttcctggtggccggcgccctccccagccgtggagctcccaccagcgcgcgcgcccctgcatccctgctccactcggcgcctctgctcctcccctggtcggatggggatccacctggtggcgttcgtggcgggggggcttcctgcaggtgttctaggtgttggcgctgctgattggaaccagtgtgccccgactcgctccttctcgcgccgagctcctcccctgcggctctctcatagcgcctaggatctcctccctcacatctccagggcgcgccgggctactgccccatcgagtagttcgctggtggtcccgcgggtgcctcctggtcgcgctcggccagggagctcccttcctctcgcgtccatcttccccagcgcccttggagcggacgtactctccctcatctccttccccgacgccgccctctccctggtcgagctcgacacgccagatcgacagtcgccatcccctgcgttcggcccaacgttttctgatcgtccgattaatcgcgattaatcggcgattaatcgactgatcagcatcacgcatccgataaggagtaccgacgctatcagggcgattagaaacctgatcgtccgattagtcgacgactaaacgcgattagtcgtccgactagagatcgcggacgatcagtttggcccgcttcgtttttcactgttcgttactttcatttcggcccactcactgccactacagcccagcccactacagcagtacagcccactcagtcactcattcagtacagcccactcacactcagtcactcacggccacgcacgcaggcagcacgttcgccaatcgccaacgccaactcccattgaaaccctagacggtgtccagttctccacacgggcgacggcggccggcggcgcgccaccggcgacctgcgccccctccgcggtccctccccacctccccagttccccaatcccagcgcgccaccgacgcatagcagcaggcagcaccgcagcagcactgcaacactgtattcttctccgcagtcccagtcccagtcggccagtccccacctccagcaggccagcagcaataaactttgagtgagtgaagtgttgaattgctgttaaactttgagcagcaataaatttgcagcaggcccactgaagatgagtaatacttcatcttcgtctagcgttgagcgtgctatgcagcgatggagggctgtggagattttattcccttctgaagcagaagctgctgctgatttcgtggatgatggtgtttctataccaagggtgtctgcaactgcaagtgcaactgtagctccatctgctggttctggtaatatggaagattcacaaaccttaattgataaggctttagcagagctgccacaagagcttgctgacctcgctaaagatcctaagaatcatgctagatcaaaggatccgggctggaagtatggattttggcccaatgagacaaagaaggaaatggtacagtgcatattttgtaaaaaggttgtgcctgcagggataaggagattcaagcaacacctttgtggtggttttggagacactgaaaaatgtccaaaggcacctgccattgttaggaaagagatgcgtgattaccttgttcagaatacaaggtcaaaagccacgctgatggaagaagagaatgtacaaactgcagaagaggaatgtcaaggtgaagttgttgttgtgccaagttctggaacaaaggcaaaggaagcaaaaagaaaagttattgctcaagcttccattacttcttttgttggaaagaaatacgtaaaatcagtgagttcgatgttgtgtaagactcctgaagaggtagtcaatcagaggcatagttccacatcttctcaacctacacttgagcattgtacaaagaagtcaaaggaagcaaaacaaattgtagatgatcatgttgcagattttttttatgagaatggaattccattgaatgcaatcaattcaagaagctgggaaatcatggtggagtcaattgggcaatatggacctggttaccgatctccttcttacaatgccatgagggaacccgtacttgagagggcagttgtgaagacaaatgaattaaggaaaaggcatgaggaatcttggaaggagtatggttgcacactaatgtctgatggatggactgaccaacgacaccgccatctcatcaatttccttgccaacagtccagcaggcaccttttttctaggttatgtggatgcttctagtgaggttgttgatggcattatgttagcaaacttacttgagaaacaaattgagatgattgggaaggaatatgtggtacatgttgtaacagacaatggtgctaacttcaaggcagcaggtaggattttaatggagaggataccaactttgttttggaccccttgtgccgcccattgcttagatttgttgcttgaggaccttggtaaaataaaggatttcagttcttgcatcaatgatgcaaaaaaggtgtctaggtttatatataagcatgggagaattcttgatatgatgagagcaaaggtgggtggagatttggttaggccggctgttacacgttttgcaacctcctttcttacacttgctagcatgcataggcataagcaagcactgaaaaacttatttgtcagtgaagattggtaccgcaacaaattatctacatctatggaagggaaagctgcagagaacattgtgttgtctgtacccttttggaatcatgtagaagattgtttgaaagcttcacagcccattctaattgctttgaggatagcagatggtgatgagacacctgcagttcctgagatcgtgtcagccatgaatacagcaaggacgagcataaaggaatctttgaaaaaaaagccacagctgttgaatgaagttctagggtactttgagaagagatgggagaatcaaatggagcaaaaactatatggggcagcattgtttttgaatccagccaagttttttcctataagagagaatgatagaagggaagcaactagacttaggtcattgttcaatgatgttctatggaaaatggtgtcggacgatgatgagcaaagcataattagcaaacaggctgatgattacgagaggtctgaaggtgaagccttctcaaaggcaatagcaataaaggataggaaccgaaaaaatcctattctttggtggggtgcatatggtgggcttgcatatgagcttcaaacattagcaaaaaggattgttagcctttgttgctcggcatcaggatgtgagcgcagctggagcacattttctcagatacacaccaaaaggaggaatcgattagagcacaagaggttgaataaattggtttatgttagctacaacagaaaaatggcaaataggtttacaaagatacgtgagctcggttcgaagggaaagagaagcaacccattgcaccttgaagaatttcagtgggaaaatgagtgggttgtggctgataatgattcagttcatcaaggagctgcacatgatgaggcaattggtgcatctcaaggtttaagtggccacaatttgccaatggttactgctgcacatgccagaaacttatggactactagtgagtttccaacaaggaaaagaacctcaagaaagcgtcctagggtacctgaaccaactattaatgaagaggagatccttgaagatggcgaagaatctgaatctgaggaaatgcaaaagaatggggaagatggttctgggccttctacctcatttgggactgaaaatgcatttcaagtggatgaagatttgctttagatagtatatcaattaccagtggactttcatttgagaactttaaactttagacttatgtaataattgttgtactcttttgctggaagcctgcaatggcttgttatcctgttcctctgaccttgaaatagcttgagtgcttgacaacttgcagctctactttatgtaaattctaagatggttcaataattgaat

SEQ ID NO: 82822 - DNA, 2516 bp, Zea Mays
agacttcctctttcttccccttctcagcctttccctctcttctctgctctttgcatctctctcttgttcctcccttcctctctctaaaaaagggttctgatccctttctagaagctcctgggtttctgttgccgacccgagctccccaggggcgctcaggaggcgccgagccggcgaccgctccggcggatctgaggagccgccgcggtcgctttgcctccggttccttgtaaactattgattgggaaacactctgaagaagagtttgttggctgcataacatctcctgaagctggtttgaagtttgctgataggaaagatcatgggcgctctctgtgatttctgtggggagcataggtctatggtttactgccgatcagatgcagcatccttgtgtttatcatgtgaccgtaatgtgcattcagctaatgctctttctcggcgtcatacaaggacacttttatgtgaccggtgtgcttcacagcctgctatggtccgctgtctagcagaaaatgcctcgctttgccaaaattgtgattggaatggccacattgcaggatcctcatctgccggacacaaaaggcagactataaattgctattcaggatgtccatcgtctgcagaactttctagaatatggtccttcgtttcagatattcctaatgtagcacctgagccaaactgtgagcaaggaataagcatgatgagcatcagcgacagtggtgtcagtaatcaagataatgctgcaggggacagtattttgttagatatagctagtgcaacacttgtaagtgatattggtacttgtgacaagcttttggtaggttcctcttcaggagctggagtgaacctacttccactggctactggtcaaacagaaacagctggatctgtggattccacaccagataaggattcctgtatgcaggttccctatacgccagataaagatatgttcagtaaggacagcatatatgaagatttttgtgtggatgacgctgaccttgctttcgaaaattatgaagaactctttggtacctctcatattcaaacagaacaactctttgatgatgctggaatagacatttactttgaaatgaaggaagcacctgctgggaattccactgagtccaagctgaagcaacctgcaaatagcaatgcggtatctgccgactctgggatgtcgaaccctggagtgaaaggtgattccagtgtttgtacccctttgaggcaggctaggtctagtctgtctctttcctttgctggtttgactggtgagagtagtgcgggagaccaccaagattgtgtggtatcatcattgcttcttatgggtgagcctccttggcagcctcctggccccgagggctcaattgctggaggtagtagagacagtgcactcacacgatacaaggagaagaaaatgagaagaaagttcgacaagaaaatcaggtacgcttctcgtaaggctagagcagatgtgcgaaagagggtaaagggtcggtttgttaaggctggtgaagcatatgactatgatcctctctgccaaacgaggagttactgaagcatatgatctttatccagttttaaattagcaaactgcaaccaaggctcgttgcagctagaacaaaagcactggcaatccaagctattgggccaaactgtgccttcgaaaagaaaaaaaaaggagaaagctgtcggcatgataaaatatagagaaatatttggatgttgcagaagtttttgagtgaggatcctcctttttcctcctgtacagtggttggaagcggtttgagtctctccatcttttgtgaattagcctgaatccagctaaacagacttgttgcattttgatctccattctgcatttctgctgactgccatcagtctacgtacacgggctggcggctgcggtgtttttggaggtgttcgtccagattagacaagatggctagatgtgatctgtgaaatatccttctattataataatgtaaaatttgctgggacctggatgtttctgctattatcaatgtgcaaataccaggtcgtagccaaactggtcgtcagtttgttctttttaagttggtgatggaacccatccaactggacagtggacaccaactttctgtgctcattctgtccaaaccaacctccaaactgactcgatgttagtactatttgtattatgtgactcctgagcaagtgagcttgtgctcaaacctcaaatacgtcctcttgtaccaaaccacgatattggagggtaaatttttgacctgttcctttgttgttgaaacttctggttattttggaaaaaacaaatgtggaacactgctttgtggcttttctgttctgcactgttgtactcagtcttgcaaattagaagacgatgtggcatttttagacatagttatgtatttagatatatactatgtctaaatacctggtgaaagaaatgtatctagaaaaatcaaaacatgttataatttagaatataatagagaatagagtgagtatttgac

SEQ ID NO: 82823 - DNA, 2184 bp, Zea Mays
agacttcctctttcttccccttctcagcctttccctctcttctctgctctttgcatctctctcttgttcctcccttcctctctctaaaaaagggttctgatccctttctagaagctcctgggtttctgttgccgacccgagctccccaggggcgctcaggaggcgccgagccggcgaccgctccggcggatctgaggagccgccgcggtcgctttgcctccggatcctcatctgccggacacaaaaggcagactataaattgctattcaggatgtccatcgtctgcagaactttctagaatatggtccttcgtttcagatattcctaatgtagcacctgagccaaactgtgagcaaggaataagcatgatgagcatcagcgacagtggtgtcagtaatcaagataatgctgcaggggacagtattttgttagatatagctagtgcaacacttgtaagtgatattggtacttgtgacaagcttttggtaggttcctcttcaggagctggagtgaacctacttccactggctactggtcaaacagaaacagctggatctgtggattccacaccagataaggattcctgtatgcaggttccctatacgccagataaagatatgttcagtaaggacagcatatatgaagatttttgtgtggatgacgctgaccttgctttcgaaaattatgaagaactctttggtacctctcatattcaaacagaacaactctttgatgatgctggaatagacatttactttgaaatgaaggaagcacctgctgggaattccactgagcagtccaagctgaagcaacctgcaaatagcaatgcggtatctgccgactctgggatgtcgaaccctggagtgaaaggtgattccagtgtttgtacccctttgaggcaggctaggtctagtctgtctctttcctttgctggtttgactggtgagagtagtgcgggagaccaccaagattgtgtggtatcatcattgcttcttatgggtgagcctccttggcagcctcctggccccgagggctcaattgctggaggtagtagagacagtgcactcacacgatacaaggagaagaaaatgagaagaaagttcgacaagaaaatcaggtacgcttctcgtaaggctagagcagatgtgcgaaagagggtaaagggtcggtttgttaaggctggtgaagcatatgactatgatcctctctgccaaacgaggagttactgaagcatatgatctttatccagttttaaattagcaaactgcaaccaaggctcgttgcagctagaacaaaagcactggcaatccaagctattgggccaaactgtgccttcgaaaagaaaaaaaaaggagaaagctgtcggcatgataaaatatagagaaatatttggatgttgcagaagtttttgagtgaggatcctcctttttcctcctgtacagtggttggaagcggtttgagtctctccatcttttgtgaattagcctgaatccagctaaacagacttgttgcattttgatctccattctgcatttctgctgactgccatcagtctacgtacacgggctggcggctgcggtgtttttggaggtgttcgtccagattagacaagatggctagatgtgatctgtgaaatatccttctattataataatgtaaaatttgctgggacctggatgtttctgctattatcaatgtgcaaataccaggtcgtagccaaactggtcgtcagtttgttctttttaagttggtgatggaacccatccaactggacagtggacaccaactttctgtgctcattctgtccaaaccaacctccaaactgactcgatgttagtactatttgtattatgtgactcctgagcaagtgagcttgtgctcaaacctcaaatacgtcctcttgtaccaaaccacgatattggagggtaaatttttgacctgttcctttgttgttgaaacttctggttattttggaaaaaacaaatgtggaacactgctttgtggcttttctgttctgcactgttgtactcagtcttgcaaattagaagacgatgtggcatttttagacatagttatgtatttagatatatactatgtctaaatacctggtgaaagaaatgtatctagaaaaatcaaaacatgttataatttagaatataatagagaatagagtgagtatttgac

SEQ ID NO: 82824 - DNA, 2523 bp, Zea Mays
ctcagacttcctctttcttccccttctcagcctttccctctcttctctgctctttgcatctctctcttgttcctcccttcctctctctaaaaaagggttctgatccctttctagaagctcctgggtttctgttgccgacccgagctccccaggggcgctcaggaggcgccgagccggcgaccgctccggcggatctgaggagccgccgcggtcgctttgcctccgttgcgatactgcacaggttccttgtaaactattgattgggaaacactctgaagaagagtttgttggctgcataacatctcctgaagctggtttgaagtttgctgataggaaagatcatgggcgctctctgtgatttctgtggggagcataggtctatggtttactgccgatcagatgcagcatccttgtgtttatcatgtgaccgtaatgtgcattcagctaatgctctttctcggcgtcatacaaggacacttttatgtgaccggtgtgcttcacagcctgctatggtccgctgtctagcagaaaatgcctcgctttgccaaaattgtgattggaatggccacattgcaggatcctcatctgccggacacaaaaggcagactataaattgctattcaggatgtccatcgtctgcagaactttctagaatatggtccttcgtttcagatattcctaatgtagcacctgagccaaactgtgagcaaggaataagcatgatgagcatcagcgacagtggtgtcagtaatcaagataatgctgcaggggacagtattttgttagatatagctagtgcaacacttgtaagtgatattggtacttgtgacaagcttttggtaggttcctcttcaggagctggagtgaacctacttccactggctactggtcaaacagaaacagctggatctgtggattccacaccagataaggttccctatacgccagataaagatatgttcagtaaggacagcatatatgaagatttttgtgtggatgacgctgaccttgctttcgaaaattatgaagaactctttggtacctctcatattcaaacagaacaactctttgatgatgctggaatagacatttactttgaaatgaaggaagcacctgctgggaattccactgagcagtccaagctgaagcaacctgcaaatagcaatgcggtatctgccgactctgggatgtcgaaccctggagtgaaaggtgattccagtgtttgtacccctttgaggcaggctaggtctagtctgtctctttcctttgctggtttgactggtgagagtagtgcgggagaccaccaagattgtgtggtatcatcattgcttcttatgggtgagcctccttggcagcctcctggccccgagggctcaattgctggaggtagtagagacagtgcactcacacgatacaaggagaagaaaatgagaagaaagttcgacaagaaaatcaggtacgcttctcgtaaggctagagcagatgtgcgaaagagggtaaagggtcggtttgttaaggctggtgaagcatatgactatgatcctctctgccaaacgaggagttactgaagcatatgatctttatccagttttaaattagcaaactgcaaccaaggctcgttgcagctagaacaaaagcactggcaatccaagctattgggccaaactgtgccttcgaaaagaaaaaaaaaggagaaagctgtcggcatgataaaatatagagaaatatttggatgttgcagaagtttttgagtgaggatcctcctttttcctcctgtacagtggttggaagcggtttgagtctctccatcttttgtgaattagcctgaatccagctaaacagacttgttgcattttgatctccattctgcatttctgctgactgccatcagtctacgtacacgggctggcggctgcggtgtttttggaggtgttcgtccagattagacaagatggctagatgtgatctgtgaaatatccttctattataataatgtaaaatttgctgggacctggatgtttctgctattatcaatgtgcaaataccaggtcgtagccaaactggtcgtcagtttgttctttttaagttggtgatggaacccatccaactggacagtggacaccaactttctgtgctcattctgtccaaaccaacctccaaactgactcgatgttagtactatttgtattatgtgactcctgagcaagtgagcttgtgctcaaacctcaaatacgtcctcttgtaccaaaccacgatattggagggtaaatttttgacctgttcctttgttgttgaaacttctggttattttggaaaaaacaaatgtggaacactgctttgtggcttttctgttctgcactgttgtactcagtcttgcaaattagaagacgatgtggcatttttagacatagttatgtatttagatatatactatgtctaaatacctggtgaaagaaatgtatctagaaaaatcaaaacatgttataatttagaatataatagagaatagagtgagtatttgac

SEQ ID NO: 82825 - DNA, 2756 bp, Zea Mays
ctcagacttcctctttcttccccttctcagcctttccctctcttctctgctctttgcatctctctcttgttcctcccttcctctctctaaaaaagggttctgatccctttctagaagctcctgggtttctgttgccgacccgagctccccaggggcgctcaggaggcgccgagccggcgaccgctccggcggatctgaggagccgccgcggtcgctttgcctccggttccttgtaaactattgattgggaaacactctgaagaagagtttgttggctgcataacatctcctgaagctggtttgaagtttgctgataggaaagatcatgggcgctctctgtgatttctgtggggagcataggtctatggtttactgccgatcagatgcagcatccttgtgtttatcatgtgaccgtaatgtgcattcagctaatgctctttctcggcgtcatacaaggacacttttatgtgaccggtgtgcttcacagcctgctatggtccgctgtctagcagaaaatgcctcgctttgccaaaattgtgattggaatggccacattgcaggatcctcatctgccggacacaaaaggcagactataaattgctattcaggatgtccatcgtctgcagaactttctagaatatggtccttcgtttcagatattcctaatgtagcacctgagccaaactgtgagcaaggaataagcatgatgagcatcagcgacagtggtgtcagtaatcaagataatgctgcaggggacagtattttgttagatatagctagtgcaacacttgtaagtgatattggtacttgtgacaagcttttggtaggttcctcttcaggagctggagtgaacctacttccactggctactggtcaaacagaaacagctggatctgtggattccacaccagataaggttccctatacgccagataaagatatgttcagtaaggacagcatatatgaagatttttgtgtggatgacgctgaccttgctttcgaaaattatgaagaactctttggtacctctcatattcaaacagaacaactctttgatgatgctggaatagacatttactttgaaatgaaggaagcacctgctgggaattccactgaggtttgtagtttgctaatgaatatttttttcttaatccgttacaatcattcacatccatgtgcacatgcacttctcatagtgttggtgttctctttgctatgccaattaactgaaccaattctgtagtcctcccaatttgtgtaacttataagccgttcattttcctgttaactcatcaaaattgaactgtgtgataagtttttccaggtgcagtttaatttttagtttgggaagggcaggcctggtgcagtgtccaagctgaagcaacctgcaaatagcaatgcggtatctgccgactctgggatgtcgaaccctggagtgaaaggtgattccagtgtttgtacccctttgaggcaggctaggtctagtctgtctctttcctttgctggtttgactggtgagagtagtgcgggagaccaccaagattgtgtggtatcatcattgcttcttatgggtgagcctccttggcagcctcctggccccgagggctcaattgctggaggtagtagagacagtgcactcacacgatacaaggagaagaaaatgagaagaaagttcgacaagaaaatcaggtacgcttctcgtaaggctagagcagatgtgcgaaagagggtaaagggtcggtttgttaaggctggtgaagcatatgactatgatcctctctgccaaacgaggagttactgaagcatatgatctttatccagttttaaattagcaaactgcaaccaaggctcgttgcagctagaacaaaagcactggcaatccaagctattgggccaaactgtgccttcgaaaagaaaaaaaaaggagaaagctgtcggcatgataaaatatagagaaatatttggatgttgcagaagtttttgagtgaggatcctcctttttcctcctgtacagtggttggaagcggtttgagtctctccatcttttgtgaattagcctgaatccagctaaacagacttgttgcattttgatctccattctgcatttctgctgactgccatcagtctacgtacacgggctggcggctgcggtgtttttggaggtgttcgtccagattagacaagatggctagatgtgatctgtgaaatatccttctattataataatgtaaaatttgctgggacctggatgtttctgctattatcaatgtgcaaataccaggtcgtagccaaactggtcgtcagtttgttctttttaagttggtgatggaacccatccaactggacagtggacaccaactttctgtgctcattctgtccaaaccaacctccaaactgactcgatgttagtactatttgtattatgtgactcctgagcaagtgagcttgtgctcaaacctcaaatacgtcctcttgtaccaaaccacgatattggagggtaaatttttgacctgttcctttgttgttgaaacttctggttattttggaaaaaacaaatgtggaacactgctttgtggcttttctgttctgcactgttgtactcagtcttgcaaattagaagacgatgtggcatttttagacatagttatgtatttagatatatactatgtctaaatacctggtgaaagaaatgtatctagaaaaatcaaaacatgttataatttagaatataatagagaatagagtgagtatttgac

SEQ ID NO: 82826 - DNA, 2376 bp, Zea Mays
ctcagacttcctctttcttccccttctcagcctttccctctcttctctgctctttgcatctctctcttgttcctcccttcctctctctaaaaaagggttctgatccctttctagaagctcctgggtttctgttgccgacccgagctccccaggggcgctcaggaggcgccgagccggcgaccgctccggcggatctgaggagccgccgcggtcgctttgcctccggttccttgtaaactattgattgggaaacactctgaagaagagtttgttggctgcataacatctcctgaagctggtttgaagtttgctgataggaaagatcatgggcgctctctgtgatttctgtggggagcataggtctatggtttactgccgatcagatgcagcatccttgtgtttatcatgtgaccgtaatgtgcattcagctaatgctctttctcggcgtcatacaaggacacttttatgtgaccggtgtgcttcacagcctgctatggtccgctgtctagcagaaaatgcctcgctttgccaaaattgtgattggaatggccacattgcaggatcctcatctgccggacacaaaaggcagactataaattgctattcaggatgtccatcgtctgcagaactttctagaatatggtccttcgtttcagatattcctaatgtagcacctgagccaaactgtgagcaaggaataagcatgatgagcatcagcgacagtggtgtcagtaatcaagataatgctgcaggggacagtattttgttagatatagctagtgcaacacttgtaagtgatattggtacttgtgacaagcttttggtaggttcctcttcaggagctggagtgaacctacttccactggctactggtcaaacagaaacagctggatctgtggattccacaccagataaggattcctgtatgcaggttccctatacgccagataaagatatgttcagtaaggacagcatatatgaagatttttgtgtggatgacgctgaccttgctttcgaaaattatgaagaactctttggtacctctcatattcaaacagaacaactctttgatgatgctggaatagacatttactttgaaatgaaggaagcacctgctgggaattccactgagcagtccaagctgaagcaacctgcaaatagcaatgcggtatctgccgactctgggatgtcgaaccctggagtgaaagcctcctggccccgagggctcaattgctggaggtagtagagacagtgcactcacacgatacaaggagaagaaaatgagaagaaagttcgacaagaaaatcaggtacgcttctcgtaaggctagagcagatgtgcgaaagagggtaaagggtcggtttgttaaggctggtgaagcatatgactatgatcctctctgccaaacgaggagttactgaagcatatgatctttatccagttttaaattagcaaactgcaaccaaggctcgttgcagctagaacaaaagcactggcaatccaagctattgggccaaactgtgccttcgaaaagaaaaaaaaaggagaaagctgtcggcatgataaaatatagagaaatatttggatgttgcagaagtttttgagtgaggatcctcctttttcctcctgtacagtggttggaagcggtttgagtctctccatcttttgtgaattagcctgaatccagctaaacagacttgttgcattttgatctccattctgcatttctgctgactgccatcagtctacgtacacgggctggcggctgcggtgtttttggaggtgttcgtccagattagacaagatggctagatgtgatctgtgaaatatccttctattataataatgtaaaatttgctgggacctggatgtttctgctattatcaatgtgcaaataccaggtcgtagccaaactggtcgtcagtttgttctttttaagttggtgatggaacccatccaactggacagtggacaccaactttctgtgctcattctgtccaaaccaacctccaaactgactcgatgttagtactatttgtattatgtgactcctgagcaagtgagcttgtgctcaaacctcaaatacgtcctcttgtaccaaaccacgatattggagggtaaatttttgacctgttcctttgttgttgaaacttctggttattttggaaaaaacaaatgtggaacactgctttgtggcttttctgttctgcactgttgtactcagtcttgcaaattagaagacgatgtggcatttttagacatagttatgtatttagatatatactatgtctaaatacctggtgaaagaaatgtatctagaaaaatcaaaacatgttataatttagaatataatagagaatagagtgagtatttgac

SEQ ID NO: 82827 - DNA, 2379 bp, Zea Mays
ctgccctcagacttcctctttcttccccttctcagcctttccctctcttctctgctctttgcatctctctcttgttcctcccttcctctctctaaaaaagggttctgatccctttctagaagctcctgggtttctgttgccgacccgagctccccaggggcgctcaggaggcgccgagccggcgaccgctccggcggatctgaggagccgccgcggtcgctttgcctccgttgcgatactgcacaggttccttgtaaactattgattgggaaacactctgaagaagagtttgttggctgcataacatctcctgaagctggtttgaagtttgctgataggaaagatcatgggcgctctctgtgatttctgtggggagcataggtctatggtttactgccgatcagatgcagcatccttgtgtttatcatgtgaccgtaatgtgcattcagctaatgctctttctcggcgtcatacaaggacacttttatgtgaccggtgtgcttcacagcctgctatggtccgctgtctagcagaaaatgcctcgctttgccaaaattgtgattggaatggccacattgcaggatcctcatctgccggacacaaaaggcagactataaattgctattcaggatgtccatcgtctgcagaactttctagaatatggtccttcgtttcagatattcctaatgtagcacctgagccaaactgtgagcaaggaataagcatgatgagcatcagcgacagtggtgtcagtaatcaagataatgctgcaggggacagtattttgttagatatagctagtgcaacacttgtaagtgatattggtacttgtgacaagcttttggtaggttcctcttcaggagctggagtgaacctacttccactggctactggtcaaacagaaacagctggatctgtggattccacaccagataaggttccctatacgccagataaagatatgttcagtaaggacagcatatatgaagatttttgtgtggatgacgctgaccttgctttcgaaaattatgaagaactctttggtacctctcatattcaaacagaacaactctttgatgatgctggaatagacatttactttgaaatgaaggaagcacctgctgggaattccactgagtccaagctgaagcaacctgcaaatagcaatgcggtatctgccgactctgggatgtcgaaccctggagtgaaagcctcctggccccgagggctcaattgctggaggtagtagagacagtgcactcacacgatacaaggagaagaaaatgagaagaaagttcgacaagaaaatcaggtacgcttctcgtaaggctagagcagatgtgcgaaagagggtaaagggtcggtttgttaaggctggtgaagcatatgactatgatcctctctgccaaacgaggagttactgaagcatatgatctttatccagttttaaattagcaaactgcaaccaaggctcgttgcagctagaacaaaagcactggcaatccaagctattgggccaaactgtgccttcgaaaagaaaaaaaaaggagaaagctgtcggcatgataaaatatagagaaatatttggatgttgcagaagtttttgagtgaggatcctcctttttcctcctgtacagtggttggaagcggtttgagtctctccatcttttgtgaattagcctgaatccagctaaacagacttgttgcattttgatctccattctgcatttctgctgactgccatcagtctacgtacacgggctggcggctgcggtgtttttggaggtgttcgtccagattagacaagatggctagatgtgatctgtgaaatatccttctattataataatgtaaaatttgctgggacctggatgtttctgctattatcaatgtgcaaataccaggtcgtagccaaactggtcgtcagtttgttctttttaagttggtgatggaacccatccaactggacagtggacaccaactttctgtgctcattctgtccaaaccaacctccaaactgactcgatgttagtactatttgtattatgtgactcctgagcaagtgagcttgtgctcaaacctcaaatacgtcctcttgtaccaaaccacgatattggagggtaaatttttgacctgttcctttgttgttgaaacttctggttattttggaaaaaacaaatgtggaacactgctttgtggcttttctgttctgcactgttgtactcagtcttgcaaattagaagacgatgtggcatttttagacatagttatgtatttagatatatactatgtctaaatacctggtgaaagaaatgtatctagaaaaatcaaaacatgttataatttagaatataatagagaatagagtgagtatttgac

SEQ ID NO: 82828 - DNA, 1847 bp, Zea Mays
cgctagcctgcctgccctcagacttcctctttcttccccttctcagcctttccctctcttctctgctctttgcatctctctcttgttcctcccttcctctctctaaaaaagggttctgatccctttctagaagctcctgggtttctgttgccgacccgagctccccaggggcgctcaggaggcgccgagccggcgaccgctccggcggatctgaggagccgccgcggtcgctttgcctccggattcctgtatgcaggttccctatacgccagataaagatatgttcagtaaggacagcatatatgaagatttttgtgtggatgacgctgaccttgctttcgaaaattatgaagaactctttggtacctctcatattcaaacagaacaactctttgatgatgctggaatagacatttactttgaaatgaaggaagcacctgctgggaattccactgagcagtccaagctgaagcaacctgcaaatagcaatgcggtatctgccgactctgggatgtcgaaccctggagtgaaaggtgattccagtgtttgtacccctttgaggcaggctaggtctagtctgtctctttcctttgctggtttgactggtgagagtagtgcgggagaccaccaagattgtgtggtatcatcattgcttcttatgggtgagcctccttggcagcctcctggccccgagggctcaattgctggaggtagtagagacagtgcactcacacgatacaaggagaagaaaatgagaagaaagttcgacaagaaaatcaggtacgcttctcgtaaggctagagcagatgtgcgaaagagggtaaagggtcggtttgttaaggctggtgaagcatatgactatgatcctctctgccaaacgaggagttactgaagcatatgatctttatccagttttaaattagcaaactgcaaccaaggctcgttgcagctagaacaaaagcactggcaatccaagctattgggccaaactgtgccttcgaaaagaaaaaaaaaggagaaagctgtcggcatgataaaatatagagaaatatttggatgttgcagaagtttttgagtgaggatcctcctttttcctcctgtacagtggttggaagcggtttgagtctctccatcttttgtgaattagcctgaatccagctaaacagacttgttgcattttgatctccattctgcatttctgctgactgccatcagtctacgtacacgggctggcggctgcggtgtttttggaggtgttcgtccagattagacaagatggctagatgtgatctgtgaaatatccttctattataataatgtaaaatttgctgggacctggatgtttctgctattatcaatgtgcaaataccaggtcgtagccaaactggtcgtcagtttgttctttttaagttggtgatggaacccatccaactggacagtggacaccaactttctgtgctcattctgtccaaaccaacctccaaactgactcgatgttagtactatttgtattatgtgactcctgagcaagtgagcttgtgctcaaacctcaaatacgtcctcttgtaccaaaccacgatattggagggtaaatttttgacctgttcctttgttgttgaaacttctggttattttggaaaaaacaaatgtggaacactgctttgtggcttttctgttctgcactgttgtactcagtcttgcaaattagaagacgatgtggcatttttagacatagttatgtatttagatatatactatgtctaaatacctggtgaaagaaatgtatctagaaaaatcaaaacatgttataatttagaatataatagagaatagagtgagtatttgac

SEQ ID NO: 82829 - DNA, 3367 bp, Zea Mays
ctctacgctaccagtctaccgctagcctgcctgccctcagacttcctctttcttccccttctcagcctttccctctcttctctgctctttgcatctctctcttgttcctcccttcctctctctaaaaaagggttctgatccctttctagaagctcctgggtttctgttgccgacccgagctccccaggggcgctcaggaggcgccgagccggcgaccgctccggcggatctgaggagccgccgcggtcgctttgcctccgttgcgatactgcacaggttccttgtaaactattgattgggaaacactctgaagaagagtttgttggctgcataacatctcctgaagctggtttgaagtttgctgataggaaagatcatgggcgctctctgtgatttctgtggggagcataggtctatggtttactgccgatcagatgcagcatccttgtgtttatcatgtgaccgtaatgtgcattcagctaatgctctttctcggcgtcatacaaggacacttttatgtgaccggtgtgcttcacagcctgctatggtccgctgtctagcagaaaatgcctcgctttgccaaaattgtgattggaatggccacattgcaggatcctcatctgccggacacaaaaggcagactataaattgctattcaggatgtccatcgtctgcagaactttctagaatatggtccttcgtttcagatattcctaatgtagcacctgagccaaactgtgagcaaggaataagcatgatgagcatcagcgacagtggtgtcagtaatcaagataatgctgcaggggacagtattttgttagatatagctagtgcaacacttgtaagtgatattggtacttgtgacaagcttttggtaggttcctcttcaggagctggagtgaacctacttccactggctactggtcaaacagaaacagctggatctgtggattccacaccagataaggttccctatacgccagataaagatatgttcagtaaggacagcatatatgaagatttttgtgtggatgacgctgaccttgctttcgaaaattatgaagaactctttggtacctctcatattcaaacagaacaactctttgatgatgctggaatagacatttactttgaaatgaaggaagcacctgctgggaattccactgaggtttgtagtttgctaatgaatatttttttcttaatccgttacaatcattcacatccatgtgcacatgcacttctcatagtgttggtgttctctttgctatgccaattaactgaaccaattctgtagtcctcccaatttgtgtaacttataagccgttcattttcctgttaactcatcaaaattgaactgtgtgataagtttttccaggtgcagtttaatttttagtttgggaagggcaggcctggtgcagtggtaagagttctcactaagtcaccagatcacgggttcgaagctgcctctccgcattttcttataggccctaggttttcttctttctttgatccatagcttattattgacaaactattcaaaatggttgacttttctgaagtgacaaaaggcaggaagaatcttgccttctttatgttagtcttgggttttgggatatagcttgtgccaaatttatgtgtctggttttgtgtttaagaagcaaccagtaaccacagataggactgtaaattgtaacctatcagcattaaatgtatgtcagctagggatgaaactggatctgatacagacggatattagtgatcctgcatccatcctattttccatattgtatctcattttttttctggaatctcagaaccggatagggatatattagagtgatatttatctatacatatcagaaatctgtttttgtatccagatttgattacgatcggatattaaatgttcagattcagataaggactatacatataggattttgaattttcaggatggacagataacgggaaatatccgttacgttttcatccctcatgtcaccagatctgtaaaccatttggtgttatcctgtagtcagcgtatctggtttggacaaattagacgttgcgtttttgtgttttattatatgattattataggattcttgtctcatgcttttcagcagtccaagctgaagcaacctgcaaatagcaatgcggtatctgccgactctgggatgtcgaaccctggagtgaaagcctcctggccccgagggctcaattgctggaggtagtagagacagtgcactcacacgatacaaggagaagaaaatgagaagaaagttcgacaagaaaatcaggtacgcttctcgtaaggctagagcagatgtgcgaaagagggtaaagggtcggtttgttaaggctggtgaagcatatgactatgatcctctctgccaaacgaggagttactgaagcatatgatctttatccagttttaaattagcaaactgcaaccaaggctcgttgcagctagaacaaaagcactggcaatccaagctattgggccaaactgtgccttcgaaaagaaaaaaaaaggagaaagctgtcggcatgataaaatatagagaaatatttggatgttgcagaagtttttgagtgaggatcctcctttttcctcctgtacagtggttggaagcggtttgagtctctccatcttttgtgaattagcctgaatccagctaaacagacttgttgcattttgatctccattctgcatttctgctgactgccatcagtctacgtacacgggctggcggctgcggtgtttttggaggtgttcgtccagattagacaagatggctagatgtgatctgtgaaatatccttctattataataatgtaaaatttgctgggacctggatgtttctgctattatcaatgtgcaaataccaggtcgtagccaaactggtcgtcagtttgttctttttaagttggtgatggaacccatccaactggacagtggacaccaactttctgtgctcattctgtccaaaccaacctccaaactgactcgatgttagtactatttgtattatgtgactcctgagcaagtgagcttgtgctcaaacctcaaatacgtcctcttgtaccaaaccacgatattggagggtaaatttttgacctgttcctttgttgttgaaacttctggttattttggaaaaaacaaatgtggaacactgctttgtggcttttctgttctgcactgttgtactcagtcttgcaaattagaagacgatgtggcatttttagacatagttatgtatttagatatatactatgtctaaatacctggtgaaagaaatgtatctagaaaaatcaaaacatgttataatttagaatataatagagaatagagtgagtatttgac

SEQ ID NO: 82830 - DNA, 2578 bp, Zea Mays
ttttcctctacgctaccagtctaccgctagcctgcctgccctcagacttcctctttcttccccttctcagcctttccctctcttctctgctctttgcatctctctcttgttcctcccttcctctctctaaaaaagggttctgatccctttctagaagctcctgggtttctgttgccgacccgagctccccaggggcgctcaggaggcgccgagccggcgaccgctccggcggatctgaggagccgccgcggtcgctttgcctccgttgcgatactgcacaggttccttgtaaactattgattgggaaacactctgaagaagagtttgttggctgcataacatctcctgaagctggtttgaagtttgctgataggaaagatcatgggcgctctctgtgatttctgtggggagcataggtctatggtttactgccgatcagatgcagcatccttgtgtttatcatgtgaccgtaatgtgcattcagctaatgctctttctcggcgtcatacaaggacacttttatgtgaccggtgtgcttcacagcctgctatggtccgctgtctagcagaaaatgcctcgctttgccaaaattgtgattggaatggccacattgcaggatcctcatctgccggacacaaaaggcagactataaattgctattcaggatgtccatcgtctgcagaactttctagaatatggtccttcgtttcagatattcctaatgtagcacctgagccaaactgtgagcaaggaataagcatgatgagcatcagcgacagtggtgtcagtaatcaagataatgctgcaggggacagtattttgttagatatagctagtgcaacacttgtaagtgatattggtacttgtgacaagcttttggtaggttcctcttcaggagctggagtgaacctacttccactggctactggtcaaacagaaacagctggatctgtggattccacaccagataaggattcctgtatgcaggttccctatacgccagataaagatatgttcagtaaggacagcatatatgaagatttttgtgtggatgacgctgaccttgctttcgaaaattatgaagaactctttggtacctctcatattcaaacagaacaactctttgatgatgctggaatagacatttactttgaaatgaaggaagcacctgctgggaattccactgagcagtccaagctgaagcaacctgcaaatagcaatgcggtatctgccgactctgggatgtcgaaccctggagtgaaaggtgattccagtgtttgtacccctttgaggcaggctaggtctagtctgtctctttcctttgctggtttgactggtgagagtagtgcgggagaccaccaagattgtgtggtatcatcattgcttcttatgggtgagcctccttggcagcctcctggccccgagggctcaattgctggaggtagtagagacagtgcactcacacgatacaaggagaagaaaatgagaagaaagttcgacaagaaaatcaggtacgcttctcgtaaggctagagcagatgtgcgaaagagggtaaagggtcggtttgttaaggctggtgaagcatatgactatgatcctctctgccaaacgaggagttactgaagcatatgatctttatccagttttaaattagcaaactgcaaccaaggctcgttgcagctagaacaaaagcactggcaatccaagctattgggccaaactgtgccttcgaaaagaaaaaaaaaggagaaagctgtcggcatgataaaatatagagaaatatttggatgttgcagaagtttttgagtgaggatcctcctttttcctcctgtacagtggttggaagcggtttgagtctctccatcttttgtgaattagcctgaatccagctaaacagacttgttgcattttgatctccattctgcatttctgctgactgccatcagtctacgtacacgggctggcggctgcggtgtttttggaggtgttcgtccagattagacaagatggctagatgtgatctgtgaaatatccttctattataataatgtaaaatttgctgggacctggatgtttctgctattatcaatgtgcaaataccaggtcgtagccaaactggtcgtcagtttgttctttttaagttggtgatggaacccatccaactggacagtggacaccaactttctgtgctcattctgtccaaaccaacctccaaactgactcgatgttagtactatttgtattatgtgactcctgagcaagtgagcttgtgctcaaacctcaaatacgtcctcttgtaccaaaccacgatattggagggtaaatttttgacctgttcctttgttgttgaaacttctggttattttggaaaaaacaaatgtggaacactgctttgtggcttttctgttctgcactgttgtactcagtcttgcaaattagaagacgatgtggcatttttagacatagttatgtatttagatatatactatgtctaaatacctggtgaaagaaatgtatctagaaaaatcaaaacatgttataatttagaatataatagagaatagagtgagtatttgac

SEQ ID NO: 82831 - DNA, 3356 bp, Zea Mays
ttttcctctacgctaccagtctaccgctagcctgcctgccctcagacttcctctttcttccccttctcagcctttccctctcttctctgctctttgcatctctctcttgttcctcccttcctctctctaaaaaagggttctgatccctttctagaagctcctgggtttctgttgccgacccgagctccccaggggcgctcaggaggcgccgagccggcgaccgctccggcggatctgaggagccgccgcggtcgctttgcctccggttccttgtaaactattgattgggaaacactctgaagaagagtttgttggctgcataacatctcctgaagctggtttgaagtttgctgataggaaagatcatgggcgctctctgtgatttctgtggggagcataggtctatggtttactgccgatcagatgcagcatccttgtgtttatcatgtgaccgtaatgtgcattcagctaatgctctttctcggcgtcatacaaggacacttttatgtgaccggtgtgcttcacagcctgctatggtccgctgtctagcagaaaatgcctcgctttgccaaaattgtgattggaatggccacattgcaggatcctcatctgccggacacaaaaggcagactataaattgctattcaggatgtccatcgtctgcagaactttctagaatatggtccttcgtttcagatattcctaatgtagcacctgagccaaactgtgagcaaggaataagcatgatgagcatcagcgacagtggtgtcagtaatcaagataatgctgcaggggacagtattttgttagatatagctagtgcaacacttgtaagtgatattggtacttgtgacaagcttttggtaggttcctcttcaggagctggagtgaacctacttccactggctactggtcaaacagaaacagctggatctgtggattccacaccagataaggttccctatacgccagataaagatatgttcagtaaggacagcatatatgaagatttttgtgtggatgacgctgaccttgctttcgaaaattatgaagaactctttggtacctctcatattcaaacagaacaactctttgatgatgctggaatagacatttactttgaaatgaaggaagcacctgctgggaattccactgaggtttgtagtttgctaatgaatatttttttcttaatccgttacaatcattcacatccatgtgcacatgcacttctcatagtgttggtgttctctttgctatgccaattaactgaaccaattctgtagtcctcccaatttgtgtaacttataagccgttcattttcctgttaactcatcaaaattgaactgtgtgataagtttttccaggtgcagtttaatttttagtttgggaagggcaggcctggtgcagtggtaagagttctcactaagtcaccagatcacgggttcgaagctgcctctccgcattttcttataggccctaggttttcttctttctttgatccatagcttattattgacaaactattcaaaatggttgacttttctgaagtgacaaaaggcaggaagaatcttgccttctttatgttagtcttgggttttgggatatagcttgtgccaaatttatgtgtctggttttgtgtttaagaagcaaccagtaaccacagataggactgtaaattgtaacctatcagcattaaatgtatgtcagctagggatgaaactggatctgatacagacggatattagtgatcctgcatccatcctattttccatattgtatctcattttttttctggaatctcagaaccggatagggatatattagagtgatatttatctatacatatcagaaatctgtttttgtatccagatttgattacgatcggatattaaatgttcagattcagataaggactatacatataggattttgaattttcaggatggacagataacgggaaatatccgttacgttttcatccctcatgtcaccagatctgtaaaccatttggtgttatcctgtagtcagcgtatctggtttggacaaattagacgttgcgtttttgtgttttattatatgattattataggattcttgtctcatgcttttcagcagtccaagctgaagcaacctgcaaatagcaatgcggtatctgccgactctgggatgtcgaaccctggagtgaaagcctcctggccccgagggctcaattgctggaggtagtagagacagtgcactcacacgatacaaggagaagaaaatgagaagaaagttcgacaagaaaatcaggtacgcttctcgtaaggctagagcagatgtgcgaaagagggtaaagggtcggtttgttaaggctggtgaagcatatgactatgatcctctctgccaaacgaggagttactgaagcatatgatctttatccagttttaaattagcaaactgcaaccaaggctcgttgcagctagaacaaaagcactggcaatccaagctattgggccaaactgtgccttcgaaaagaaaaaaaaaggagaaagctgtcggcatgataaaatatagagaaatatttggatgttgcagaagtttttgagtgaggatcctcctttttcctcctgtacagtggttggaagcggtttgagtctctccatcttttgtgaattagcctgaatccagctaaacagacttgttgcattttgatctccattctgcatttctgctgactgccatcagtctacgtacacgggctggcggctgcggtgtttttggaggtgttcgtccagattagacaagatggctagatgtgatctgtgaaatatccttctattataataatgtaaaatttgctgggacctggatgtttctgctattatcaatgtgcaaataccaggtcgtagccaaactggtcgtcagtttgttctttttaagttggtgatggaacccatccaactggacagtggacaccaactttctgtgctcattctgtccaaaccaacctccaaactgactcgatgttagtactatttgtattatgtgactcctgagcaagtgagcttgtgctcaaacctcaaatacgtcctcttgtaccaaaccacgatattggagggtaaatttttgacctgttcctttgttgttgaaacttctggttattttggaaaaaacaaatgtggaacactgctttgtggcttttctgttctgcactgttgtactcagtcttgcaaattagaagacgatgtggcatttttagacatagttatgtatttagatatatactatgtctaaatacctggtgaaagaaatgtatctagaaaaatcaaaacatgttataatttagaatataatagagaatagagtgagtatttgac

SEQ ID NO: 82832 - DNA, 2398 bp, Zea Mays
ttttcctctacgctaccagtctaccgctagcctgcctgccctcagacttcctctttcttccccttctcagcctttccctctcttctctgctctttgcatctctctcttgttcctcccttcctctctctaaaaaagggttctgatccctttctagaagctcctgggtttctgttgccgacccgagctccccaggggcgctcaggaggcgccgagccggcgaccgctccggcggatctgaggagccgccgcggtcgctttgcctccggttccttgtaaactattgattgggaaacactctgaagaagagtttgttggctgcataacatctcctgaagctggtttgaagtttgctgataggaaagatcatgggcgctctctgtgatttctgtggggagcataggtctatggtttactgccgatcagatgcagcatccttgtgtttatcatgtgaccgtaatgtgcattcagctaatgctctttctcggcgtcatacaaggacacttttatgtgaccggtgtgcttcacagcctgctatggtccgctgtctagcagaaaatgcctcgctttgccaaaattgtgattggaatggccacattgcaggatcctcatctgccggacacaaaaggcagactataaattgctattcaggatgtccatcgtctgcagaactttctagaatatggtccttcgtttcagatattcctaatgtagcacctgagccaaactgtgagcaaggaataagcatgatgagcatcagcgacagtggtgtcagtaatcaagataatgctgcaggggacagtattttgttagatatagctagtgcaacacttgtaagtgatattggtacttgtgacaagcttttggtaggttcctcttcaggagctggagtgaacctacttccactggctactggtcaaacagaaacagctggatctgtggattccacaccagataaggttccctatacgccagataaagatatgttcagtaaggacagcatatatgaagatttttgtgtggatgacgctgaccttgctttcgaaaattatgaagaactctttggtacctctcatattcaaacagaacaactctttgatgatgctggaatagacatttactttgaaatgaaggaagcacctgctgggaattccactgagtccaagctgaagcaacctgcaaatagcaatgcggtatctgccgactctgggatgtcgaaccctggagtgaaagcctcctggccccgagggctcaattgctggaggtagtagagacagtgcactcacacgatacaaggagaagaaaatgagaagaaagttcgacaagaaaatcaggtacgcttctcgtaaggctagagcagatgtgcgaaagagggtaaagggtcggtttgttaaggctggtgaagcatatgactatgatcctctctgccaaacgaggagttactgaagcatatgatctttatccagttttaaattagcaaactgcaaccaaggctcgttgcagctagaacaaaagcactggcaatccaagctattgggccaaactgtgccttcgaaaagaaaaaaaaaggagaaagctgtcggcatgataaaatatagagaaatatttggatgttgcagaagtttttgagtgaggatcctcctttttcctcctgtacagtggttggaagcggtttgagtctctccatcttttgtgaattagcctgaatccagctaaacagacttgttgcattttgatctccattctgcatttctgctgactgccatcagtctacgtacacgggctggcggctgcggtgtttttggaggtgttcgtccagattagacaagatggctagatgtgatctgtgaaatatccttctattataataatgtaaaatttgctgggacctggatgtttctgctattatcaatgtgcaaataccaggtcgtagccaaactggtcgtcagtttgttctttttaagttggtgatggaacccatccaactggacagtggacaccaactttctgtgctcattctgtccaaaccaacctccaaactgactcgatgttagtactatttgtattatgtgactcctgagcaagtgagcttgtgctcaaacctcaaatacgtcctcttgtaccaaaccacgatattggagggtaaatttttgacctgttcctttgttgttgaaacttctggttattttggaaaaaacaaatgtggaacactgctttgtggcttttctgttctgcactgttgtactcagtcttgcaaattagaagacgatgtggcatttttagacatagttatgtatttagatatatactatgtctaaatacctggtgaaagaaatgtatctagaaaaatcaaaacatgttataatttagaatataatagagaatagagtgagtatttgac

SEQ ID NO: 82833 - DNA, 3459 bp, Zea Mays
ttttcctctacgctaccagtctaccgctagcctgcctgccctcagacttcctctttcttccccttctcagcctttccctctcttctctgctctttgcatctctctcttgttcctcccttcctctctctaaaaaagggttctgatccctttctagaagctcctgggtttctgttgccgacccgagctccccaggggcgctcaggaggcgccgagccggcgaccgctccggcggatctgaggagccgccgcggtcgctttgcctccgttgcgatactgcacaggttccttgtaaactattgattgggaaacactctgaagaagagtttgttggctgcataacatctcctgaagctggtttgaagtttgctgataggaaagatcatgggcgctctctgtgatttctgtggggagcataggtctatggtttactgccgatcagatgcagcatccttgtgtttatcatgtgaccgtaatgtgcattcagctaatgctctttctcggcgtcatacaaggacacttttatgtgaccggtgtgcttcacagcctgctatggtccgctgtctagcagaaaatgcctcgctttgccaaaattgtgattggaatggccacattgcaggatcctcatctgccggacacaaaaggcagactataaattgctattcaggatgtccatcgtctgcagaactttctagaatatggtccttcgtttcagatattcctaatgtagcacctgagccaaactgtgagcaaggaataagcatgatgagcatcagcgacagtggtgtcagtaatcaagataatgctgcaggggacagtattttgttagatatagctagtgcaacacttgtaagtgatattggtacttgtgacaagcttttggtaggttcctcttcaggagctggagtgaacctacttccactggctactggtcaaacagaaacagctggatctgtggattccacaccagataaggattcctgtatgcaggttccctatacgccagataaagatatgttcagtaaggacagcatatatgaagatttttgtgtggatgacgctgaccttgctttcgaaaattatgaagaactctttggtacctctcatattcaaacagaacaactctttgatgatgctggaatagacatttactttgaaatgaaggaagcacctgctgggaattccactgaggtttgtagtttgctaatgaatatttttttcttaatccgttacaatcattcacatccatgtgcacatgcacttctcatagtgttggtgttctctttgctatgccaattaactgaaccaattctgtagtcctcccaatttgtgtaacttataagccgttcattttcctgttaactcatcaaaattgaactgtgtgataagtttttccaggtgcagtttaatttttagtttgggaagggcaggcctggtgcagtggtaagagttctcactaagtcaccagatcacgggttcgaagctgcctctccgcattttcttataggccctaggttttcttctttctttgatccatagcttattattgacaaactattcaaaatggttgacttttctgaagtgacaaaaggcaggaagaatcttgccttctttatgttagtcttgggttttgggatatagcttgtgccaaatttatgtgtctggttttgtgtttaagaagcaaccagtaaccacagataggactgtaaattgtaacctatcagcattaaatgtatgtcagctagggatgaaactggatctgatacagacggatattagtgatcctgcatccatcctattttccatattgtatctcattttttttctggaatctcagaaccggatagggatatattagagtgatatttatctatacatatcagaaatctgtttttgtatccagatttgattacgatcggatattaaatgttcagattcagataaggactatacatataggattttgaattttcaggatggacagataacgggaaatatccgttacgttttcatccctcatgtcaccagatctgtaaaccatttggtgttatcctgtagtcagcgtatctggtttggacaaattagacgttgcgtttttgtgttttattatatgattattataggattcttgtctcatgcttttcagcagtccaagctgaagcaacctgcaaatagcaatgcggtatctgccgactctgggatgtcgaaccctggagtgaaaggtgattccagtgtttgtacccctttgaggcaggctaggtctagtctgtctctttcctttgctggtttgactgcctcctggccccgagggctcaattgctggaggtagtagagacagtgcactcacacgatacaaggagaagaaaatgagaagaaagttcgacaagaaaatcaggtacgcttctcgtaaggctagagcagatgtgcgaaagagggtaaagggtcggtttgttaaggctggtgaagcatatgactatgatcctctctgccaaacgaggagttactgaagcatatgatctttatccagttttaaattagcaaactgcaaccaaggctcgttgcagctagaacaaaagcactggcaatccaagctattgggccaaactgtgccttcgaaaagaaaaaaaaaggagaaagctgtcggcatgataaaatatagagaaatatttggatgttgcagaagtttttgagtgaggatcctcctttttcctcctgtacagtggttggaagcggtttgagtctctccatcttttgtgaattagcctgaatccagctaaacagacttgttgcattttgatctccattctgcatttctgctgactgccatcagtctacgtacacgggctggcggctgcggtgtttttggaggtgttcgtccagattagacaagatggctagatgtgatctgtgaaatatccttctattataataatgtaaaatttgctgggacctggatgtttctgctattatcaatgtgcaaataccaggtcgtagccaaactggtcgtcagtttgttctttttaagttggtgatggaacccatccaactggacagtggacaccaactttctgtgctcattctgtccaaaccaacctccaaactgactcgatgttagtactatttgtattatgtgactcctgagcaagtgagcttgtgctcaaacctcaaatacgtcctcttgtaccaaaccacgatattggagggtaaatttttgacctgttcctttgttgttgaaacttctggttattttggaaaaaacaaatgtggaacactgctttgtggcttttctgttctgcactgttgtactcagtcttgcaaattagaagacgatgtggcatttttagacatagttatgtatttagatatatactatgtctaaatacctggtgaaagaaatgtatctagaaaaatcaaaacatgttataatttagaatataatagagaatagagtgagtatttgac

SEQ ID NO: 82834 - DNA, 1385 bp, Zea Mays
acccaatacaatttttatgactacttttatggagagagttcatcacactcacttactagaacctcacgtgttgctcagccgttgcactaatggtagggtctcagatacctcaaccaatattattaattatgatggtgccgtaagagaaaacagtcagctataaacattttaagcaaaacttgggccgtcaaaaaggcctagatatggttttcggatacttgaaagcccatcttactctccttccggtcgcgggtcgccgcagtaaacccctaggaagaaaccccaccgcttctggccgccgccggctcaccggtgacggcatccaaatccatggcctcccgccaggcgctccacatcttcacgccctcccggcgggcgatgcacatcctcacgtcgtcccgcggcatcgcctcgaccccgcacctctcgtccttcggctggtttgataagatcaagtccaccatcactggcaagaagcccgaggaggcctccgaggcatcctccttcaccctcatccagttcgcagacacgatggagaaagcgaggaagctggggacgttcaagaacttcgttgccgggcgggccagcgaggccaccgtcgtgaacgtcttcgagaagcactccgctgtgctgcgctacctcggtgccatcgaccccaccggcgagaacctccgaaacactgacaaaattaacgcgaccaagcactgcaactgcacaattgctgacgtggagcacattctggccaagtacacatgggctaaagaggctcagaagaagattgcaaagctcaaggaagaagggaagccattaccgaagtcatttaacgaggtccaaaatctaatgggttctacaccagtggatgtcggcagaagtaatctggcaaagagtggtcagataagtaggaatgctttctgcccatgtggttctaagaaacgatataaaaggtttgacatttcaagaactgtttccattactaaactgcacatgcctttctttgatgattgataacatttccaattgttgtgctgtggagcttcatgagatgaacaactctaccaggtgcagcgtttgtaagctcttttctttgccaaactctaccaagctctttcgcggacaacacctgaatttgaagcttgcaatttgtaaagcactatgagcgagccctatgtttcagaaggctttctcttaaactctgatttcttgattggagttgttgtttaacattgattcagttcaatcatgcatgaatctaggtaatatatatccacctagctcgttttctgcaacaagatttgttatagattcatttttactcagcattttatgttctactcggcagcttcattttttatggatgtgtttgaataaagccttctgttattcta

SEQ ID NO: 82835 - DNA, 677 bp, Zea Mays
ggcaaacgcagggagcacccactctatcgtcttgtctcctgtcatctcctcccccgctcgccgttggtctattcacgctctgcatcgtcccgctctcacatgtttgtgcggtggtctatggacgaggatggcgagagaggatggcccacaattcgtgcgctggagggggagaagttcatgtcgcaggagcacggtagccgcatcgtgcactaaggctagtcttgcattccagcatgatataggttgttgtagagagctttgtctttggaatggaagctcttccctataatgaaggcatacgggatgaagatgtgatctgaagatggtaaaaacgaacgttgaagctattgccaaagagcattagcttcgtcttataatggtgatgaagactgaagatgatgctggctgaaagggaaaaaagactgtttagtccataatgtttcatgtcatggtaatgagtaaatgtcagggacataaatgtaattttatctgggccgtgtcccatgcctataaatagatgaacagtagtaccatactgttcacgctggattgtaatcattctcatgtcagcaccttcaagcaagccgaaggtatcaatgtaatacatattctgttaatactcatgtatgctttacggaatgtgaacatgaatgaatcgataagttacacttgccatt

SEQ ID NO: 82836 - DNA, 1052 bp, Zea Mays
aattcacctaagaccccatcgccccccaaatcatcccaagcgtccctaaccgctcgcaaccctaatctaatccaccgtcatcttctcccggatcaccatctaccctcatcccctcgcgcctaagccaaaccctagcagatcgccatcggtcgttatccctcccggatttcccttcgcctcccacatggtctgctatagaggaagatcattatcatccactgaccatcatggccgatggtgaggcggagacagcgaccgatgtcaaatcatcgcggtggggccgatccagcccggcgctcagcgtctcgttgccgaagcccacctgatcagctatcggcggactaacccgtggctgcggtgacgaggagtcaccgagcgtgagtacggcaaacgcagggagcacccactctatcgtcttgtctcctgtcatctcctcccccgctcgccgttggtctattcacgctctgcatcgtcccgctctcacatgtttgtgcggtggtctatggacgaggatggcgagagaggatggcccacaattcgtgcgctggagggggagaagttcatgtcgcaggagcacggtagccgcatcgtgcactaaggctagtcttgcattccaggttgttgtagagagctttgtctttggaatggaagctcttccctataatgaaggcatacgggatgaagatgtgatctgaagatggtaaaaacgaacgttgaagctattgccaaagagcattagcttcgtcttataatggtgatgaagactgaagatgatgctggctgaaagggaaaaaagactgtttagtccataatgtttcatgtcatggtaatgagtaaatgtcagggacataaatgtaattttatctgggccgtgtcccatgcctataaatagatgaacagtagtaccatactgttcacgctggattgtaatcattctcatgtcagcaccttcaagcaagccgaaggtatcaatgtaatacatattctgttaatactcatgtatgctttacggaatgtgaacatgaatgaatcgataagttacacttgccatt

SEQ ID NO: 82837 - DNA, 1138 bp, Zea Mays
caacatgtgcaaggtccccacacaggacttcttcaccaacgagttcgggctccccctcaccatgaacccaaagcggttgtgtcgtccgagcgttgatctgaaccagcacagtttatcagggacgtagcagtgagttggttatagagaactcatatttgatggctaaacataaaagcgacttagaaggattcaagttagatgtatacgaaagtggtgaggactcgcaagaagttcaatccactgccagaaggttagatttgagtctcaattattttcaagggaagggatcatgctgataattcactccatgggtacaaggttttcaaaaatccgagcattagtgatgtcctgtgcacaacaacagcagaggctcttgcaatggggaaattcgtgatttgcgcagaacatccatcaaatgagtttttcatgtcatttccgaactgtttgacatacaagacttcataggagtttgttgcgagagtgaaagaggcaatggatagagaaccctaaccgctaacccctgagcaaagatacaacctttcgtgggaggcagtgactgagagattcatggagtactcagaccttgacaaggatctgaacaatgaggctgctcagcctgaacaaggtaggaaaagaaagaataaaagaacctcacatcctaatttgtccgacatcatggatggcggtctagcgttggcccatcgatgcttaactggcaatgaggttctcaggctggcaaccgaagccattcctggtacccgggactactataagcagcattgtgtggatattagtctcttgcctccttaagtagcaccctgtatatggctggtgatatggctggtgatgactgatgagcacccaaagctaatcgtaggtatatgtgtacataatacaccatgtcgctcttatgtcgactaatgtttggagtattgtaattgtagcacgcatgacaaactttggccattgttttgtactctgtaataaggttctttctccttaaatttggtgttttattgcagaaatttgtagtacatggatatcaaaagttcataactccagcagactgtcagcacaatatttatctgcttttgccactgaattagagaaacatagtcttaaaaagttaagagacgaa

SEQ ID NO: 82838 - DNA, 1215 bp, Zea Mays
ggcttgcggcccgtagggacaaggcccacgaggctacagtttaggcagagggttcttcggttcttccttcgccatcttctcagttccctccccacaccgttgcggcgcggcaccacctgaacccgaccaccgcccacaccatgttgtcccgattgccggcgacggtgagccttcttcgccggtcgctccgagaaccgcgcggcttcagctcctctgtgctggcttcatctaaggaaacggccgacggaaagctggtggcgtcggtgcttttcgagcgcctccccgttgtcatccccaagatccaccccgttgtctacgctttccaagaattctcatttcggtggaggcagcagtacagacggcaataccccgaggaggtcctcggcaaggccgacgcgagggtgattatcatattgattatgtgcctgctccaagaattaccgaggctgacaaaacaaatgaccggaagtctttacaacgagctcttgataataaactttatctcctgctgtatggcaatgcttatggggctcctgatggaaagcctgtatggcattttccagaaaaagtatacgaaaatgaagaaactatgcgactgtgtgcagaggctgcattaaaatctgttcttgggggacttgaccatacatactttgttggcaatgctccaatggctcatatggcagttgaacaaacagattcaagtgtttcatcattcaagcgtttctttttcaagtcacaagtggttggcacaacgaaataccatgttggaaaatgcaatgacttcgcgtgggtgaccaaggatgagctgctggagtattttcctgagaacaaggatttcttcaacaagatgatcatccacattagataagatagctctgtaatcaggctatgggctatctgaacaattagcattttgtttcttgactggcgtacaagtgcagtgccactgttctgtcgtcacgagcagcattgccgaggaaccaccagggcggcgggcaattgacacatgcccattttgcctcttttttcttgggctggttatgttgtgtttggcagtgacatttctgtagcatgttgtcctctcttacctgctgtatgttcacgtattatcagtttgttgtacaccatggggaagaataataattagcagggcgacatttgattccttgctttgttatccttctcacttgctgacttctgccaagatgtttgtgg

SEQ ID NO: 82839 - DNA, 1708 bp, Zea Mays
aaagaaccgtaagtggaaacacatttttttctttacaaaactgtaagtagaaatgacaagggactcggactttcacccttcgaagcatgcagatttcccgcaccggaacagttcgggcctccacctgacgctgcaccacccgcagagcccctgctcgccggcgccgctcccgtccgacctccccttctccacagtcctcacccacgacgatgcgcgcgtcgcccacctcgcgtcgcgactcgccgccagtgatccgccgtcccgccgtccgacatcactccgcaagcagaagaaggccgccggtggtgcttccggcggccaccacctcgacgacgactccctggcctccgtgcctctctcgcccggaacgtcagtgggcgtggggaactacgttacccagctcggcctcggcacgccgtccacctcctacgccatggtagtcgacacgggctcctcgctcacctggctgcagtgctcgccttgcgtcgtgtcgtgccaccgccaggtggggccgctcttcgaccccagggcctccagcacctacacctctgtgcgctgctcggcgtcgcagtgcgacgagctccaggccgccacgctcaacccgtccgcctgctccgcctcaaacgtctgcatctaccaggccagctacggcgacagctccttctccgtcggctacctcagcacggacaccgtctccttcggctccaccagctacccgagcttctactacggctgcggccaggacaatgaggggctcttcggccgctcggcggggctcatcggcctcgcgcgcaacaagctctcgctgctctaccagctcgcgcccagcctcggctactccttctcctattgcctcccgacggctgcgtcaacggggtatctctccatcgggccctacaacacggggcactactactcgtacacgcccatggcctcgagctctctcgacgcctcgctctacttcatcaccctgtccgggatgtcggtcggcgggagcccactcgcggtctcgccgtcggagtacagcagcctgcccacgatcatagactcgggcacggtgatcacgcgcctgccgacggctgtgcacacggcgctcagcaaggcggtggcccaggccatggcaggggcgcagcgcgcaccggccttctccatcctggacacgtgcttcgagggccaggcgtcgcagctgcgcgtgcccaccgtggtcatggcgttcgcgggcggcgcctccatgaagctgacgacgcggaacgtgctcatagacgtcgacgactccacgacgtgcctggcgtttgcgcccaccgacagcacggccatcatcggcaacacgcagcagcagacgttcagcgtcatctacgacgtcgcgcaatccaggatcggcttctcggcaggcggatgcagctgaatagctgatgggtgaaaactgattattgagctctatggagtgggcagctcaagcttggtaatagaaaatgcgtacaaaacacaagtaaattcgctgaagtttatgaaatggtaatgttacaagctattgtattgttgattttacactcctggcaaattgtacatccttttacaggtaaattggagtgtctagatttttacatgtgtacggtcaaaaacagaaatctattttggatgatttggtctattatttatattgttaccctgcctttatcattatgataataacaagtgatatattgcc

SEQ ID NO: 82840 - DNA, 1022 bp, Zea Mays
atagagtgccctcaaccatataacttttcccgaccaccgccgttcctctcttctccaaatccaaattggtaaatttcccaaatccggtgcccccacaccggcatcctcacctcgtcagcgccgccggccttccttccattctccatccccgctcagtcggataggcgccggttggggaaaattctgttcggactgttcatcttgtcgagatggaggatgagtacgacatgaacgagccagtcgatgacatggagggggaggatgagtaccaagagctcgtgattagggactctgatgcggaggatgaagacgatgcggaccaattgcataagctctccgacacttcagcagcagatgcaagaagtgggaaagatattcaaggaataccctgggagacgatagaagtcacaagagaaacgtacaggcaggcccgactagagcagtacaagaactacgagaacatacctaattctggagtagcagcaatgatggcatgcaaatcaaccgagaaaggaagaacatattatgaattcagacgaaatactagatctgtgaaatccactatctctcactttcagctgagaaatttagtatgggcaacatcgaagcatgatgtctacctgttattgcattactctgtacttcactggtcggccttaaatggtgtggatacagaaattatggatgtacatggacatgttgcaccgagtgagaagcacccaggaagcttattagaaggttttttgcatactcaaattagtaccatggcagtgaaggataatttgttagtagctggtggttttcaaggagagctaatatgcaaacacctagatcgagaaggaataagcttttgctgcaggacaacatatgatgataatgcaattaccaatgcattggagatattcaatacatctaggcaagtgaatagtctagccatttaaccttgtgaaacgtacatcaggtcaaggataaaagcccatttggcccttgttttggttccttttttattattttgctgcgcc

SEQ ID NO: 82841 - DNA, 1036 bp, Zea Mays
atagagtgccctcaaccatataacttttcccgaccaccgccgttcctctcttctccaaatccaaattggtaaatttcccaaatccggtgcccccacaccggcatcctcacctcgtcagcgccgccggccttccttccattctccatccccgctcagtcggataggcgccggttggggaaaattctgttcggactgttcatcttgtcgcgccgattttgaagagatggaggatgagtacgacatgaacgagccagtcgatgacatggagggggaggatgagtaccaagagctcgtgattagggactctgatgcggaggatgaagacgatgcggaccaattgcataagctctccgacacttcagcagcagatgcaagaagtgggaaagatattcaaggaataccctgggagacgatagaagtcacaagagaaacgtacaggcaggcccgactagagcagtacaagaactacgagaacatacctaattctggagtagcagcaatgatggcatgcaaatcaaccgagaaaggaagaacatattatgaattcagacgaaatactagatctgtgaaatccactatctctcactttcagctgagaaatttagtatgggcaacatcgaagcatgatgtctacctgttattgcattactctgtacttcactggtcggccttaaatggtgtggatacagaaattatggatgtacatggacatgttgcaccgagtgagaagcacccaggaagcttattagaaggttttttgcatactcaaattagtaccatggcagtgaaggataatttgttagtagctggtggttttcaaggagagctaatatgcaaacacctagatcgagaaggaataagcttttgctgcaggacaacatatgatgataatgcaattaccaatgcattggagatattcaatacatctaggcaagtgaatagtctagccatttaaccttgtgaaacgtacatcaggtcaaggataaaagcccatttggcccttgttttggttccttttttattattttgctgcgcc

SEQ ID NO: 82842 - DNA, 1070 bp, Zea Mays
ggaacatatggctaaaaaaatagagtgccctcaaccatataacttttcccgaccaccgccgttcctctcttctccaaatccaaattggtaaatttcccaaatccggtgcccccacaccggcatcctcacctcgtcagcgccgccggccttccttccattctccatccccgctcagtcggataggcgccggttggggaaaattctgttcggactgttcatcttgcatgtctcattatcacagcgccgattttgaagagatggaggatgagtacgacatgaacgagccagtcgatgacatggagggggaggatgagtaccaagagctcgtgattagggactctgatgcggaggatgaagacgatgcggaccaattgcataagctctccgacacttcagcagcagatgcaagaagtgggaaagatattcaaggaataccctgggagacgatagaagtcacaagagaaacgtacaggcaggcccgactagagcagtacaagaactacgagaacatacctaattctggagtagcagcaatgatggcatgcaaatcaaccgagaaaggaagaacatattatgaattcagacgaaatactagatctgtgaaatccactatctctcactttcagctgagaaatttagtatgggcaacatcgaagcatgatgtctacctgttattgcattactctgtacttcactggtcggccttaaatggtgtggatacagaaattatggatgtacatggacatgttgcaccgagtgagaagcacccaggaagcttattagaaggttttttgcatactcaaattagtaccatggcagtgaaggataatttgttagtagctggtggttttcaaggagagctaatatgcaaacacctagatcgagaaggaataagcttttgctgcaggacaacatatgatgataatgcaattaccaatgcattggagatattcaatacatctaggcaagtgaatagtctagccatttaaccttgtgaaacgtacatcaggtcaaggataaaagcccatttggcccttgttttggttccttttttattattttgctgcgcc

SEQ ID NO: 82843 - DNA, 2586 bp, Zea Mays
gtagaggacaactgcaagccccaggtagctcagaaaatactttgctcttgcatccttcttgagctaccacaagttacatccatgcctgaaaagaaacataagtggctcattctataccatcttctctacctttccatcctcaactttacatccttcatcattgctggtgatcaattcgtctactccagcttcagagaagcaaatctcagcctagacggcactgccacaatcaaaccagatgggctccttgagctaaccaacggtagctttaatctcaaaggccatgcattctacccaactcctctgcatttccgcaagtcatcaggtgaaaatgtgaaatccttctcagtcaccttcatcttcagcatcctctctgcctaccctgacaagagtgcagatggcatgaccttcttagtcacaacaaacaagaatttctctgatgcatttccagcccagtacctaggactcctcaatgatcagaacaacggcaatccaaacaaccatatctttgcggttgagcttgacaccatacaaaacagtgagttcgaggatatcaacgacaaccacattggcattaatattaatggtctccactcggtacaatcccagggtgctggtttctacgatgacaaaaacggtatgttcaagaacatgtcactcattagtcgtgaggtgatgcaggtgtgggtggaatatgatggatggaccacacagatcgatgtaaccttgggtcccattaaaatggctaaacctaataggccactagtctcagccatctacaatctatcaacagttctcacagatacatcatacattggattctcatcttcaactggtgtaattaactcaagatattgcttgcttggttggagcttcagtatgagcaacacaactccagagattgacatcaccaagctgccaaagttacctcgtgttggctccaggtcaccatcaaaggtcctgacaatcattcttccaacagccattgcatcattcatctttgttactggaatcaccatcattttactggcacggaggaaattggcaaacaatgagctacaggaagattgggaggttgagtttggaccacatcggttcacatacaaagatctgttccttgccactgaaggatttaagaataagaatgtgctgggtgcaggaggatttgggaaggtgtataaaggtatacttccaacatctaaattagaaattgcagtgaagaggttgtcacataactcaaagcaaggaacaaaagagttcatcactgagattgttagcattggccaccttcgacaccgaaatctcgtgcagttactaggctattgcaggcgaaaaggtgaacttctattggtatatgactacatgccaaatggtagtcttgacaagtttctatactgtgaaaatgacaaaccttcactggattgggctacaagatttcacatcataaaaggagctgcatgtggcctgctctaccttcatgagaagtgggacaaagttgtaatccaccgagacatcaaagcaagcaatgtgcttcttgatagcaaattcaatggacggctaggagactttggccttgcaaagtcatataaccatggcacagacccacagaccacacgtgtggttggcaccatgggttacctggccccagaattggtacgcatgggtaaagcatccccacttacagatgtgtttgcctttggcacattccttcttgaagtgacatgtgggcataggcctgtaaagcaaaatgagctaggtgagcatattatgttggttgattgggtacttgaccattggcagaaaggatcattggtggagacaatagacaagaggctagaaggtaactgcaacatagatgaggcgtgcctggttttaaaacttgggctcttgtgctcacaaccattcgctagtgcaaggcctagtatgcatcttgtaattcaataccttaatggtggcatgcagttgccagagttcacaccatcagatataagcatcaacatgctagcctttatggaaaataggggattcaatccttccttgatttcatacccacagctgacaatgagtgttggcacaatgtcaagcctctcaggtggaaggtaaaaatgatttgaggtcattaatcagagcaatagcaggtttcttttgtatattacacggggtgatatctattattgcatatttcagaattaaaatttttagggtgtatttgatttgagcaaccacctcatgctacatgacctgttgcatcatgaattcattacaggggtgtttggtttgaagaatgagttagtctatcatctattcatttctcacttttttgtttggtttatggtacagtgttttcaagtcgtctgactatttgtgattagtcagtctaatcggtactcggtaggtatcaaccgaccagccccaccgatgcgactaggccgaccaaaatattagtattagacatgggatgaccagtttagagtttaaacatgactgtagatgggcttttgaagcaggggaacttgtaggctgcaatttgctttgtgggcatctagggttgagaacgctcaggcaagaactccagtcccaatctgc

SEQ ID NO: 82844 - DNA, 336 bp, Zea Mays
acttggtcaggcgatgatgctgggaaggggaatctccgaacggtgctcaatgacgcttcttcaagtgcaccgatgaggtacatagtggggagaaagctatggaaggaggtagaagaagggggaaagatgagtatcgagggagttcagcagacgtccctatacggagatgactcacctcggctggatgagatcctttcgtggccattgaataaacaagagcagaccagtggacagtggttggctcactcgccggcgacgcagcacactggcgcggcggcgcctgctctcctccacaggtccacggccaccgacgcctgctctatttttctactctag

SEQ ID NO: 82845 - DNA, 1953 bp, Zea Mays
attcacaaaagcatcacaattataatatcattcacaactagatcatttacagatagctagctagatcattcacaaaagctccagagatgatcagtcacaaaagcaccacagcgacatcacttcagcttgaaacagttcaaaagcccacaactacatcactaatgttttatatcactctagctattgttcaaaatcccacaactacatcactctagctgctccagagctgatcagtcacaaaagcaccaaagctacactaacgcttcaaacagttcaaaagccttcagacaaccactccagcttcttgtatcctcctgttttaatgtacaagatttctttgtccagaacaccctagaaaaaagtacatcaaattagtatattgttgctacatttgcaaataaaaatacagttttgatgccttatctacttccactaggcggtgttgcagccttatgcaccaacttcagctggtgcaatcaaggttaatcatcattaagttgacggctcatataaatctaaacataaacaagataagatatagactattactttcttgtacggccatgcaactgatatcatgtaagcatcagccatatactgatcgcattttgattagggaaacatattggtcacctaaaatggggcaataaccctctttcttgctccacacctttgtgtcactatatgtgtggagaaaccaattcacacttatgtgcacgaagatttgtaagtcaaatcatgaatatagagtccaaatcagaccgcagctaccaagaatttttttaataaatacatgaccaagtaaagaagagtcaaaattgattggcccagcctttcagggtattacagtgtacaatgtttcagtattttagactgcactactgtaatatcacaggaactacaaatggagcattcaatactactagtacaatgaccgtgcgttgggacgacacacaaattattcaataaaatattagtggacaacaattacatgaaaacgaacaattggcttaacacaaaaaaatcttgaataaatccgtgtgatggtgattgctctacttacttggaagtacttagtaagggccttagactttcctgcccgcttgaagtgccttttgggtcaattacatagctcacctgcaaaataagatgtcaaatatactatcacatatccatcccaacataaccatcccaaaggataaaccaggatcaccaaacacacaatactaccacagatctcaatgcacatgtggaagaagacatgaccaaagcagtatcactcttccttcaatgccacgcaaaatgtcacttatttgttctgaactatctattccagtgatcttgcaggagctgcaaaaagatcgatcacaaacagttaaaacatttgtttgaaaggaaatcaggataagcttcctagtgttcaagccattgcagtaacaatgaatgcaatgagaaacctaagaaaaattgggtggacttgtttagaaccagagagtagtagcacaaacatcatctcagttataaaaacagttatccgtcacgaacaatgaaacatttgttggtaaggaaagcaggataagcttcctagtgctcaagccattgcagtaacaacgaatgcaatgagaaattctaagaaaaacggttattgttatttttatgccattttgtatttataattatttggatgaatcacatacatagaaacgtacctaataagcctagctttggctgcagcacagtcagcccctccatccttctaatcaacgtcattaacaaaaagcttctttgtaggcctccctgtaggtgatgtgcacgacctaaaaccaattggttatactcaaggtacacaaacaagcaagtgatatgaataagaaataatggaagaaatgaagtgtttgttgatttaaccttttctttgtagcactttgctaggtctaaagcattggataattt

SEQ ID NO: 82846 - DNA, 2201 bp, Zea Mays
atgcctccgcctcggcttcccctccgtgcaaccgcccgacccgccaggaccccgcctctccttcccctccgcgctcaagcaaccaatccgaggaaatgcacccacaaatttggaagccgcggcaatggcgcccgatttggctatggtgtgcacgatttggaaaccgcacaatctacgttgccaatttggaaagcacgatctcggtactgcaatcacaacaactatcccccaaatgtcgcgcccatcgacgaccaggacccccagatttggcaatgcaccattccccccaacaatcgtgctcgatctggcaattgtgtgcatcatcttcgtcgccgatttggaaagcgcacgatctacgacgctgatttggaaagtgccttgccaaacgattccagcacaaatcccccaaatcgtgcacccaccatcgttaaaaaggtcacaattgtcatcctgctccaaccttcctacaatgacggaaatcccgcgctcacactcctccagtgtaaggtgctcctgtaaggaaaaaagtgaataaaagtgacataagattattcttacccaaggtgcaggaaagactcgagcttcaacaaggttaggtcagattaatactggagcacaccctgccgatcagagcgtcttgccaaatacaaccagattttctgatgtgaaaacaaagaaccaacagaaacgaatctaatgggccataatgctggtcgcacaccattcatagacatctcaaacacaagcattacaggtgatcaaaatggatcgaactcgcttagaccaatagtcgatgctaatgaacataagaggcaaagggataaggaaagatatgccacaatgtccattgaacaaaagaatgagaaaaataggaagcgacgtgaagcacgtcaacgaaataaaggactacccataaagtccgagtcatctagagaagacattaatacgaatcagacacgtgaggcggtcaacgttgaaataagtcgagatgtgcatcttggttcagttaactgtagaaccattcatatcacaaattttgccttttgtaccaccgtttatttggctaatgctaggatgattatggtaggtcctattaaaaacactccatcggctggtaattctatcgaacgaaagaggcaaagggatagagaaaggcgtgcaacaatgtcggttgaacaaaggaatgagtacaataacaagcgttgtcaaatgcgtcaacgaaataagggacaaaatgtgatgccagctatttcaggagatggcgacaaaaaagtaaatgtggatccagatgatgatagcgactggctgcatcggaacgagacattccagtcaaatgactatgtcgcaacgacagaccttctgccaccaggcagtgtgcatgaatctgttggtacaattggggaatcgggtatcggcgtgagggagtataggcttgaacgccttaggttgtataatcagacaccaaagcggaaagaggcaaagatagagtacatgagaaaacatagagtgctacatgctgacactttgaatgttgtgtccatcgccatggaagacccaacatatacccctgaggttgtgcaccctgcaacggaaccttcaacagttaccgcctgtgactgggtcatccctgaattcgttaggacacctttcctaccagctcaaacacagaccgaggatgtcggttcatttgatatgtctactgaagcaataaaacgtaaacatcatgtgtcgcgtggggaaagacaagctatcttagcccgtcgaaaccagcaatttcaagcatccattgcaaggaacgtgactactttgaatggggatactattagtgacgccaacaacaatgcacaatgtagtgttccatgccaagctgctaccttgccaacaaatggaagtgaaggcataaccgaacaagcaagtggggtggagcatacacaagagaagccaagggtcatttccaatgatgatgatgatgaggttgtcatattcggagaagatgatgacaacgacgagagatacatattcgatggccaatgtacttatgtcaattttattatgattatgataccaaggcttatataaatacacatgtcttagtcgttgttttccaaaaaatatcagatgaggagactgacgaggacattaaaatcgatggtactcaagatgaatctactggcactgatgtgcctgacccttacgacaag

SEQ ID NO: 82847 - DNA, 871 bp, Zea Mays
ctttgcgcagatccgcagccgcctgacccaccaggaccccgcctctccttccccttggcgctcaaacaaccaagccgaggaaatgcacccacaaatgtggaagctccacgcagccacacgaactgccatgcaaccacctcacacgatctgccatgcccccgcctcgcacgatccaccatgcctccgcctcggcttcccctccgtgcaaccgcccgacccgccaggaccccgcctctccttcccctccgcgctcaagcaaccaatccgaggaaatgcacccacaaatttggaagccgcggcaatggcgcccgatttggctatggtgtgcacgatttggaaaccgcacaatctacgttgccaatttggaaagcacgatctcggtactgcaatcacaacaactatcccccaaatgtcgcgcccatcgacgaccaggacccccagatttggcaatgcaccattccccccaacaatcgtgctcgatctggcaattgtgtgcatcatcttcgtcgccgatttggaaagcgcacgatctacgacgctgatttggaaagtgccttgccaaacgattccagcacaaatcccccaaatcgtgcacccaccatcgttaaaaaggtcacaattgtcatcctgctccaaccttcctacaatgacggaaatcccgcgctcacactcctccagtgtaaggtgctcctgtaaggaaaaaagtgaataaaagtgacataagattattcttacccaaggtgcaggaaagactcgagcttcaacaagggtcagattaatactggagcacaccctgccgatcagagcgtcttgccaaatacaaccagattttctgatgtgaaaacaaagaaccaacagaaacgaatctaat

SEQ ID NO: 82848 - DNA, 3250 bp, Zea Mays
gggttttaggcggttttgttgggggcattaggaggtgggtttgatacctgcctgggggatctgtttctgattcggttctggagtaaggatttgatccagtgaaggaaaggttgctctggccactgatggccggtgacattacttgcggatccttgctgcaaaaattgcagttgatatgggatgaagttggcgagagtgatgaggatcgtgacaaggtcctttatcagctggatcaggaatgccttgatgtttacaagaggaaagttgaccaagcaactaactctagggatctcctgatccaggctctggatgactcaaagatagaacttgctaggcttctttctggtcttggagaaaaagctattgcaagaacccctgagaagacaacaggaacaatcaagcagcagctagctgctatagcgccaacacttgagcagttgactaaacagaaaaatgaaagaagaagagagtttgttaatgtacaatcacaaattgatcaaatatgtggtgaaatcgctggcaccatagaggtgggtgaacaggtgacaacaccccaagtcaatgaggatgatttgacacttgagaggcttgaagattttcggtctcaactccaggagcttgagaaagagaaggctggagaaggttcttgagtatgtaattatggtacatgatctttgtactgtcttggggatggattttctcagcacagtgactggagttcaccccactttagatgactctgttggcgacaactgtaagagcattagtgatgatacattatcaaaacttgacaagacggtagctacacttaatgaagataagaagttgcgtctaagcaagcttcaagaactcgctggtcagctctatgatctttgggatctcatggatgcccccaaggaagaaaggcgcatgtttgatcatgtgacctgcaacagatcagcatctgtggatgaagtcacagcacctggatctcttgctctagatttaattgaacaagctgaggttgaggttcaaaggttagaccagctgaagtacagcaagatgaaagaaatagctttcaagaagcaaaatgagctggaagatatctacgctggtgctcatattgtaatagacacagctgctgctcatgagaaaatattggcactgattgaggcaggtaacatagaaccatcagaactaattgcagatatggatgcccagatagcaaaagcaaaggaagaagcattgagtagaaaagatatccttgataaagtagaaagatggatgtctgcgtgtgaagaagaaagctggcttgaagattataaccgggatgacaacaggtataactctagccgaggtgcccacctgaatctgaagcgtgcagaaaaagctcgtatccttgttaacaagattccagcacttgttgaaactctagtggcaaagaccagggcatgggaggagaaccgtggtctgtcttttatgtatgatggtgtacctcttctagctatgttggatgagtatgttatgctcaggcaggaaagggaagaagagaagaaaagaacgcgggaacaaaagcgctacgttgagcagcaattgaacactgatcatgaagggccattcggatcgcgagtgagtccaaaccggcctgccagttcgaagaaggccattggcccaaagttgaatggcagcgtctcaaacggcactcctccaaacagaaggctctcaatcagtggccaacagaacggtggtggccatggcgtcaggtctggagggaaggatagcaagaaagacacggcgaagacagcatctcctgggaacagtgcagctgcaactgcacctgtgggtttgacagcaacagccaaagaagacgccgcctcccaaatttctgtcaccgatctggttccgagcacaccatgatctttaacctagcatcatatattagatataagtggacctttttctgttgttctattgttttctggtaatatattgtaatggcttcgtagagtaattatgatccccttcagctgctttggcacatcctggtgtaattcttgtttagttcccctaggcggtgctgtttcgacttgtcagacggtgtagtatagtcttactgagatgtattgtcattaatcagtgtgctggacgtataagctgttaaaaccttttctgttcccgtccttgagttttgcatctatgtgagcgtagcgtacttccaatattctctggaaactggattggcacagcgtacttccagtattatctggacactggattgcgcgtttcatttctgtagattcagttcactgattgcttccacaaggctgctatctaaagtattaaaaccattgggattctcagcccctagaggcgacatttcaatctacacacatgtgaattgaggtcaatactagattatctaaacagacgggaagcggcaacgtcacttgaaaaacagaactgtcaatgcgactggattggcctcgtgcaggtgagatttctgccattatgaaacgtgacacatttggcttccacaaaacagaggcacagatttacagaactgtcaatgcgactggattggcctcgtgcaggtgagatttctgccattatgaaacgtgacacatttggcttccacgaaacagaggcacagacgagtgcttcgatgatttagagatccacacaaaacgcacgcgccggtatggacttgagctctttcttaggtgcgttcgacagtgattaattctccgtcgtgaggattagtcggggcggccaccgctctcgtcttcagcgccgtcactgctcaggtcgcccccgtgagtgactcttgtagccttctctcccttcttgacccagcgcgctgctcgaaaccacagagctcggctaggtgttgagcaggggcagaggcagctgggacaatgcgagaggacagcgcgaccaccatcatggcaatcagctgctgctccgcgtcgtcgtgctggttggccgcacgcttcagggcggccagatggctggccgccgtgtcatggttgttgtccgagatagcgaccgcggcttcagacaatagttgcctcgacgcggccccggggtcggcggcgagcaggacgcggatgaagacgcaacggaggagtttgaaggtgaccagagctagacccggggacaaccagaggctgctgagacgggatccctcccagcaaggcggcgatatcaactaccacagtggtgccctgcctcacggcgcgcaggtacatcgcctgctgcgccgccacgtgct

SEQ ID NO: 82849 - DNA, 3232 bp, Zea Mays
gggttttaggcggttttgttgggggcattaggaggtgggtttgatacctgcctgggggatctgtttctgattcggttctggagtaaggatttgatccagtgaaggaaaggttgctctggccactgatggccggtgacattacttgcggatccttgctgcaaaaattgcagttgatatgggatgaagttggcgagagtgatgaggatcgtgacaaggtcctttatcagctggatcaggaatgccttgatgtttacaagaggaaagttgaccaagcaactaactctagggatctcctgatccaggctctggatgactcaaagatagaacttgctaggcttctttctggtcttggagaaaaagctattgcaagaacccctgagaagacaacaggaacaatcaagcagcagctagctgctatagcgccaacacttgagcagttgactaaacagaaaaatgaaagaagaagagagtttgttaatgtacaatcacaaattgatcaaatatgtggtgaaatcgctggcaccatagaggtgggtgaacaggtgacaacaccccaagtcaatgaggatgatttgacacttgagaggcttgaagattttcggtctcaactccaggagcttgagaaagagaagagtaataggctggagaaggttcttgagtatgtaattatggtacatgatctttgtactgtcttggggatggattttctcagcacagtgactggagttcaccccactttagatgactctgttggcgacaactgtaagagcattagtgatgatacattatcaaaacttgacaagacggtagctacacttaatgaagataagaagttgcgtctaagcaagcttcaagaactcgctggtcagctctatgatctttgggatctcatggatgcccccaaggaagaaaggcgcatgtttgatcatgtgacctgcaacagatcagcatctgtggatgaagtcacagcacctggatctcttgctctagatttaattgaacaagctgaggttgaggttcaaaggttagaccagctgaagtacagcaagatgaaagaaatagctttcaagaagcaaaatgagctggaagatatctacgctggtgctcatattgtaatagacacagctgctgctcatgagaaaatattggcactgattgaggcaggtaacatagaaccatcagaactaattgcagatatggatgcccagatagcaaaagcaaaggaagaagcattgagtagaaaagatatccttgataaagtagaaagatggatgtctgcgtgtgaagaagaaagctggcttgaagattataaccgggatgacaacaggtataactctagccgaggtgcccacctgaatctgaagcgtgcagaaaaagctcgtatccttgttaacaagattccagaccagggcatgggaggagaaccgtggtctgtcttttatgtatgatggtgtacctcttctagctatgttggatgagtatgttatgctcaggcaggaaagggaagaagagaagaaaagaacgcgggaacaaaagcgctacgttgagcagcaattgaacactgatcatgaagggccattcggatcgcgagtgagtccaaaccggcctgccagttcgaagaaggccattggcccaaagttgaatggcagcgtctcaaacggcactcctccaaacagaaggctctcaatcagtggccaacagaacggtggtggccatggcgtcaggtctggagggaaggatagcaagaaagacacggcgaagacagcatctcctgggaacagtgcagctgcaactgcacctgtgggtttgacagcaacagccaaagaagacgccgcctcccaaatttctgtcaccgatctggttccgagcacaccatgatctttaacctagcatcatatattagatataagtggacctttttctgttgttctattgttttctggtaatatattgtaatggcttcgtagagtaattatgatccccttcagctgctttggcacatcctggtgtaattcttgtttagttcccctaggcggtgctgtttcgacttgtcagacggtgtagtatagtcttactgagatgtattgtcattaatcagtgtgctggacgtataagctgttaaaaccttttctgttcccgtccttgagttttgcatctatgtgagcgtagcgtacttccaatattctctggaaactggattggcacagcgtacttccagtattatctggacactggattgcgcgtttcatttctgtagattcagttcactgattgcttccacaaggctgctatctaaagtattaaaaccattgggattctcagcccctagaggcgacatttcaatctacacacatgtgaattgaggtcaatactagattatctaaacagacgggaagcggcaacgtcacttgaaaaacagaactgtcaatgcgactggattggcctcgtgcaggtgagatttctgccattatgaaacgtgacacatttggcttccacaaaacagaggcacagatttacagaactgtcaatgcgactggattggcctcgtgcaggtgagatttctgccattatgaaacgtgacacatttggcttccacgaaacagaggcacagacgagtgcttcgatgatttagagatccacacaaaacgcacgcgccggtatggacttgagctctttcttaggtgcgttcgacagtgattaattctccgtcgtgaggattagtcggggcggccaccgctctcgtcttcagcgccgtcactgctcaggtcgcccccgtgagtgactcttgtagccttctctcccttcttgacccagcgcgctgctcgaaaccacagagctcggctaggtgttgagcaggggcagaggcagctgggacaatgcgagaggacagcgcgaccaccatcatggcaatcagctgctgctccgcgtcgtcgtgctggttggccgcacgcttcagggcggccagatggctggccgccgtgtcatggttgttgtccgagatagcgaccgcggcttcagacaatagttgcctcgacgcggccccggggtcggcggcgagcaggacgcggatgaagacgcaacggaggagtttgaaggtgaccagagctagacccggggacaaccagaggctgctgagacgggatccctcccagcaaggcggcgatatcaactaccacagtggtgccctgcctcacggcgcgcaggtacatcgcctgctgcgccgccacgtgct

SEQ ID NO: 82850 - DNA, 3089 bp, Zea Mays
gggttttaggcggttttgttgggggcattaggaggtgggtttgatacctgcctgggggatctgtttctgattcggttctggagtaaggatttgatccagtgaaggaaaggttgctctggccactgatggccggtgacattacttgcggatccttgctgcaaaaattgcagttgatatgggatgaagttggcgagagtgatgaggatcgtgacaaggctctggatgactcaaagatagaacttgctaggcttctttctggtcttggagaaaaagctattgcaagaacccctgagaagacaacaggaacaatcaagcagcagctagctgctatagcgccaacacttgagcagttgactaaacagaaaaatgaaagaagaagagagtttgttaatgtacaatcacaaattgatcaaatatgtggtgaaatcgctggcaccatagaggtgggtgaacaggtgacaacaccccaagtcaatgaggatgatttgacacttgagaggcttgaagattttcggtctcaactccaggagcttgagaaagagaagagtaataggctggagaaggttcttgagtatgtaattatggtacatgatctttgtactgtcttggggatggattttctcagcacagtgactggagttcaccccactttagatgactctgttggcgacaactgtaagagcattagtgatgatacattatcaaaacttgacaagacggtagctacacttaatgaagataagaagttgcgtctaagcaagcttcaagaactcgctggtcagctctatgatctttgggatctcatggatgcccccaaggaagaaaggcgcatgtttgatcatgtgacctgcaacagatcagcatctgtggatgaagtcacagcacctggatctcttgctctagatttaattgaacaagctgaggttgaggttcaaaggttagaccagctgaagtacagcaagatgaaagaaatagctttcaagaagcaaaatgagctggaagatatctacgctggtgctcatattatatggatgcccagatagcaaaagcaaaggaagaagcattgagtagaaaagatatccttgataaagtagaaagatggatgtctgcgtgtgaagaagaaagctggcttgaagattataaccgggatgacaacaggtataactctagccgaggtgcccacctgaatctgaagcgtgcagaaaaagctcgtatccttgttaacaagattccagcacttgttgaaactctagtggcaaagaccagggcatgggaggagaaccgtggtctgtcttttatgtatgatggtgtacctcttctagctatgttggatgagtatgttatgctcaggcaggaaagggaagaagagaagaaaagaacgcgggaacaaaagcgctacgttgagcagcaattgaacactgatcatgaagggccattcggatcgcgagtgagtccaaaccggcctgccagttcgaagaaggccattggcccaaagttgaatggcagcgtctcaaacggcactcctccaaacagaaggctctcaatcagtggccaacagaacggtggtggccatggcgtcaggtctggagggaaggatagcaagaaagacacggcgaagacagcatctcctgggaacagtgcagctgcaactgcacctgtgggtttgacagcaacagccaaagaagacgccgcctcccaaatttctgtcaccgatctggttccgagcacaccatgatctttaacctagcatcatatattagatataagtggacctttttctgttgttctattgttttctggtaatatattgtaatggcttcgtagagtaattatgatccccttcagctgctttggcacatcctggtgtaattcttgtttagttcccctaggcggtgctgtttcgacttgtcagacggtgtagtatagtcttactgagatgtattgtcattaatcagtgtgctggacgtataagctgttaaaaccttttctgttcccgtccttgagttttgcatctatgtgagcgtagcgtacttccaatattctctggaaactggattggcacagcgtacttccagtattatctggacactggattgcgcgtttcatttctgtagattcagttcactgattgcttccacaaggctgctatctaaagtattaaaaccattgggattctcagcccctagaggcgacatttcaatctacacacatgtgaattgaggtcaatactagattatctaaacagacgggaagcggcaacgtcacttgaaaaacagaactgtcaatgcgactggattggcctcgtgcaggtgagatttctgccattatgaaacgtgacacatttggcttccacaaaacagaggcacagatttacagaactgtcaatgcgactggattggcctcgtgcaggtgagatttctgccattatgaaacgtgacacatttggcttccacgaaacagaggcacagacgagtgcttcgatgatttagagatccacacaaaacgcacgcgccggtatggacttgagctctttcttaggtgcgttcgacagtgattaattctccgtcgtgaggattagtcggggcggccaccgctctcgtcttcagcgccgtcactgctcaggtcgcccccgtgagtgactcttgtagccttctctcccttcttgacccagcgcgctgctcgaaaccacagagctcggctaggtgttgagcaggggcagaggcagctgggacaatgcgagaggacagcgcgaccaccatcatggcaatcagctgctgctccgcgtcgtcgtgctggttggccgcacgcttcagggcggccagatggctggccgccgtgtcatggttgttgtccgagatagcgaccgcggcttcagacaatagttgcctcgacgcggccccggggtcggcggcgagcaggacgcggatgaagacgcaacggaggagtttgaaggtgaccagagctagacccggggacaaccagaggctgctgagacgggatccctcccagcaaggcggcgatatcaactaccacagtggtgccctgcctcacggcgcgcaggtacatcgcctgctgcgccgccacgtgct

SEQ ID NO: 82851 - DNA, 3312 bp, Zea Mays
gacacccgtggtaaatccttgggccgacctaggccgtccgatcacccgctcgtcgcatccaccggccccgccgccgcgcgcaccagcctctcgatgcccccaattaattcgggtcccgtggtgtggcggcagcggcagcggcagcagtactgcctccactgcagtcccaggttagcgctctcagcggtggcggccggcgaccggcgacatcctccggtatcgactcccgtagagtggagcgttgaaccacgctgcggacctgcattcaccagtccgccgtttccttcgccttctccgcgtggtccgttgatatgggatgaagttggcgagagtgatgaggatcgtgacaaggtcctttatcagctggatcaggaatgccttgatgtttacaagaggaaagttgaccaagcaactaactctagggatctcctgatccaggctctggatgactcaaagatagaacttgctaggcttctttctggtcttggagaaaaagctattgcaagaacccctgagaagacaacaggaacaatcaagcagcagctagctgctatagcgccaacacttgagcagttgactaaacagaaaaatgaaagaagaagagagtttgttaatgtacaatcacaaattgatcaaatatgtggtgaaatcgctggcaccatagaggtgggtgaacaggtgacaacaccccaagtcaatgaggatgatttgacacttgagaggcttgaagattttcggtctcaactccaggagcttgagaaagagaagagtaataggctggagaaggttcttgagtatgtaattatggtacatgatctttgtactgtcttggggatggattttctcagcacagtgactggagttcaccccactttagatgactctgttggcgacaactgtaagagcattagtgatgatacattatcaaaacttgacaagacggtagctacacttaatgaagataagaagttgcgtctaagcaagcttcaagaactcgctggtcagctctatgatctttgggatctcatggatgcccccaaggaagaaaggcgcatgtttgatcatgtgacctgcaacagatcagcatctgtggatgaagtcacagcacctggatctcttgctctagatttaattgaacaagctgaggttgaggttcaaaggttagaccagctgaagtacagcaagatgaaagaaatagctttcaagaagcaaaatgagctggaagatatctacgctggtgctcatattatatggatgcccagatagcaaaagcaaaggaagaagcattgagtagaaaagatatccttgataaagtagaaagatggatgtctgcgtgtgaagaagaaagctggcttgaagattataaccgggatgacaacaggtataactctagccgaggtgcccacctgaatctgaagcgtgcagaaaaagctcgtatccttgttaacaagattccagcacttgttgaaactctagtggcaaagaccagggcatgggaggagaaccgtggtctgtcttttatgtatgatggtgtacctcttctagctatgttggatgagtatgttatgctcaggcaggaaagggaagaagagaagaaaagaacgcgggaacaaaagcgctacgttgagcagcaattgaacactgatcatgaagggccattcggatcgcgagtgagtccaaaccggcctgccagttcgaagaaggccattggcccaaagttgaatggcagcgtctcaaacggcactcctccaaacagaaggctctcaatcagtggccaacagaacggtggtggccatggcgtcaggtctggagggaaggatagcaagaaagacacggcgaagacagcatctcctgggaacagtgcagctgcaactgcacctgtgggtttgacagcaacagccaaagaagacgccgcctcccaaatttctgtcaccgatctggttccgagcacaccatgatctttaacctagcatcatatattagatataagtggacctttttctgttgttctattgttttctggtaatatattgtaatggcttcgtagagtaattatgatccccttcagctgctttggcacatcctggtgtaattcttgtttagttcccctaggcggtgctgtttcgacttgtcagacggtgtagtatagtcttactgagatgtattgtcattaatcagtgtgctggacgtataagctgttaaaaccttttctgttcccgtccttgagttttgcatctatgtgagcgtagcgtacttccaatattctctggaaactggattggcacagcgtacttccagtattatctggacactggattgcgcgtttcatttctgtagattcagttcactgattgcttccacaaggctgctatctaaagtattaaaaccattgggattctcagcccctagaggcgacatttcaatctacacacatgtgaattgaggtcaatactagattatctaaacagacgggaagcggcaacgtcacttgaaaaacagaactgtcaatgcgactggattggcctcgtgcaggtgagatttctgccattatgaaacgtgacacatttggcttccacaaaacagaggcacagatttacagaactgtcaatgcgactggattggcctcgtgcaggtgagatttctgccattatgaaacgtgacacatttggcttccacgaaacagaggcacagacgagtgcttcgatgatttagagatccacacaaaacgcacgcgccggtatggacttgagctctttcttaggtgcgttcgacagtgattaattctccgtcgtgaggattagtcggggcggccaccgctctcgtcttcagcgccgtcactgctcaggtcgcccccgtgagtgactcttgtagccttctctcccttcttgacccagcgcgctgctcgaaaccacagagctcggctaggtgttgagcaggggcagaggcagctgggacaatgcgagaggacagcgcgaccaccatcatggcaatcagctgctgctccgcgtcgtcgtgctggttggccgcacgcttcagggcggccagatggctggccgccgtgtcatggttgttgtccgagatagcgaccgcggcttcagacaatagttgcctcgacgcggccccggggtcggcggcgagcaggacgcggatgaagacgcaacggaggagtttgaaggtgaccagagctagacccggggacaaccagaggctgctgagacgggatccctcccagcaaggcggcgatatcaactaccacagtggtgccctgcctcacggcgcgcaggtacatcgcctgctgcgccgccacgtgct

SEQ ID NO: 82852 - DNA, 3373 bp, Zea Mays
gacacccgtggtaaatccttgggccgacctaggccgtccgatcacccgctcgtcgcatccaccggccccgccgccgcgcgcaccagcctctcgatgcccccaattaattcgggtcccgtggtgtggcggcagcggcagcggcagcagtactgcctccactgcagtcccaggttagcgctctcagcggtggcggccggcgaccggcgacatcctccggtatcgactcccgtagagtggagcgttgaaccacgctgcggacctgcattcaccagtccgccgtttccttcgccttctccgcgtggtccggttgctctggccactgatggccggtgacattacttgcggatccttgctgcaaaaattgcagttgatatgggatgaagttggcgagagtgatgaggatcgtgacaaggtcctttatcagctggatcaggaatgccttgatgtttacaagaggaaagttgaccaagcaactaactctagggatctcctgatccaggctctggatgactcaaagatagaacttgctaggcttctttctggtcttggagaaaaagctattgcaagaacccctgagaagacaacaggaacaatcaagcagcagctagctgctatagcgccaacacttgagcagttgactaaacagaaaaatgaaagaagaagagagtttgttaatgtacaatcacaaattgatcaaatatgtggtgaaatcgctggcaccatagaggtgggtgaacaggtgacaacaccccaagtcaatgaggatgatttgacacttgagaggcttgaagattttcggtctcaactccaggagcttgagaaagagaagagtaataggctggagaaggttcttgagtatgtaattatggtacatgatctttgtactgtcttggggatggattttctcagcacagtgactggagttcaccccactttagatgactctgttggcgacaactgtaagagcattagtgatgatacattatcaaaacttgacaagacggtagctacacttaatgaagataagaagttgcgtctaagcaagcttcaagaactcgctggtcagctctatgatctttgggatctcatggatgcccccaaggaagaaaggcgcatgtttgatcatgtgacctgcaacagatcagcatctgtggatgaagtcacagcacctggatctcttgctctagatttaattgaacaagctgaggttgaggttcaaaggttagaccagctgaagtacagcaagatgaaagaaatagctttcaagaagcaaaatgagctggaagatatctacgctggtgctcatattatatggatgcccagatagcaaaagcaaaggaagaagcattgagtagaaaagatatccttgataaagtagaaagatggatgtctgcgtgtgaagaagaaagctggcttgaagattataaccgggatgacaacaggtataactctagccgaggtgcccacctgaatctgaagcgtgcagaaaaagctcgtatccttgttaacaagattccagcacttgttgaaactctagtggcaaagaccagggcatgggaggagaaccgtggtctgtcttttatgtatgatggtgtacctcttctagctatgttggatgagtatgttatgctcaggcaggaaagggaagaagagaagaaaagaacgcgggaacaaaagcgctacgttgagcagcaattgaacactgatcatgaagggccattcggatcgcgagtgagtccaaaccggcctgccagttcgaagaaggccattggcccaaagttgaatggcagcgtctcaaacggcactcctccaaacagaaggctctcaatcagtggccaacagaacggtggtggccatggcgtcaggtctggagggaaggatagcaagaaagacacggcgaagacagcatctcctgggaacagtgcagctgcaactgcacctgtgggtttgacagcaacagccaaagaagacgccgcctcccaaatttctgtcaccgatctggttccgagcacaccatgatctttaacctagcatcatatattagatataagtggacctttttctgttgttctattgttttctggtaatatattgtaatggcttcgtagagtaattatgatccccttcagctgctttggcacatcctggtgtaattcttgtttagttcccctaggcggtgctgtttcgacttgtcagacggtgtagtatagtcttactgagatgtattgtcattaatcagtgtgctggacgtataagctgttaaaaccttttctgttcccgtccttgagttttgcatctatgtgagcgtagcgtacttccaatattctctggaaactggattggcacagcgtacttccagtattatctggacactggattgcgcgtttcatttctgtagattcagttcactgattgcttccacaaggctgctatctaaagtattaaaaccattgggattctcagcccctagaggcgacatttcaatctacacacatgtgaattgaggtcaatactagattatctaaacagacgggaagcggcaacgtcacttgaaaaacagaactgtcaatgcgactggattggcctcgtgcaggtgagatttctgccattatgaaacgtgacacatttggcttccacaaaacagaggcacagatttacagaactgtcaatgcgactggattggcctcgtgcaggtgagatttctgccattatgaaacgtgacacatttggcttccacgaaacagaggcacagacgagtgcttcgatgatttagagatccacacaaaacgcacgcgccggtatggacttgagctctttcttaggtgcgttcgacagtgattaattctccgtcgtgaggattagtcggggcggccaccgctctcgtcttcagcgccgtcactgctcaggtcgcccccgtgagtgactcttgtagccttctctcccttcttgacccagcgcgctgctcgaaaccacagagctcggctaggtgttgagcaggggcagaggcagctgggacaatgcgagaggacagcgcgaccaccatcatggcaatcagctgctgctccgcgtcgtcgtgctggttggccgcacgcttcagggcggccagatggctggccgccgtgtcatggttgttgtccgagatagcgaccgcggcttcagacaatagttgcctcgacgcggccccggggtcggcggcgagcaggacgcggatgaagacgcaacggaggagtttgaaggtgaccagagctagacccggggacaaccagaggctgctgagacgggatccctcccagcaaggcggcgatatcaactaccacagtggtgccctgcctcacggcgcgcaggtacatcgcctgctgcgccgccacgtgct

SEQ ID NO: 82853 - DNA, 1336 bp, Zea Mays
gggttttaggcggttttgttgggggcattaggaggtgggtttgatacctgcctgggggatctgtttctgattcggttctggagtaaggatttgatccagtgaaggaaaggttgctctggccactgatggccggtgacattacttgcggatccttgctgcaaaaattgcagttgatatgggatgaagttggcgagagtgatgaggatcgtgacaaggtcctttatcagctggatcaggaatgccttgatgtttacaagaggaaagttgaccaagcaactaactctagggatctcctgatccaggctctggatgactcaaagatagaacttgctaggcttctttctggtcttggagaaaaagctattgcaagaacccctgagaagacaacaggaacaatcaagcagcagctagctgctatagcgccaacacttgagcagttgactaaacagaaaaatgaaagaagaagagagtttgttaatgtacaatcacaaattgatcaaatatgtggtgaaatcgctggcaccatagaggtgggtgaacaggtgacaacaccccaagtcaatgaggatgatttgacacttgagaggcttgaagattttcggtctcaactccaggagcttgagaaagagaagagtaataggctggagaaggttcttgagtatgtaattatggtacatgatctttgtactgtcttggggatggattttctcagcacagtgactggagttcaccccactttagatgactctgttggcgacaactgtaagagcattagtgatgatacattatcaaaacttgacaagacggtagctacacttaatgaagataagaagttgcgtctaagcaagcttcaagaactcgctggtcagctctatgatctttgggatctcatggatgcccccaaggaagaaaggcgcatgtttgatcatgtgacctgcaacagatcagcatctgtggatgaagtcacagcacctggatctcttgctctagatttaattgaacaagctgaggttgaggttcaaaggttagaccagctgaagtacagcaagatgaaagaaatagctttcaagaagcaaaatgagctggaagatatctacgctggtgctcatattgtaatagacacagctgctgctcatgagaaaatattggcactgattgaggcaggtaacatagaaccatcagaactaattgcagatatggatgcccagatagcaaaagcaaaggaagaagcattgagtagaaaagatatccttgataaagtagaaagatggatgtctgcgtgtgaagaagaaagctggcttgaagattataaccggcttttaaccacaaaactaaa

SEQ ID NO: 82854 - DNA, 1079 bp, Zea Mays
caagctccatggctcgccccggtgctctccctagccgaggtcggccgaacgctcagtagcccctctgctccttccatgcgcgcagcttcctcaagtcgccgtgtgcccagctcgccgcgcccagccgagttcacccctgcacacaaccgtggctttcgctgcgtagcgttcctgctccccggcctgtgtcgtgctcggcagcaagtagttcatgtcgaagcagcaggcagctacgatcccttgcgtcgtgctcactagatcgagtctcgtgtcgtcgatctgcgcagttcctgttcggctatcgattccgcctacgtcgatctcctaattgccatggatagtgtatcgacgtcccattacaatagcctgtcgtaaaactctagtgcttgtcgttgatatctagtcgtctctaacctttgtcttgtcgtcgtcgttcggtcacccagtctcgatgttggtccctacgtgatgtctccgagttggaatcgcactgacaaaagaatccccaagagaagatgtccaaaagttggatggtggggtgcgtgaagttcggatagtatctgccaagcgctcgacaaattgcctaaatcggaaaatcattactgatctcgcggattcgagtcagctattgtaacggtgagccgatttactatttttgctattgattttatgattgtgaaataagacgcttagtttgcgtattaagtttaagttagaaataccagtaatgcgaggtgtgcttcgaggagtttagttgccgagtatattcgaactagttctattttacagagtgtagtatttcggtgacgcgtaggttaaatttagtattttatgcaattatcgatagatttgtcgatgctaattgtgttcagtgcgcgtaagatgaagtcgatgtcctgcgctagtagttagtagcatctatgtttgtaatcgataatgttggagtaggatatgatcaacgattttcttatctagtgattggtgtgatggtatattgtataaaatatgcttggtaaaaatgtatgtagtaatatgattctgttaataaatcgtaaaagaaagtagagcgtgaatatata

SEQ ID NO: 82855 - DNA, 815 bp, Zea Mays
ctgcgcgcatcctcatccggccgccgctcgtggaagaaaaatctccactgcctaactctctctctccctttgctatttcttcaccgcaggggccatcggccttatctcctggccacggcgctcatcttcccagcagtggagctcccatgcgcgctcctccttcttcatggtcgcgtgcccagtctcgatgttggtccctacgtgatgtctccgagttggaatcgcactgacaaaagaatccccaagagaagatgtccaaaagttggatggtggggtgcgtgaagttcggatagtatctgccaagcgctcgacaaattgcctaaatcggaaaatcattactgatctcgcggattcgagtcagctattgtaacggtgagccgatttactatttttgctattgattttatgattgtgaaataagacgcttagtttgcgtattaagtttaagttagaaataccagtaatgcgaggtgtgcttcgaggagtttagttgccgagtatattcgaactagttctattttacagagtgtagtatttcggtgacgcgtaggttaaatttagtattttatgcaattatcgatagatttgtcgatgctaattgtgttcagtgcgcgtaagatgaagtcgatgtcctgcgctagtagttagtagcatctatgtttgtaatcgataatgttggagtaggatatgatcaacgattttcttatctagtgattggtgtgatggtatattgtataaaatatgcttggtaaaaatgtatgtagtaatatgattctgttaataaatcgtaaaagaaagtagagcgtgaatatata

SEQ ID NO: 82856 - DNA, 2108 bp, Zea Mays
gaaaatatcgggtaaacctaccgcgcagcgtctactcaatcactacttcaccttccttctacgctcccacagtccaggcgtccaccccaaaacaatcatgactcgtctctgtccccttcacctcctcctcatcgctgccgcggcggcgtctgccagcggtgccgacgaggcgcacgtctccatcgcggtcgcggagaagggcctggccttcgccaaggacgtgcttatcagcgaggccgtgcggtcgctgacccctcttcgcctccccggggtggagaaggccgtccgcgtgcccttccttggcggcatccgcgttgccgcctccaacatcacgctattccacctagacgtcggggacaactccactatcttccccggagactcgggccttctcgtcgtcgcctccggcatcaccgccaacatcagtatgcattggagctactgctacgattcgtggttgtttcccatagagatcaccgacagcggaacggcctcaatcctggttcaaggaatggaagttgggataaccatggttataaagaacaagaatgggagtttggctctgtctgtttcacagtgtggttgttatgtgaaggacctagtgatatccctggatggtggagcatcttggttttatcaagggtttataaatgcttttgaagatcatattaaagctgcagttgagaaggcagtacctgaaaatatcattgaaggcgctgggaaactggactcctttctgcaaggtctccccaggaccatcagtttggacgacgtcgcggccttcaacttgactttcattaatgatccacactatggcaattcttcaattgagttcgatatcaatgggttgattacttcagcggttgctgagacagccaatctgcagaagcatccacaactttctttggcttgtggtggtgcatcaaaaatgcttttgctctcacttgatgaagatgtattcaattcagcactagaagttcattttaagagctggacaaccccataactgagcaagaagtttgcaatgctataatttgtttgccctcggataaatctcctggaccggatggatttactggcagattttataagacttgctgttctgtttataaagatgatcttatggctgcggtgttggcatttggaacagaagatttgataatttctataaactcaactctgcattcatcactttaatcctaaagaaagatggaggcatggagctgatcaggctggttcaatgcattgggttgttgacaaagtccctgatcaatctctactgaacacagctaattggaaatttatcattcctcgtttatactggaattacccaaatgacgatatactgctaaatatctcaatggcctcatccccggtgataagggttacatcagaaaaaattgaagctaccattaatggagacatgataattgatgttgtagataacaaggagatagttccagttgcatgcatctcagtgattgtcagtgcttcaggtgttgtggatgcatcaggcaataaagtatatggtagagttggattagataatttctcccttgcgttgaagtggagtaaaattggcaacttccatatgtctttgattcagggagtgattcgggttctcctgaacacagtatgcatgccgtatttgaactcacggcttgggaatggattgatcttgcccgtggtccatggtttcacacttcaagacgtctacgttttaacctctgctgagcagctgacgctttgttcggatgtcaccttcaacgcaagcagcatggcgagtttattatgatacagggaaaaattcccagaagaagatgataaaattcaagaagtcgtttctgaagaggagtctgcttcagtgcctgctcatcaagtgatgggagccatctaactggggtttaatagagggatttagacctccgtctctgcaacaaaggcaagccccggtgcatttaccccttccttgtatttttaaaaagacttttatacatttaagtctagtgaaatgagcattaagtttataggagttgcttggaaattattggatgcattgcctaccttgatatccatacctttatagatacttctggtgaagtatcaaa

SEQ ID NO: 82857 - DNA, 1730 bp, Zea Mays
gaaaatatcgggtaaacctaccgcgcagcgtctactcaatcactacttcaccttccttctacgctcccacagtccaggcgtccaccccaaaacaatcatgactcgtctctgtccccttcacctcctcctcatcgctgccgcggcggcgtctgccagcggtgccgacgaggcgcacgtctccatcgcggtcgcggagaagggcctggccttcgccaaggacgtgcttatcagcgaggccgtgcggtcgctgacccctcttcgcctccccggggtggagaaggccgtccgcgtgcccttccttggcggcatccgcgttgccgcctccaacatcacgctattccacctagacgtcggggacaactccactatcttccccggagactcgggccttctcgtcgtcgcctccggcatcaccgccaacatcagtatgcattggagctactgctacgattcgtggttgtttcccatagagatcaccgacagcggaacggcctcaatcctggaatggaagttgggataaccatggttataaagaacaagaatgggagtttggctctgtctgtttcacagtgtggttgttatgtgaaggacctagtgatatccctggatggtggagcatcttggttttatcaagggtttataaatgcttttgaagatcatattaaagctgcagttgagaaggcagtacctgaaaatatcattgaaggcgctgggaaactggactcctttctgcaaggtctccccaggaccatcagtttggacgacgtcgcggccttcaacttgactttcattaatgatccacactatggcaattcttcaattgagttcgatatcaatgggttgattacttcagcggttgctgagacagccaatctgcagaagcatccacaactttctttggcttgtggtggtgcatcaaaaatgcttttgctctcacttgatgaagatgtattcaattcagcactagaagttcattttaaggctggttcaatgcattgggttgttgacaaagtccctgatcaatctctactgaacacagctaattggaaatttatcattcctcgtttatactggaattacccaaatgacgatatactgctaaatatctcaatggcctcatccccggtgataagggttacatcagaaaaaattgaagctaccattaatggagacatgataattgatgttgtagataacaaggagatagttccagttgcatgcatctcagtgattgtcagtgcttcaggtgttgtggatgcatcaggcaataaagtatatggtagagttggattagataatttctcccttgcgttgaagtggagtaaaattggcaacttccatatgtctttgattcagggagtgattcgggttctcctgaacacagtatgcatgccgtatttgaactcacggcttgggaatggattgatcttgcccgtggtccatggtttcacacttcaagacgtctacgttttaacctctgctgagcagctgacgctttgttcggatgtcaccttcaacgcaagcagcatggcgagtttattatgatacagggaagtgcgtgtctggcgtatttcatttagcgttgaagtacaacactcgcacatatgtgtacattatattgtacatactacacaacatctcgttataaatattgtttacattcaattctaccaatccatgaattcaaacatctgtgtacaatatcttaggtaatcaaagttatccacagc

SEQ ID NO: 82858 - DNA, 779 bp, Zea Mays
gccatgtctatgtgggtactctagagtcttctttaaccggctcccactgaactccgtcgtgcctgctatgccttacttgaaatattgggtctgaaactattaccgcctcacttccattacttcagtttagatcacttgaactgaatagcttatgttgccatgacccttccaactctccactaaccatcacagagatgcccaagttttctcttgtcagttgcactgaaggtggtgaccacgccgtttttctttccacccattcaccgcagtcagccatttcaaagaacacctagaagaagtggtgtttgaagaagaagcctgccccaagtattgttgatccagtggtggagtttcatctaactacttaccagagtagaataattttgggatcttctcctgcaataaggcaagccccggtgcatttgccaccttccttgtatttataaaattttatcacttatatgatgcattaggtgataggagttgattgattaaaccttgatgcattaccattccttgaaagaattgattaccacaccttgtcacctattttataaaagctagagatgcttagtcatgctgatagactaagaaaaatatttttgatctatgactcatgttttcacaaaaagaaaatgggcttgggataatgaaggaatcaagacgttgataaattcattatccaggcatggcccctctaccaggcgccaaaattttgaaatagtttaaaatgggaccagacgttgagcaggaaaggtcgcccgtctgtgtcgattaag

SEQ ID NO: 82859 - DNA, 1199 bp, Zea Mays
aaatgtcacgcccgtgaccccctctctggccaccacccgagcaccatacagcgagaaatcgtgtgcactggcacctcatcggagctctacaggaaaagtccccaggcgtcatcggtgatcgatcagaattcaatctatgggctttgtcaggcgctgaggaaggtgtgatagtcattcgtcctgtgttcaaggccgtaggggagccacaattcttcattggagttcgcgattggtacgagagccgctgcgctagggctttgcccacatcgtgcctctctgcccacggagggtggtcgaggatgatcgctagatcctgtgcaagctcttcatgcagtcgtcgagaagagagggtcaccttctccagccaaattgttcaccggtgttgaagattcgccttggcgtcacggtgtcacgtgggtggaactctggtcgcctcaatctgaggtcaagaacaggtaccgttagaggaagattgccatgaagatgagttcggagaggtctatgctatcgtctcccagtcaactatggttgtggaggatcgttttcgtcacatgatgtattttatttagctatttttaaagaaattatatcatgtaataaatatgtgacattttttgtgtacactgggtcatcatatgtgtgaaacttgatcctgacatacatttgagatacatctggatttgtccttaaatctaggtgtgacataatttcatcaaaagcttattgaaataattcaatgacgatgttctcaatttgaacatgattgctaaggtcctttctcctcccattttctcaaaaggtgtatgattaacatacaacagatcataagccagtcacaagcataagacctatatgcccttactacaggtcacataagaccatctccatctccattaccatgaacatgcttcttgaaattatgcattagatgccaaaaacattctctttgatcaacatgggggaacacatatttcacatctttttattaatcttaagcaaccatctgtgcatatagcaagttgtgaaggacttcctatagccttttgcaactgagtcataaatcaagtccagttgtcctcattttcacaatatatcaatctgaaagcaactagatatatccaataatgaccatcaacacctatagctgcaggtaacttcccattccacctaccattcaaggcagttgcatctatactaat

SEQ ID NO: 82860 - DNA, 407 bp, Zea Mays
cttctccctcgcaacagaacgcgccgaagagctcggcgccacggggaaagcggactctgttgcgtagcaccccgtaccgaccttccaaagtcatatagctgactctcgggtgttctcgctcctcccttcacccccacaaaccatcgccggacgaatagagttgagaggagagagccacagatttccgtcgtgcggggaagctcgagcctggcgcaacccagccctcagcgattatccagagaggttcgctcggtcatggggagggtggtcggcaccttgcctagggtgaatcgagatccagtgccccggaactctcgccggagttcgtgtgccacgaatgtccgccccaccacgtggtcgaccctgtccgcgacttaatcggccgacgagcaagtaattgaggagcc

SEQ ID NO: 82861 - DNA, 360 bp, Zea Mays
ccccgctcgggccgacgtgtgctcgggctacaaattcggctgctatgcctcctttgcggatcacatagtcggcagggtaggtgacaccatagtcgtgcgtgtgatggtggtgccttcccctgccgttgctgcgcaaagccaccaccgccagggtagctcggccacgtcgccgatcgggtgccggattcgggctgtgggtgcgtgcgcgacccccccttgcgacgatcctcggtaacaatcatgcgcagggtgcggcaaattgagggcaatttcacggcggacatatcaagccaccgcgagccacctagcgccgtagtctatacatcgtcgaccccattgtcgtgaggtcacgaggatctg

SEQ ID NO: 82862 - DNA, 439 bp, Zea Mays
cgttaaacgagcgcttccaccctgtcgccagttcgccgtgaatctagcgccactgcaaccgaatcagttgtgggatccccgctcgggccgacgtgtgctcgggctacaaattcggctgctatgcctcctttgcggatcacatagtcggcagggtaggtgacaccatagtcgtgcgtgtgatggtggtgccttcccctgccgttgctgcgcaaagccaccaccgccagggtagctcggccacgtcgccgatcgggtgccggattcgggctgtgggtgcgtgcgcgacccccccttgcgacgatcctcggtaacaatcatgcgcagggtgcggcaaattgagggcaatttcacggcggacatatcaagccaccgcgagccacctagcgccgtagtctatacatcgtcgaccccattgtcgcagtgaggtcacgaggatctg

SEQ ID NO: 82863 - DNA, 674 bp, Zea Mays
cagatgctgccacgccggcctgtgtgttgtgccgacacggacccgaaaacttactcaaattcatcttccaatggtccacgtccgacctccagtcccaccgcgcccatgcctcctcggctcctcccaaactcgccgccagccccacacatcccagtcgtcgcccgtgccggctagctccgctccatcggcccgccttacctctggcctcgtcgccacggcgacagcggcgatgctgatgcaaggcgtcgtggcagtgatggactgtacctcgacgggcgtagcgtcgccgtcctcgtccacgcggtgccggctgggcccggcgggcgggcacgcggggaagcggcgccggccgcggccgtccaagcgcgcgcccaccacgtacatcagcaccgacgccgccaccttccgcgccatggtgcagcgcgtcaccggcgccgacgaggccaacctgcagccgccgcagcaggacggactcggcctcagcctcctcctgccgcacctcggcgtcgagcggttcctacaggcggcgggacacgcggcaccgcacatcgctgctacaccgtacacgtctgccccgctcgccgcggcggcagagcagtagccgttgtacccgaccgctggacttgtggaacgtgatgtacgggaagaagaccgaggtggtctcagccctgact

SEQ ID NO: 82864 - DNA, 2726 bp, Zea Mays
ccacggaaaagcaactccagcaagcaagcaagctccctctctctctctcatcgcgtggtgtgtacagtacagtagtgccctgtgctcctgctgtcccgcagccgcagtgctggagctcaagcaccaaggcatccagccggcgcccacaggacactgctagccccattcaagaatcttccagctttcccaaacagaaccaaccttcggccatggcttcttcttgatctgtggtgcgcgtgggtctccgtctcccctaccggtgtcgcaatctgcagtattttttccccttcggtgctagggaaaagagagagaaaatctcacatcttttgactgcagacatactagtttgatgcaagctttgtagattgtcttggctgcactgtcctagagcaagtttctgtcacaagtgagatatttctgcgggttccaaaaaggaagcaacgacgaattgaaccatctgcagcttcttccgttgcattgcctcgtactgcatacatctgcagcttcttccgttgaattgagccaacaatgggtagggggagaggcagagggaggaaacagctcaccaacggcaggactcacgcggacaagaggagcagcggcgaggaggtcgccgcgcctgcaaggaagaggagggggcggccccagaagcgtgtagccgctgagaagaccattgaggcagagatgaaaaaactggtggaggaggccgatgatggcgacgaggactacgtggtgggagcaggggatggtggtgccaagccgaagggctccagaacagagcatgcttccgcaggagccggtggcactggcaacaagaggaacagggtgcacaatgaagaagagggctctagtctccttgacatggacgagaacagctccagcactcggtccagcaatgacgagtccaccagatccaatggcttccgccagtctggaagccgccggaagagcaccccacggcgagcggcggaggcagggctatagtcagaagttggagttggaatgcagcagattctttgaaaatgtaagaacaaaccacgaagggtgtgactggtttgctgaatatctcttggatgggagatgacggtcggcgtttggttcgcagacgaggcatgtttaaatttataagcaagaacatgaagtcgggtggtttttctggaacaaaacggtaccttggtgatctcgggaaaactgttaaaactgcaagttcgaacgctctctttgctgctgtcacagaaatttcagatagtgttgttagaggagcggaaacaaatggtttgaatggcatgatgctcgaggaggatgtggcagttccagtctcatctgctaatgaagctccaaaggatactacaaagatggacacagatgatgcaccaagtgatcctgtctctggaactgatgtgaatgtgcatgagcctgatactactgaggctgctcctgcagctgaaaatggagcagaaaatcccgaggaaaaatctgttccaatggaaactgatgcaaaggttgagccatcagaaaggaaagttaagagaacttctgttccggtccatgcattggtctatggtgccttggctgtagctgacctgcagaaggctgtagagaaagagtatgagatggctcttcaggacagagtaatggaagaaaccaaagagaagaaaaatgttgtggaagcttatgtctatgacatgcgtaacaagctctacgatagatacaacgattttgtgacacctgaggagaaggaagggttgattggaaagcttcgggaggttgaagattggctgtatgaagatgatcttaagaagattggtgacccaattgaggcacggtacaaggagtcaacagaaaggggttcctctgtagatcaactggtctactgcatcaacagtttcagagaggctgctttgtccagtgaccaaaagtttggccatatcgacatatctgagaaacagaagatatttgataagtttgatgtcatcataatatcgtattctctgaagttttatgggctaagtgagataaggaagaatgatgaaggcggagacgggcgcgctcaggtgaggctgaggccgagggcgcgacggctgtgcgttctcggcgaaactaaacctgcaactttcatgggaccattgatcagacgcgcatttctgcaggggatgcgcctcgctgccatcgaagccgctgggagcggcccagccgtgccggagcaggggggcgccgtcgtgtgtcactcgtcggcgcacctcagcgtgcgcaccatccagtggatctccgccggaaccatcgcagtgctattagttgctaaaggcactgccatacacaaatctttccttgtgccattttttgctcttcagacaccttgctgcataatctcatggatcaagggtgactatggtcagtggactgcttttctttctctgttggtgcgtctattcttcttcattccaggtgaactggagcttccactgtcaacaatgctgcttgtgagtgttgctccttaccaattcatggatctgaggggaactcaaggtggtgtcgtaatgtcactggtcatagctgcgtatctcgccttccagcacttcactagggtgggcggcccaggcaaagccttcgagcaaggatccattgttgcgaccttggccatcatttgcatcatgattgtgcccttgatgttgctattctgatttgcaatgagttggaatgaatttgcttctcattatgtgcgtata

SEQ ID NO: 82865 - DNA, 1300 bp, Zea Mays
aggcaactcactcgttttcaacggttggtaaacaaagcgcaaaactgaacaaccgagtggcatggcaccagccagctccacggaaaagcaactccagcaagcaagcaagctccctctctctctctcatcgcgtggtgtgtacagtacagtagtgccctgtgctcctgctgtcccgcagccgcagtgctggagctcaagcaccaaggcatccagccggcgcccacaggacactgctagccccattcaagaatcttccagctttcccaaacagaaccaaccttcggccatggcttcttcttgatctgtggtgcgcgtgggtctccgtctcccctaccggtgtcgcaatctgcagtattttttccccttcggtgctagggaaaagagagagaaaatctcacatcttttgactgcagacatactagtttgatgcaagattgtcttggctgcactgtcctagagcaagtttctgtcacaagtgagatatttctgcgggttccaaaaaggaagcaacgacgaattgaaccatctgcagcttcttccgttgcattgcctcgtactgcatacatctgcagcttcttccgttgaattgagccaacaatgggtagggggagaggcagagggaggaaacagctcaccaacggcaggactcacgcggacaagaggagcagcggcgaggaggtcgccgcgcctgcaaggaagaggagggggcggccccagaagcgtgtagccgctgagaagaccattgaggcagagatgaaaaaactggtggaggaggccgatgatggcgacgaggactacgtggtgggagcaggggatggtggtgccaagccgaagggctccagaacagagcatgcttccgcaggagccggtggcactggcaacaagaggaacagggtgcacaatgaagaagagggctctagtctccttgacatggacgagaacagctccagcactcggtccagcaatgacgagtccaccagatccaatggcttccgccagtctggaagccgccggaagagcaccccacggcgagcggcggaggcagggctatagtcagaagttggagttggaatgcagcagattctttggtatcgtttaggcagatgctcttcagttttgtcgcacattcatatttttagttgcaatgttcaattttttgtcgtcttggtgtttgctaggcctacatctacatgagtgtaaaaacatatatataatactgattgcaagccatctgaattttgtgcttatgttaatgaagaaaatgtaagaacaaaccacgaagggtgtgactggtttgctg

SEQ ID NO: 82866 - DNA, 3157 bp, Zea Mays
agcagcacggacggggcatgggattgacccacacacccgccctccgccccgcaagccaaatacgccgtggcacgcgtcgccatgccgccccagttccccaccgcccgcctcctcctccctagtcacaggctgctcccgctcctctcccctctcccctccgcgtccctgtcccctgctcctcgcaccctccgcctcccgccgccgcagcttcttcaccgagtcgcccgccgccgcccgctgctgcgcggcatggcctccgccgccgcccccgggtcacacgccgccgcggaagcgccccccgtcgacgtggggggagggggcgctggcgccccgcggcggctcgtcctggaggagctaccctgggaccattccttcgtccgcgagctgcctggcgacccgcgatcggacactatcccgcgggaggtcctgcacgcctgttactccagggtgtctccctctgccaaagtggacaaccccaagctggttgcgtggtctgattccgtggccgatctactcgatctggatcacaaagagtttgaaagacctgatttccctcagtttttctcaggagcaactccactagtggggagtttgccctacgcacagtgctatggaggacatcagtttggtgtatgggctggtcagttgggggatggaagagcgatagctcttggagaggttgtcaactctcgaggtgagagatgggagttgcagctcaaaggttgtggaaagactccatacagcagatttgctgatggtcttgctgtcctacgcagcagcatccgtgaattcttatgcagcgaagccatgcacggcctaggcattcctacaactcgtgctctttgtctagttgaaactggaaaatcagttgtccgagatatgttctatgagtatgtcatgacatcttcatttttttaatgtgcactgttaaaacttaaaccatgttatgtttcatcgctgtgttccacttatatataaaaagggtagattcagtgccggaagatcccacatgagtggggtctggggaagggacggcaaagtattagtgatgggttaacttctcaacatcattattaaaataggctattcatgtgccacaaccttgacttgtgggttctgttgggtttttaactctagcctaccccaatttgcttgggggctaaaaggctttgttgttgttaagaacgtttttggtaatttgtgcttcaggcatagtggttttatttctttgaatgacagcttgcttcatgtctttttattatttgatgcgtgcacaggtggcaatgtactgctgtatgttggtcttttgcttttgttctatgtgccttttattgtccttaacttcttattaatctatagtcctatacatgattataaagcatgaaactgccctaaatttattcttgaacacgatctgcagtgtatagtgtggattgggttatttcattttatttatttgtgtaaatgaggtcaagtctcatgcactcacatatatcacatgtatgtgctgtgtaggggcatatggccactttcctgttaaggattttctttaaaaaatctcgaatgtgtatgagttttgctcttactgtatcaccactcaccagggcatcctgtactttagagaacttttgttacattacgactaccttcaatctataacaccgactggcagcagttaaaatatactctgtttgaaggatcatgtttctgaaggttttgagtaaatacactgtacctatttgatacacttctattgtttaatcattcatcttatatacacagtggcaatgcaaaggaagaacctggtgcaatagtttgtcgtgtagcaccgtcttttttacgttttggttcgtatcagatacacgcttcaaggggcaaagaggacattgagattgttcgtcgtttggcagactacacgatacatcatcactttccacatcttgaaaatatgaaaaagagtgaaggtttgtcattcgagacagctataggagattccccaacaatagatctcacatcaaacaaatatgcagcttgggcagttgaggtggcggagaggactgcttacttgatagctagatggcaaggtgttggcttcacccatggtgtacttaacactgacaacatgagtgtgctgggcctaactattgattatggaccatttggatttctcgatgcatttgatcctagctatactccaaatactactgatcttcctgggaagaggtactgttttgcaaatcaacctgatgttggcttgtggaatattgctcagttcactggaccactgtcctctgctgaacttatcagccaagatgaggcaaattatgtgatggagaggtatgggacaaagttcatggatgagtaccaatctatcatgaccaaaaaactgggcttaactaagtataataagcagctaattagtaagctgcttagcaacatggcagttgacaaggttgactataccaacttcttccgtcttctttcgaatgtcaatgcggatcctggtattccggagaatgagctgcttgtcccactgaaggctgctctcctagatattgggaaagaaaggaaggaagcatggattagttgggtacagacttatattgaagagctggtggagagcggcgttcctgatgaagaaaggaaagccgcgatgaactctgttaatccaaagtatattctccgcaactatctctgccagtctgctatcgacgtagctgagcaaggcgattacgaggaggttcgccgggtgcttagggtaatgcataatccgtatgacgagcagccgggaatggagaaatatgcacggttgccaccagcttgggcatacagacctggagtgtgcatgctgtcctgctcctcgtgaaccccatgatgcaagacgtggagtcgtcgtggacattacaaaaatgcttgggtgcttatagtcttcctcctgtataggggtccatctttgtgctgtaatgtgtcaagcatcgcatgctattttttttccggtgatgcaagtgtgtaagaaccatgtcgttgcaggaatagtgaagcagtgggacctgttattgtgactacctagtatcccgtacggagatggaaatttggcggtttactagtctatatagtgaagctctggcacttgcagactggtcaactagaatggtta

SEQ ID NO: 82867 - DNA, 2069 bp, Zea Mays
agcagcacggacggggcatgggattgacccacacacccgccctccgccccgcaagccaaatacgccgtggcacgcgtcgccatgccgccccagttccccaccgcccgcctcctcctccctagtcacaggctgctcccgctcctctcccctctcccctccgcgtccctgtcccctgctcctcgcaccctccgcctcccgccgccgcagcttcttcaccgagtcgcccgccgccgcccgctgctgcgcggcatggcctccgccgccgcccccgggtcacacgccgccgcggaagcgccccccgtcgacgtggggggagggggcgctggcgccccgcggcggctcgtcctggaggagctaccctgggaccattccttcgtccgcgagctgcctggcgacccgcgatcggacactatcccgcgggaggtcctgcacgcctgttactccagggtgtctccctctgccaaagtggacaaccccaagctggttgcgtggtctgattccgtggccgatctactcgatctggatcacaaagagtttgaaagacctgatttccctcagtttttctcaggagcaactccactagtggggagtttgccctacgcacagtgctatggaggacatcagtttggtgtatgggctggtcagttgggggatggaagagcgatagctcttggagaggttgtcaactctcgagtggcaatgcaaaggaagaacctggtgcaatagtttgtcgtgtagcaccgtcttttttacgttttggttcgtatcagatacacgcttcaaggggcaaagaggacattgagattgttcgtcgtttggcagactacacgatacatcatcactttccacatcttgaaaatatgaaaaagagtgaaggtttgtcattcgagacagctataggagattccccaacaatagatctcacatcaaacaaatatgcagcttgggcagttgaggtggcggagaggactgcttacttgatagctagatggcaaggtgttggcttcacccatggtgtacttaacactgacaacatgagtgtgctgggcctaactattgattatggaccatttggatttctcgatgcatttgatcctagctatactccaaatactactgatcttcctgggaagaggtactgttttgcaaatcaacctgatgttggcttgtggaatattgctcagttcactggaccactgtcctctgctgaacttatcagccaagatgaggcaaattatgtgatggagaggtatgggacaaagttcatggatgagtaccaatctatcatgaccaaaaaactgggcttaactaagtataataagcagctaattagtaagctgcttagcaacatggcagttgacaaggttgactataccaacttcttccgtcttctttcgaatgtcaatgcggatcctggtattccggagaatgagctgcttgtcccactgaaggctgctctcctagatattgggaaagaaaggaaggaagcatggattagttgggtacagacttatattgaagagctggtggagagcggcgttcctgatgaagaaaggaaagccgcgatgaactctgttaatccaaagtatattctccgcaactatctctgccagtctgctatcgacgtagctgagcaaggcgattacgaggaggttcgccgggtgcttagggtaatgcataatccgtatgacgagcagccgggaatggagaaatatgcacggttgccaccagcttgggcatacagacctggagtgtgcatgctgtcctgctcctcgtgaaccccatgatgcaagacgtggagtcgtcgtggacattacaaaaatgcttgggtgcttatagtcttcctcctgtataggggtccatctttgtgctgtaatgtgtcaagcatcgcatgctattttttttccggtgatgcaagtgtgtaagaaccatgtcgttgcaggaatagtgaagcagtgggacctgttattgtgactacctagtatcccgtacggagatggaaatttggcggtttactagtctatatagtgaagctctggcacttgcagactggtcaactagaatggtta

SEQ ID NO: 82868 - DNA, 2277 bp, Zea Mays
agaatttggcgaagccgacccagagtcccagacccaccgtgcgccccggcccgcgccgctcacgatacaagatatacaacaagtccaccacgcacgcagcagcacggacggggcatgggattgacccacacacccgccctccgccccgcaagccaaatacgccgtggcacgcgtcgccatgccgccccagttccccaccgcccgcctcctcctccctagtcacaggctgctcccgctcctctcccctctcccctccgcgtccctgtcccctgctcctcgcaccctccgcctcccgccgccgcagcttcttcaccgagtcgcccgccgccgcccgctgctgcgcggcatggcctccgccgccgcccccgggtcacacgccgccgcggaagcgccccccgtcgacgtggggggagggggcgctggcgccccgcggcggctcgtcctggaggagctaccctgggaccattccttcgtccgcgagctgcctggcgacccgcgatcggacactatcccgcgggaggtcctgcacgcctgttactccagggtgtctccctctgccaaagtggacaaccccaagctggttgcgtggtctgattccgtggccgatctactcgatctggatcacaaagagtttgaaagacctgatttccctcagtttttctcaggagcaactccactagtggggagtttgccctacgcacagtgctatggaggacatcagtttggtgtatgggctggtcagttgggggatggaagagcgatagctcttggagaggttgtcaactctcgagcatccgtgaattcttatgcagcgaagccatgcacggcctaggcattcctacaactcgtgctctttgtctagttgaaactggaaaatcagttgtccgagatatgttctatgatggcaatgcaaaggaagaacctggtgcaatagtttgtcgtgtagcaccgtcttttttacgttttggttcgtatcagatacacgcttcaaggggcaaagaggacattgagattgttcgtcgtttggcagactacacgatacatcatcactttccacatcttgaaaatatgaaaaagagtgaaggtttgtcattcgagacagctataggagattccccaacaatagatctcacatcaaacaaatatgcagcttgggcagttgaggtggcggagaggactgcttacttgatagctagatggcaaggtgttggcttcacccatggtgtacttaacactgacaacatgagtgtgctgggcctaactattgattatggaccatttggatttctcgatgcatttgatcctagctatactccaaatactactgatcttcctgggaagaggtactgttttgcaaatcaacctgatgttggcttgtggaatattgctcagttcactggaccactgtcctctgctgaacttatcagccaagatgaggcaaattatgtgatggagaggtatgggacaaagttcatggatgagtaccaatctatcatgaccaaaaaactgggcttaactaagtataataagcagctaattagtaagctgcttagcaacatggcagttgacaaggttgactataccaacttcttccgtcttctttcgaatgtcaatgcggatcctggtattccggagaatgagctgcttgtcccactgaaggctgctctcctagatattgggaaagaaaggaaggaagcatggattagttgggtacagacttatattgaagagctggtggagagcggcgttcctgatgaagaaaggaaagccgcgatgaactctgttaatccaaagtatattctccgcaactatctctgccagtctgctatcgacgtagctgagcaaggcgattacgaggaggttcgccgggtgcttagggtaatgcataatccgtatgacgagcagccgggaatggagaaatatgcacggttgccaccagcttgggcatacagacctggagtgtgcatgctgtcctgctcctcgtgaaccccatgatgcaagacgtggagtcgtcgtggacattacaaaaatgcttgggtgcttatagtcttcctcctgtataggggtccatctttgtgctgtaatgtgtcaagcatcgcatgctattttttttccggtgatgcaagtgtgtaagaaccatgtcgttgcaggaatagtgaagcagtgggacctgttattgtgactacctagtatcccgtacggagatggaaatttggcggtttactagtctatatagtgaagctctggcacttgcagactggtcaactagaatggtta

SEQ ID NO: 82869 - DNA, 2151 bp, Zea Mays
gccgctcttccctgctcatgctcgctcgctggtctgctcctgctcgctcgctggtctgcggcaagaagccggaagccaccgtccgtcctcaaccagccgctggcccgctgcagcctgcagacagcagatcgtcctcgcgcgcccagtcgcccgtcccgtcgcccctgcacacggctggcttgccgcagaccgcagtgccgcactgccgctcgagtctgtcagaccgcagtgccgctcgagactgaagacgctgctgaccgcctgctgtcagctgtggataactggatttaatctggtcatttaattatttgagcaatggctggaaataagaagggaaagaataaggcttcacaaaaaagatttgaagagctattttagccaaggttccactggctcaagtctaagtactcatggcagcggcgtagttgctattgtagatgtgcctttagaagaaaatgtctcgccatctgtagaacatgatgaagaagaagaacaagttcaagaaggtctcaaacatgtcaaggacacaacatcggaagcattgaagagagcactggttgaggcattaagcgaccatggtttatgtgttgcaaattgtcagcagtgctacaacagagagcgatataccagccgtcttgcagaagcagcatcagggaaacacaagcagtgggccgcctgttgatcctgcgattgggccgaggcgcagtatgagacaacgcgtcaagagcacaagggtccatgggcctgagtgggtggcatgactagcgttcggagaggatacttcttccactagcgtcgcgtgggaagggcaggaaatgacagagagagctgattctcctattgtagttccttagaactccttcttccccttcctgctactctctgttaattctgctgtaattccgctacattactaccaatcaatacgagtgccagtcgaaccctaacacaaatcttcgagggcaagggtacgatggtgcttctaacatgagaggagaatttaatggtcttcaaaaaataattcgagatgagaacccgcatgctcattatatctattgtgacgacttctcttttgatgatcgcaagataataaaggatcagttacgcactttcattattcatgtgcgaagacttgaggagttcaaagtttgttatgatcttgcaagtctatccaaaataatggttagacttgaaagacatattgttttcccattggtctttcgtcttattgagttggcattgctattaccggtggctacggcaacggttgaaagggccttctcagcgatgaaggttatcaagactgagttgctcaataagatgtctgatggttggttaaatgatttaatggtttgctatattgagagggacatattcaaaggacttgatcttcaaaaaattaaaaaggcttttcaaaagaagaaagatagacaaatgcaattgcctcagtctcctaggcgtaactagaaggctagggtccatcaagatgacaaacaacggagcaagaaaaagaaggaaaaaaaagaaaaagggcaaaggtaatacaatgtaggttttttccttgctttttcatctaaaagacattggttggcagatgggcaatgtactgaacctaatccaccgtgccattgctgaacctacttgtagatcatataggttcgatgtgctgtcaaagagtcatcaagcaaactttctgttgataatgatctccattgtgttctaaggcctcagattagatcactggatttttgctttatgaatattccctccgttccaaattataagacatactaggtgaatgcccgtgcgttgcaacggaaacatataatatcaaaataacgtatgtacaaatgtgtgttatagtgttgtaagaaaacgtttcgtaatccatttatgattcagacatatataaattgttattttaatctagctatttcgacactacactgtactatacggacttctatatatcacaaaaactacaaacttatacaaatctttagaaaatatttagatgccttgaaacgatatacaaaatattcgacaaatgttagtgtacaacgattacatacattgatcactctcctgcttattggattcacattgcaatatatatcatccacgctagccaaatgttcggccaacaacgat

SEQ ID NO: 82870 - DNA, 1076 bp, Zea Mays
gttacttgcgcgcatccatgcacaatctgtagcgtttagagaccccagcgaccaaacgaactatagcgaggcaaatacagtgcccgccggcccgggacgtagaacgcgcgcaggagcatgtccgccattaaagccacggccgaggacgccgcttcgtccgccaaggccggcgtcgccaaggccaaggccaccgctgacgagaaggttgagaaggccaagacgagagatccgttgaagaagcgggaggtcgaggaggacaaggaggaccgtaagctgcagatcgagtccgacgagcgggtcgagaaggccgcccacggccccgagaggaccgtggcgcacacggccggtgagcggtgatcgatcggaccttagaatgttgtttggttcaagaacagtttatcttctttctccttacttttttttagtttgtggatgaaatggaatgagtttatatgttacaactttatttttttaattagttaataaaaacataaaaaatatggtcatctcatcaaatttaagacatgaatttatgatgtgctatcttattttatatgaaataattccttaaatcaaacacccttttaattgccgcgcaaaacattgtttgtactatacactttactatttgcggagtatgttttgaatggtccaatttacttgtgttttgcactgttttgtttttagagtgtgttttacaacgtaaattgtattatatattggttacaatgtggagtttaaagtaaaggttatagtgtggagttcaaaatagtggctaagacataaatgtgatacgaagaatgctggagatagcttagcgtgtgtgttcttacactctacagtttgtagagttttttttttcactctactgttgtacgtaaactgtattgtttggactatggaatttaaaataaagattgcggaatggagttggaatggagtttgaccgtgtactgtttgtattgtagaatttaaaatagagattgcagagtagagtttaaaataaaggtaaagatatgagtgtcactaccggaatcagctcctttgccgtgtgttctaaacacacggcaaaggct

SEQ ID NO: 82871 - DNA, 1010 bp, Zea Mays
aagaaattaaagctcaagcaaatgggcaagcatgttactataactatcaaaaagcatgaggtggctattgctgaaacatgctcaggataaaatattacaagatgtttgatgatgctctaggagagaattcaaaaatatgctcaggataaaatattacaatggaggaggttcttgaagccgtgtctcatgctgtggttgtatcatctagacagggtcgtgcatctgatatcatcccatagccaatatggtgctgcactatatgtccaccatgcacaatatttcagtgtcatatataagccccaattatgaatgcctagccatctaggttgtcgtcgttgtcgtccatatctgatttgtgcaaaaagcaaatccacctctgaagaccacaataataaagagaagacaaatggaccttctcgcggttctgacaagattatctacaaaattggccctccaatccctacacacccattttcacaattagaccagaccaaaataagcgggtctaaaaaatgcaaaattgcaggatagatgaaggaggacgacggatggagtggtctgaaaaaagaaaagaaaaggaaagagatgaatgaacagggaataggcacttaccgtcctgcggcaggagagatgaggttaggccctggagctctgtcatggcacaacgccccgccggcgatgcgcatcacgtgagacttacaatcctaaaataagtaccccctatgtttcaaattataagtcggtttggcttttctaagtgcataactttgtctatgcacctggatatacatcatgtccaaatacatagtgaaatatatgtaatgctacatacaaattccaaaacttgtagtttggaatggagggagttagatttatgaaccaaactaatgagatgcagatgcacagagggtcttaggttgtcacctcttcgccagcagaacactgcagtatagtatcaggtacagttgatgggtcacagtgatgtccccaacttcctaagtcttcttcag

SEQ ID NO: 82872 - DNA, 2587 bp, Zea Mays
aatttatactcaaatggttgtaatatgtggagaaaacaactacaaactagacacaaggcatgtcatagacggagtggtagtggagggtacgcgcgagggtgaggtctacggttcgattactaacaaccgtgtagcgacttcgacggagacgggcgggtggggtggtcctaatacaaataattttttttactatttttaaaatctgttttatgtttcctggaaacgatttgcactggcggtcttcagttacccgcctgtaaaaatgatgatttttactggcccctagcactggcggttacgataaacgccactaaaaataggtttacgaccgccagtatagaacttctgtgtactagtgtaggttggtttttcaggcactgatgagaatatatagcaattctaaatttctaataggatcatctttgatcgatcgttggttgtaaccatcctccttgcagaatcattatgcaagggtaaggctatctaaaaaatcccttccccaagccccaccttaggctttgttcggcatcttaggatttttttcctaaactaggtttttcccccacatggattgggtgaatccaaacctttcacccaaccctttatgggattaaattcctaaacccaaccaaccaatgtttgttcttttattccaaacccaatccatgccctcctcccaccaccaacagcagctgctgcgctttggtggcagtgttgataagtactacactactacagctaccaggaggatgaaatggaacagtccagagctctcatggtcatgggagccactgcgtctccgctaccggcagctcctccggagcttcgacgacggacacaccaggtgcatactcatcgccggcgacgtggacgacgacgatgcaacccaacaccgcacacgggacaagacaagccccgcgactacctgctgcagaggaggcggcgacgcaccgctgatcagggtgcggaagtggccgtggggctagttcgtgtcggagatcagggactccacacgcaatggacaatgcgtgtggatcagcaccttcgacactcccgaggccgcaccttcgacactcccgaggccaccgtgctgactacgaccaggaccaggccgcctactccatgcgcagctcggccgcagtgttcaacttccccgtggagcacattcaagagtcgctgcgggcgctggggctcagcgtcgacgcagggggctcgccggtgctggcgctgaagcggcgccactgcatccataggcgcttgcccaagaacaagatggaggccaacaaggaggaacaaacgaaggcccaacctgcccgggctgggcacaacaaaacggagccttatgtggaaactttcagcactgagtacgcccttcttgatcaatccaagacacctgcttttgaaaagagtttcaaaagctacactatccaagtgcagtcctaaacttgttaaagatagaaaatatgaaacacttgctaggctgctttttatgaagtagccctaccagtaccaattgattcataatgcgattcacaccaaaaaaaagaacaagaaaagtgatgcacttttactacatattcaagggatgatgatagaaatataggatggtcataggtagaatcagcaagaaccactttccaagttttgatattcaacattattaaagtttgcaaatttaggttgtccttagtttggggatgaggtggaatgggatggtttcatcctagtttcttgaaatgcaatggtcccatcttgatgtttggttgaaaggatagaatggtccctgttttttgtttggtagggggatatgaatagataggatgaaccaggttctttcgaggattttctcaaacactttgcaagagccacctgtctccaggcatatgctgctcatctggcacctctccgtctctgagcatctgtgtcccatgctcttgataatgccaccatcattccaacttatcccacgtgatttgtgtttgccaccgctcgtgaaagcaagcaccagcgcgtgcaggcaaggaagcttgcacctggctgcctgcaagcaaagctaagcaagcagctgctggacttcttcacaagtactgtgttcactgggtgcgcttgccatcctcatctcatctgtgtgagctctccctcgccagcagcccaagctttcacacgcctgcccaaggatgcaggcacacagactcttcttcaacaaccatgcaacagctcctcttgagcttgagctccgcaagacctgcagcgccgccagagcgacttccactcaatccccatgcatccagcgctgctcctccttgttgagcttgccctcatttgcaccccacaccgatctccagcggtgccaagctcatccgggccttctccttttctccctgcgtgtcttgcagccaccactgctctccttcatgtgcactcacgcactcaggcaaaagattgctcatcccacctctttccaccaaattttagggaaaggttctcacccggaatattagggaatattccctggtggaatagttgcattccctgctgttcctgaaccagatacaaaaacaacatggcatatcccacgaaccaaatg

SEQ ID NO: 82873 - DNA, 1000 bp, Zea Mays
  misc_feature (999)..(1000): n is a, c, g, or t
tcctgacaacagggtgctctgttacgatggtagcgtcatgcacgttggccgtcttcgtgagaaagtgtaccagcggctggccgtaggtgtgggggaaggcgtggctgataacgtgagcacccgcgacgtcggccgcgatcgcagcatcaccatattccacactgactgtggggccctgaattgcatccagtccagagctcagtcggtcaagtcgtcaacgacgctggcctaccgtatgagttttatctatatctaatatctataatctatctataattgataacactatataattcactgcttcaaataaacctagagcaattgcatacagaaaccaacatactaaaaataaacggatgaaatcctacttaaacatctactttcttctactcactcctcacatctaacgagcgatgttctttagatgacccttcatccccgtgctcccaccgcacgtgcccctgctctgctaattctccgtattggcggaccacttttctttcgttctttctttattttctctttctttccttattttctctttctttctttcctttctttcttttattttctttattttctttcatctccacattcaatcatgtacgcgatgccttctatctttccttaactttttgtggttttttcttctttgatttttttatcttttaaaatttctaataattttctggttttattttgatatgtggctgccacctaacacgccgcgtaggaatataaatggtacggatattatctttacgtatttaaatttgatctatgtaaaagggttgagatgcaatccgtatctgagttctagtattcaatatctgattcgtatacgatttatatatgtatccatatactcaaagttggatatttaagatatcgatatccattcaaatcaataataactcaataataaatgtattcgatctgaatccgaagaataaaaatgaaaagaaatatgctacgagtaatattggtctatattcaatnn

SEQ ID NO: 82874 - DNA, 600 bp, Zea Mays
cttcaattggagttgtgaatcaaatctgacgggaatttttgtttgcaaagctattagatttattcaatgtaacaaaggcctaaatgtttgtgcatgggtttaattggcacggtgggtaaacatgatctgaggacttgtccatgagcctggcatataacagtttagggacctggataagagcttgcagaaggccttgcacaggtaccttgaggtcagggggttcaaacattcactacatgattggctgtacgaatacatgatgagaaaggatgagaaggagtatgttgtttggctgaagagcatgaaggagttcatcggcggaaattgattgtttgcgctttaagttttatctgcattgtgagaacgagacctgtactcatcatgaaatactagcatcataattgcgcgaagatacctggcatggctttacatcctgctggtgcaagagtttttgttgacctggtagtcttacggacgcccttcttttctgttaagcgatggactgtgttgtcatctttatcaacgctcctaacagcataggggattagcactccagacaaccctattctctttataaatgggatccacgttcagtgagaa

SEQ ID NO: 82875 - DNA, 1326 bp, Zea Mays
gttcctcaaggacaacacctccatccatggatggagaaacaccagggtttaagagagctgtcgtggttgggttgggagcttctgcggcgatcgccttggctgggctggcgtggcgcttcccatcttcccagaagcgtatacagcaactcattgttgctccattacactatgttcaagagaaattgccaacaatagagtcaacagagacaaccaaggaggatgcaagtgacagggaatctgatgaaattgaagtttctagtgcaacgcatgataagaaggctgaagcaataactgatgattcaaggcaaaactacagaacaacaattgccagcccttttccatttggagttcctacagatcctgtgcatgaggaggctttatctgtattgaagaaactacaggtactttagcattctgaactattgcctactagatttagtttgctaaactatcttaaccgtgcatgaaggaaatcatttcatgacttgcgttgtgcataaggcactatttcctcttacatttttgtatcaaacaactgtggaaaatgtttttttgttaccttcccaatgctgtttcatctctaaacactagtgtcatattatgtttggtgggaaatcaatattcactgcatctatgtatgttcttagttttactattcattcgtattgttttgagccatactaaccagaaatctaggtcaactaggcatggttgagtgggatgcgggtacccggtttctaaaaacatacgtcaaggtgttagttcagatcgagtggtttcatctaatctggatctattacctttggtatgctacaaatgagtatttataaaagatgaatacaaagctacaaaaatggattcggtacataatgtgtgtcattggttccttggaaaattcgaatcctgcataagcccaagccagtctagctgcatgcaatatgttggtgtttggttgggttgcataggtcattgtaatcttgtgcattgtcacacaaaagcttctccacccaaaacagacccagtttctatgtaatcttgtgcattgttgcatgaagctgtttgtctctctctcaccaaaatgaactaacactagctctggcagctccatgtaactgtagcagggagccgtacttatggagctgggataagccctctgaaatagccctagatgggcttctgtgctctggcccatacaactttaagcccagctcctttggaacatgggatttcagaaacatgggaataggaaaaacacaggaaatagaagatatgttttctaggatcctatggaattaaaaaccgaaggaagttggtggatgacttgtt

SEQ ID NO: 82876 - DNA, 1356 bp, Zea Mays
cgcatacgcgcatcctctggcgtcgacgagaggatctcgacatccacgtccttgccgcctccgacgttgtggctgggtttaagagagctgtcgtggttgggttgggagcttctgcggcgatcgccttggctgggctggcgtggcgcttcccatcttcccagaagcgtatacagcaactcattgttgctccattacactatgttcaagagaaattgccaacaatagagtcaacagagacaaccaaggaggatgcaagtgacagggaatctgatgaaattgaagtttctagtgcaacgcatgataagaaggctgaagcaataactgatgattcaaggcaaaactacagaacaacaattgccagcccttttccatttggagttcctacagatcctgtgcatgaggaggctttatctgtattgaagaaactacaggtactttagcattctgaactattgcctactagatttagtttgctaaactatcttaaccgtgcatgaaggaaatcatttcatgacttgcgttgtgcataaggcactatttcctcttacatttttgtatcaaacaactgtggaaaatgtttttttgttaccttcccaatgctgtttcatctctaaacactagtgtcatattatgtttggtgggaaatcaatattcactgcatctatgtatgttcttagttttactattcattcgtattgttttgagccatactaaccagaaatctaggtcaactaggcatggttgagtgggatgcgggtacccggtttctaaaaacatacgtcaaggtgttagttcagatcgagtggtttcatctaatctggatctattacctttggtatgctacaaatgagtatttataaaagatgaatacaaagctacaaaaatggattcggtacataatgtgtgtcattggttccttggaaaattcgaatcctgcataagcccaagccagtctagctgcatgcaatatgttggtgtttggttgggttgcataggtcattgtaatcttgtgcattgtcacacaaaagcttctccacccaaaacagacccagtttctatgtaatcttgtgcattgttgcatgaagctgtttgtctctctctcaccaaaatgaactaacactagctctggcagctccatgtaactgtagcagggagccgtacttatggagctgggataagccctctgaaatagccctagatgggcttctgtgctctggcccatacaactttaagcccagctcctttggaacatgggatttcagaaacatgggaataggaaaaacacaggaaatagaagatatgttttctaggatcctatggaattaaaaaccgaaggaagttggtggatgacttgtt

SEQ ID NO: 82877 - DNA, 413 bp, Zea Mays
atatgatacactcgacccgaaatggacacttgaatgaaacccgattcacaaaaccctagcgacctcgattcctcaccagcatggccgtcggcctctactctctcggcctctctccgccgccgcggcttgataccatcctcttcccacagctgcggcctcacctacgccgccgcgtgcccgctcgggttgctgcagccggcaccagctggtctcccgccgccggtgactccgaagacggggtcggcggctggtggtttcccgagtacgagaaatcgatgaaacaggcgagggggaggattgggtttaagagagctgtcgtggttgggttgggagcttctgcggcgatcgccttggctgggctggcgtggcgcttcccatcttcccagaagctgggatgtaaagctatgacagct

SEQ ID NO: 82878 - DNA, 1169 bp, Zea Mays
gttcatgtttcagtccatggatgattaccaggcagggcatttcagatatttcagttgagctgttaagctagctcaggaaaataacaaagactgacatgatgcttctcgggcgaagcggcactccaacacacaaaaagtcccaaacgtgtattcgactcgaacgtttgatgtgagccttggagtgctagattctgtttccattgtccattctcagtcacctgagcagccgaacgttctcagtcacctgcaggtcaggaaccaacgatgccgggcatccaccgctacaccgccgagctgctggtgctgctcaccatcattacccgcctcctgctgctggccacggcgtggccggcattgcccgccccagcgtcgctcgagccgtcgctgcttttcccgtccgccggcgccacctcgcccacgcagacccagtcagccggggtcgcctccacaatcccggccttcccggagcagtcagaggccgccgcggctgctgccacctccgtctgccagctcaccccgtcgcctccgctccttcccgctgtcctagcatcgagcaacgccacgtcgtcggcgaaggcgaagcaggagcaccgcgaggactgccacctcatgggcctgacatggctgctgaaccggaaccccacgcggtaccgcgaggcggccacggcggtcatccaggcgctcatggcggccgacgaggccggcgcgggccacccggccacctgctcgctccccgccgacgatgagctaccagtggccgttgcctcctcgcagattaacggcgccacgtccgcatcgatgtcctccgcccatggcagtctgcttctggtggtcctcgctgctgccgtcattgtcttgtcctgctgatcctaatagaatgcttccaaatcgatgtgtcgcatcgcatggtctctttattactactagtacgtacctttttttctttgttcggtctagttgagacaagatttagaattaagacgctggttttgggtggacctcgttaatgatgtaattatatatttgttccttcgtctaaggctatttttaatggtggtttcatgcacatttaatagtgtgccacatcagatttttttagatgaaactatgtcaatttgtttctaaggtcttgaaaaccgtgtgaaacctccgttgagagtgatctgttt

SEQ ID NO: 82879 - DNA, 1085 bp, Zea Mays
aggatgggttgcccctcggacatgtgttcagggtcaaaagtacgatccggacggtgaatatgtaagaacttggattcctgaacttgctagaatgccaacagaatggatccatagtccatgggctgcgccaaactctatattacaagttgctggagttgagctgggctttaactacccaaagcccatagtagaacttcatatggcgcgggaatgtttagatgacgccatctccacaatgtggcaattggacacagctgcaaaacttgctgaactagatggtgaagttgttgacgacaatctgaataatatcaggaattttgatatcccaaaggtggttttgaacaagaaattatcaccaagcacttcatccatggagcacagggtgttgtctactaatggcaaggacgaaaagtcgcagcctactgaagtgaaggccctgtacaaacagattattcgagatgatatgatgaatgactcaaacatggatgacacatgctctactgctaacttgaaagtgacaaggaaaagatctagcagtgatagtgcgttcaatgttccctcatgttcatcctcattagtcatggaatcacggattcatcataatgaacctagttctgttctgtattcaggctacttccagaagacagcagacagagatggcactagttgaagataatgacagtgaagatagtggtacgagcatctctaggccatccaagaaagctgcttagcattagcgcattgaagatgttgcaaatcttcaatgagaaatatttaccgtcacatgtaatttagctggtgcgtttgtagtgatcatgcaaaagctgttctgtgaattataattagttttacacggcctatccttattccgatagaaggcaatttttgtttggtgaaaaaacatcgctcacggacaggccatagtttgctgtcgctgctgaacagcctaatgcctggtgtaaatgactcatcaacgttacgacactattagcgctggttggttttgctatcaatccgtattcatggattgggtaagattgagtagatttaaatatcaaataaatcaaaatgttttataatttttt

SEQ ID NO: 82880 - DNA, 1947 bp, Zea Mays
ccatcttctactaaccatgaaattcctcggtacaaacttttccttgtttaaccactttcttatcatagactttagttgaaatacattgttgaaatacattagtcagtgctatatatcacttatattgcatagtttgtagaaggtcaaaattcataagcaaagcatgtgatatagaaaaaaatgcaaacagtaagctgccataagtgtttcctaattttaacttattagaagtcagtaagtatttttttttaaaatctaaatataccgcattggactcagcacttaggccaatagcaatgagtaaactccatgtgatcaagttcaggaggtcacatgatgaatgtcttattgaaacaaataagtacactatcaagtagttatggtccccagttctatattggaactctgacatttcctagagctgttgaactttgttattcataaattcaatttcatcccttgcatgatagcatgtcttccccaatggactcgaaccaatatatgattgctattaataaacaagtttcttatcttctaaccattggtctgcaaagtcaacccagagtctctgtgctgcattatccattgctctacacattcaccacttacaatttattctgcttgtgttctcttgcgatgtctttttattctttcttacactgtagaccctatttcacttgtgcttgacaacaaaatcaagaatgagcttccagcccatggaatttctatccaaagtttcaatggtgatttactttacgagccgtgggatgtttatgatgagaatgggcaggcatttacaacctttaacaagtactgggagaaatgtatgagcctacctattgagatatcacaatatcttgcacctacaaggctggtggcagcgccaggttcagggtcaaaagtacgatccggacggtgaatatgtaagaacttggattcctgaacttgctagaatgccaacagaatggatccatagtccatgggctgcgccaaactctatattacaagttgctggagttgagctgggctttaactacccaaagcccatagtagaacttcatatggcgcgggaatgtttagatgacgccatctccacaatgtggcaattggacacagctgcaaaacttgctgaactagatggtgaagttgttgacgacaatctgaataatatcaggaattttgatatcccaaaggtggttttgaacaagaaattatcaccaagcacttcatccatggagcacagggtgttgtctactaatggcaaggacgaaaagtcgcagcctactgaagtgaaggccctgtacaaacagattattcgagatgatatgatgaatgactcaaacatggatgacacatgctctactgctaacttgaaagtgacaaggaaaagatctagcagtgatagtgcgttcaatgttccctcatgttcatcctcattagtcatggaatcacggattcatcataatgaacctagttctgttctgtattcaggctacttccagaagacagcagacagagatggcactagttgaagataatgacagtgaagatagtggtacgagcatctctaggccatccaagaaagctgcttagcattagcgcattgaagatgttgcaaatcttcaatgagaaatatttaccgtcacatgtaatttagctggtgcgtttgtagtgatcatgcaaaagctgttctgtgaattataattagttttacacggcctatccttattccgatagaaggcaatttttgtttggtgaaaaaacatcgctcacggacaggccatagtttgctgtcgctgctgaacagcctaatgcctggtgtaaatgactcatcaacgttacgacactattagcgctggttggttttgctatcaatccgtattcatggattgggtaagattgagtagatttaaatatcaaataaatcaaaatgttttataatttttt

SEQ ID NO: 82881 - DNA, 4185 bp, Zea Mays
aaacttgggacgggcaatcgtctttccatccccaaacttaccacaatcaaactgatcaactgacaactagggatgggcaaccaggctctctttcccagttgatgcgcgtcggatttgcttgtccgctatgggacgctggttcaagcccctttctcacccgccacactccatcacttgtcgctactcaccagattgccccgcgcccatgctgctgtggccgcctagctcgtgatcctgttctcctacccacaagttgcgattcgatctctggcgcagccatcgaatccatcctttgtccttgactcatacttctgttgcaatttgcgtgctggttcctccggtggtgcatgtgcacgggccatgttcgacgaggtgggtttgagaagttctgttacatggtaatccccgtccttgggcttgtcatggtcgattgggaacagtaggattggttgctgagcatggctggaccggagaagactgttgtttggttcaggagagacctcaggatccaggacaacccggccttggcagcggcggcgaaagggggctctgtcctccctatcttcatatggtgcccctcagactacgggcagtactaccctggaaggtgctcccggtggtggctcaagcagtctcttgtccaccttgggaagtcattagagctgctcgggtgcccactcgtgctgatccgtgcggaggacagcactcttgcagctcttttggagtgcgttcgttccatcagtgccactagagtggtttacaatcgtctctacggtaactgtactagcctgtctgatacaatttttcaggacaactgtttctttttgaaatattttgttttcgaaagcgcttgattcacttggtcctttgattacgtattcgaagctttcatccagttacacagtgtaacattgttaatcataatatgtttcgagctaattgagtacattgtactgttttttttttcttagagatacaccggagagctgtgtatctgtgtataaaagagagggggaaaggggaacagttcataaaccttcttatcccagtttggagtatggggttacaagataacaccccaaatgatcacctgttatgcaaaagtatatatcaacccaacgtaacaaaacccacactaaggtctctacatgacaagaaaaggaaacaaaaagaaaaaaaaaactgctgcagctttcgagatccagcattacaccactgcctcatctcctttgaagaagtgctgggagagacacatctattcctgtgattctacttggtccaagtctggtagatcacatcactttgaaaccctcttctttgggccttgccaatgttttcttgcttttcttcaccactaggcaaaatctttttttcatttacgcctaggcaccattaactccagatcaaaaggggtcaggaaatgtgacaatctcgaggtgatacaagtaaaaaacttagcagagttctcgctccaaagctttggtattaactctgcaactcacattagttgtggtttaccatcttctactaaccatgaaattcctcggtacaaacttttccttgtttaaccactttcttatcatagactttagttgaaatacattgttgaaatacattagtcagtgctatatatcacttatattgcatagtttgtagaaggtcaaaattcataagcaaagcatgtgatatagaaaaaaatgcaaacagtaagctgccataagtgtttcctaattttaacttattagaagtcagtaagtatttttttttaaaatctaaatataccgcattggactcagcacttaggccaatagcaatgagtaaactccatgtgatcaagttcaggaggtcacatgatgaatgtcttattgaaacaaataagtacactatcaagtagttatggtccccagttctatattggaactctgacatttcctagagctgttgaactttgttattcataaattcaatttcatcccttgcatgatagcatgtcttccccaatggactcgaaccaatatatgattgctattaataaacaagtttcttatcttctaaccattggtctgcaaagtcaacccagagtctctgtgctgcattatccattgctctacacattcaccacttacaatttattctgcttgtgttctcttgcgatgtctttttattctttcttacactgtagaccctatttcacttgtgcttgacaacaaaatcaagaatgagcttccagcccatggaatttctatccaaagtttcaatggtgatttactttacgagccgtgggatgtttatgatgagaatgggcaggcatttacaacctttaacaagtactgggagaaatgtatgagcctacctattgagatatcacaatatcttgcacctacaaggctggtggcagcgccaggtctagcaaatgttcgctgttgttcgattgatgatctaggtcttgaatctagtaaggatgtggaatcaagcaatgctttgctaagcagggcctggtctcctggctggcgcaatgcagagaacatgcttgaggaatttgtgtcttatggtcttctagaatattcagaacatggtatgaaggttgggggaagtactacgtcattattgtcaccgtatctccatttcggggagttgagtgtaaggatgatttatcaacttgttaaaatgcgtcaagtcaagtggcaaaatgaaggaaaatctgaagctgaggagagtgttcgattgttcctacgatcaattggttttcgagaatattcacggtacttatgctttaactacccattcacacatgagagatcatttttaggtaacttgaagcattatccttggctattggatgagggccgtttcaaatcttggagacagggaatgactggatacccattagtagatgctggcatgagggaactctgggctactggttggacacataatcggataagagtgattgtctcaagtttcgctgtaaaatttctacagataccctggatttggggaatgaagtacttttgggatgtgcttctggatgcagacctagaaagtgatattcttggttggcagtacatatctgggagtttgcctgatggacatgagctcagtcgtcttgataatccagaggttcagggtcaaaagtacgatccggacggtgaatatgtaagaacttggattcctgaacttgctagaatgccaacagaatggatccatagtccatgggctgcgccaaactctatattacaagttgctggagttgagctgggctttaactacccaaagcccatagtagaacttcatatggcgcgggaatgtttagatgacgccatctccacaatgtggcaattggacacagctgcaaaacttgctgaactagatggtgaagttgttgacgacaatctgaataatatcaggaattttgatatcccaaaggtggttttgaacaagaaattatcaccaagcacttcatccatggagcacagggtgttgtctactaatggcaaggacgaaaagtcgcagcctactgaagtgaaggccctgtacaaacagattattcgagatgatatgatgaatgactcaaacatggatgacacatgctctactgctaacttgaaagtgacaaggaaaagatctagcagtgatagtgcgttcaatgttccctcatgttcatcctcattagtcatggaatcacggattcatcataatgaacctagttctgttctgtattcaggctacttccagaagacagcagacagagatggcactagtaaggttgaagataatgacagtgaagatagtggtacgagcatctctaggccatccaagaaagctgcttagcattagcgcattgaagatgttgcaaatcttcaatgagaaatatttaccgtcacatgtaatttagctggtgcgtttgtagtgatcatgcaaaagctgttctgtgaattataattagttttacacggcctatccttattccgatagaaggcaatttttgtttggtgaaaaaacatcgctcacggacaggccatagtttgctgtcgctgctgaacagcctaatgcctggtgtaaatgactcatcaacgttacgacactattagcgctggttggttttgctatcaatccgtattcatggattgggtaagattgagtagatttaaatatcaaataaatcaaaatgttttataatttttt

SEQ ID NO: 82882 - DNA, 2742 bp, Zea Mays
aaacttgggacgggcaatcgtctttccatccccaaacttaccacaatcaaactgatcaactgacaactagggatgggcaaccaggctctctttcccagttgatgcgcgtcggatttgcttgtccgctatgggacgctggttcaagcccctttctcacccgccacactccatcacttgtcgctactcaccagattgccccgcgcccatgctgctgtggccgcctagctcgtgatcctgttctcctacccacaagttgcgattcgatctctggcgcagccatcgaatccatcctttgtccttgactcatacttctgttgcaatttgcgtgctggttcctccggtggtgcatgtgcacgggccatgttcgacgaggtgggtttgagaagttctgttacatggtaatccccgtccttgggcttgtcatggtcgattgggaacagtaggattggttgctgagcatggctggaccggagaagactgttgtttggttcaggagagacctcaggatccaggacaacccggccttggcagcggcggcgaaagggggctctgtcctccctatcttcatatggtgcccctcagactacgggcagtactaccctggaaggtgctcccggtggtggctcaagcagtctcttgtccaccttgggaagtcattagagctgctcgggtgcccactcgtgctgatccgtgcggaggacagcactcttgcagctcttttggagtgcgttcgttccatcagtgccactagagtggtttacaatcgtctctacgaatgagcttccagcccatggaatttctatccaaagtttcaatggtgatttactttacgagccgtgggatgtttatgatgagaatgggcaggcatttacaacctttaacaagtactgggagaaatgtatgagcctacctattgagatatcacaatatcttgcacctacaaggctggtggcagcgccaggtctagcaaatgttcgctgttgttcgattgatgatctaggtcttgaatctagtaaggatgtggaatcaagcaatgctttgctaagcagggcctggtctcctggctggcgcaatgcagagaacatgcttgaggaatttgtgtcttatggtcttctagaatattcagaacatggtatgaaggttgggggaagtactacgtcattattgtcaccgtatctccatttcggggagttgagtgtaaggatgatttatcaacttgttaaaatgcgtcaagtcaagtggcaaaatgaaggaaaatctgaagctgaggagagtgttcgattgttcctacgatcaattggttttcgagaatattcacggtacttatgctttaactacccattcacacatgagagatcatttttaggtaacttgaagcattatccttggctattggatgagggccgtttcaaatcttggagacagggaatgactggatacccattagtagatgctggcatgagggaactctgggctactggttggacacataatcggataagagtgattgtctcaagtttcgctgtaaaatttctacagataccctggatttggggaatgaagtacttttgggatgtgcttctggatgcagacctagaaagtgatattcttggttggcagtacatatctgggagtttgcctgatggacatgagctcagtcgtcttgataatccagaggttcagggtcaaaagtacgatccggacggtgaatatgtaagaacttggattcctgaacttgctagaatgccaacagaatggatccatagtccatgggctgcgccaaactctatattacaagttgctggagttgagctgggctttaactacccaaagcccatagtagaacttcatatggcgcgggaatgtttagatgacgccatctccacaatgtggcaattggacacagctgcaaaacttgctgaactagatggtgaagttgttgacgacaatctgaataatatcaggaattttgatatcccaaaggtggttttgaacaagaaattatcaccaagcacttcatccatggagcacagggtgttgtctactaatggcaaggacgaaaagtcgcagcctactgaagtgaaggccctgtacaaacagattattcgagatgatatgatgaatgactcaaacatggatgacacatgctctactgctaacttgaaagtgacaaggaaaagatctagcagtgatagtgcgttcaatgttccctcatgttcatcctcattagtcatggaatcacggattcatcataatgaacctagttctgttctgtattcaggctacttccagaagacagcagacagagatggcactagtaaggttgaagataatgacagtgaagatagtggtacgagcatctctaggccatccaagaaagctgcttagcattagcgcattgaagatgttgcaaatcttcaatgagaaatatttaccgtcacatgtaatttagctggtgcgtttgtagtgatcatgcaaaagctgttctgtgaattataattagttttacacggcctatccttattccgatagaaggcaatttttgtttggtgaaaaaacatcgctcacggacaggccatagtttgctgtcgctgctgaacagcctaatgcctggtgtaaatgactcatcaacgttacgacactattagcgctggttggttttgctatcaatccgtattcatggattgggtaagattgagtagatttaaatatcaaataaatcaaaatgttttataatttttt

SEQ ID NO: 82883 - DNA, 2806 bp, Zea Mays
aaaaatgacaaaaaaaaaagattgtccataaacttgggacgggcaatcgtctttccatccccaaacttaccacaatcaaactgatcaactgacaactagggatgggcaaccaggctctctttcccagttgatgcgcgtcggatttgcttgtccgctatgggacgctggttcaagcccctttctcacccgccacactccatcacttgtcgctactcaccagattgccccgcgcccatgctgctgtggccgcctagctcgtgatcctgttctcctacccacaagttgcgattcgatctctggcgcagccatcgaatccatcctttgtccttgactcatacttctgttgcaatttgcgtgctggttcctccggtggtgcatgtgcacgggccatgttcgacgaggtgggtttgagaagttctgttacatggtaatccccgtccttgggcttgtcatggtcgattgggaacagtaggattggttgctgagcatggctggaccggagaagactgttgtttggttcaggagagacctcaggatccaggacaacccggccttggcagcggcggcgaaagggggctctgtcctccctatcttcatatggtgcccctcagactacgggcagtactaccctggaaggtgctcccggtggtggctcaagcagtctcttgtccaccttgggaagtcattagagctgctcgggtgcccactcgtgctgatccgtgcggaggacagcactcttgcagctcttttggagtgcgttcgttccatcagtgccactagagtggtttacaatcgtctctacgaccctatttcacttgtgcttgacaacaaaatcaagaatgagcttccagcccatggaatttctatccaaagtttcaatggtgatttactttacgagccgtgggatgtttatgatgagaatgggcaggcatttacaacctttaacaagtactgggagaaatgtatgagcctacctattgagatatcacaatatcttgcacctacaaggctggtggcagcgccaggtctagcaaatgttcgctgttgttcgattgatgatctaggtcttgaatctagtaaggatgtggaatcaagcaatgctttgctaagcagggcctggtctcctggctggcgcaatgcagagaacatgcttgaggaatttgtgtcttatggtcttctagaatattcagaacatggtatgaaggttgggggaagtactacgtcattattgtcaccgtatctccatttcggggagttgagtgtaaggatgatttatcaacttgttaaaatgcgtcaagtcaagtggcaaaatgaaggaaaatctgaagctgaggagagtgttcgattgttcctacgatcaattggttttcgagaatattcacggtacttatgctttaactacccattcacacatgagagatcatttttaggtaacttgaagcattatccttggctattggatgagggccgtttcaaatcttggagacagggaatgactggatacccattagtagatgctggcatgagggaactctgggctactggttggacacataatcggataagagtgattgtctcaagtttcgctgtaaaatttctacagataccctggatttggggaatgaagtacttttgggatgtgcttctggatgcagacctagaaagtgatattcttggttggcagtacatatctgggagtttgcctgatggacatgagctcagtcgtcttgataatccagaggttcagggtcaaaagtacgatccggacggtgaatatgtaagaacttggattcctgaacttgctagaatgccaacagaatggatccatagtccatgggctgcgccaaactctatattacaagttgctggagttgagctgggctttaactacccaaagcccatagtagaacttcatatggcgcgggaatgtttagatgacgccatctccacaatgtggcaattggacacagctgcaaaacttgctgaactagatggtgaagttgttgacgacaatctgaataatatcaggaattttgatatcccaaaggtggttttgaacaagaaattatcaccaagcacttcatccatggagcacagggtgttgtctactaatggcaaggacgaaaagtcgcagcctactgaagtgaaggccctgtacaaacagattattcgagatgatatgatgaatgactcaaacatggatgacacatgctctactgctaacttgaaagtgacaaggaaaagatctagcagtgatagtgcgttcaatgttccctcatgttcatcctcattagtcatggaatcacggattcatcataatgaacctagttctgttctgtattcaggctacttccagaagacagcagacagagatggcactagtaaggttgaagataatgacagtgaagatagtggtacgagcatctctaggccatccaagaaagctgcttagcattagcgcattgaagatgttgcaaatcttcaatgagaaatatttaccgtcacatgtaatttagctggtgcgtttgtagtgatcatgcaaaagctgttctgtgaattataattagttttacacggcctatccttattccgatagaaggcaatttttgtttggtgaaaaaacatcgctcacggacaggccatagtttgctgtcgctgctgaacagcctaatgcctggtgtaaatgactcatcaacgttacgacactattagcgctggttggttttgctatcaatccgtattcatggattgggtaagattgagtagatttaaatatcaaataaatcaaaatgttttataatttttt

SEQ ID NO: 82884 - DNA, 1741 bp, Zea Mays
cgctcggctccgccccgcccgcctctccccattctcacttcttttcccccagttgcgttgcgtgcccctcgtttccacactttgttgcgctcctttagcgccggcggcccgtagcctcaatcatcatttccattccatccggtttcttccgacgacggtgtgtacagagagcaggatcggacaagtctctgctggtagaagcatggcgcagcgccggctgttgggcacggcgccggcgcccgcgggcgatgcggcgtcgcacggctcgggctccagccccgacgcgatgcggatcatggtgggcgtgctggtaacggtcatcgtctgcacgctgctctactgcgtctactgctggcggtggcggaagcgcaatgccatccggagatccctgctggacagcctatggcggcggtcgagctcggacctgccgctcatggacctcgcctccatcctcgctgccaccgacaacttctccaaggccaacaagctcggcgagggcggcttcggccccgtctacagggcgtgctgagcggcggctccgagatcgccgtgaagcgtctgtcagcgcggtcgcggcagggcgcggcggagttccggaacgaggtggagctcatcgccaagctgcagcaccgcaacctagtgcggctgctgggctggtgcgccgagcgcgaggagaagctgctggtgtacgagtacctccccaaccgcagcctcgacgccttcctcttcgatccgagcaagagtgcgcagcttgggtggagcacccggcacaacgtgatcctgggcatcgcccgcggcctgctgtacctccacgaggactcgctgctgaaggtggtccaccgggacctcaaggccagcaacgtgctgctcgaccacaagatgagcccaaagatctccgacttcggcatggccaagatcttcgaggacgactccgacgcgattaacacgggccgcgtcgtcgggacctacgggtacatggcgcccgagttcgcgttggacggcgtcttctcggtgaagtcggacgtgttcagtttcggggtcctcctgctggagatcttgagcgggcaacggaacggcgccttgtacctcgaggaacaccagcagtccctcatccaagacgcatggaagctgtggagtgaagaccgcgcggccgagttcatggaccagtcgctggggcggtcctactccaaggacgaggcgtggcggtgctaccacgtcggcctgctctgcgtgcaggaggaccccgacgtccgcccgaccatgtccaacgtcctgctcatgctcatcagcgaccacaccaagttacccgagccagccatgccgcccttgttcgcgcggctcaggaacatctccttgctggcgccgccactcaccaccaaaaccgagtccaccacgtctccgctgtcgatcaacgacgtctccatcaccatgatcgaaccgcgatgagctcatgcgttttgtacttctgacaactgagggagaggcttcgagtgtaaatttataagactgcaatcgttcagaatgactactcatatgtactagtaagtttttttttgatggtgtgcacaagtgtgggatttagctactagactagaacatgcggcgcccgtaatcgggtcataacagatttcttttttatgtttatgcattctcctatgtgatccaatggactaaaatgtgtcaccactggtagcaaagagcatataactattttaattagtttgtatccaaatgcataaga

SEQ ID NO: 82885 - DNA, 657 bp, Zea Mays
gatcaaccccgtggcaaatgggttgtgggtaaagatgcgcaacctctgtagagtgtaaaactggtatactaaccgtgctcacggtcatgagcagcttggactctcacatgattaatttatgaaattaaactcaatttgtcatttgcatcgcattaggattattattattattattattattattattattatttactattactatggtttggtaatcacttacatttagtaactgataataaaattttgaccaacttataaaagcaatgctcaactttaacatttatttattggtcagccttacacctcacatgaactcccacctttggcgagttcatgcacattattccccacaatttgttgagctatgatcttttgtgagctcactcttgcgatatataaacccccgcacaggtgaagagcaggtggtcgaagaggagccgcacaacgaggagtttgacttgatctaagtggcgtctcccagtcaactttgtggtgctagggaaataataattagttcactttatcattaccatttatttttgtaagactttcgctatgtaataattacatatatgatatttatgacatttatccttatacactttgtcattatatgtgatgttcttccttggcgcacatatgagacgcacccgg

SEQ ID NO: 82886 - DNA, 446 bp, Zea Mays
cgaccgacttgtcaaccatccatcggccaccacccatgcctttatttagtgcccggggacccgtccgcccgtcccgaatcctggacaccctagcctcgtcgtaaatctgagagagagagagagagagtgagaagaagagcagcgccgccgagatcggacttggaatttgccatggccagtcacccctctgcttttccttgccggtgaagagcaggtggtcgaagaggagccgcacaacgaggagtttgacttgatctaagtggcgtctcccagtcaactttgtggtgctagggaaataataattagttcactttatcattaccatttatttttgtaagactttcgctatgtaataattacatatatgatatttatgacatttatccttatacactttgtcattatatgtgatgttcttccttggcgcacatatgagacgcacccgg

SEQ ID NO: 82887 - DNA, 585 bp, Zea Mays
cctttcttcactcgcacgcgcaacgaccgccactacttccccgaagccgaccgacttgtcaaccatccatcggccaccacccatgcctttatttagtgcccggggacccgtccgcccgtcccgaatcctggacaccctagcctcgtcgtaaatctgagagagagagagagagagtgagaagaagagcagcgccgccgagatcggacttggaatttgccatggccagtcacccctctgcttttccttgccgacgagcaagctatagaggatccagggttcagtaggtggagactgctgagcaggagctcgttgaaggcaagttgtgcccttgatcacttcctttttacccatacatgttcttattagtcatagtgatctgcataggctaattttgatgggacccaatgggttaccccagtttggcaatctttataccttgttttaccactgaatttttgggtaatacatgttattgctttatgtggttttggggatggagatatacattattcatgattacacttttattatcagattattatttactgtttatgataagatcgttatgttaattataacatggag

SEQ ID NO: 82888 - DNA, 818 bp, Zea Mays
ccaggctctgccaccacctctcccaatgggcggccacagtttcttcctccgacaattcgtcacgcccatgccgccctcccctccgaccacctaacttcgctccgcccatggccgtcgtcgcccatgccggcctcccacggcctcgcctctttctccctttctccttccacggaagccccatctattcatcatgcctgtcattggctctgccttcggttgctgtagattatgaccatgggaacccatggtgtcgccctgacactcctcacaacggtgcttctcgaggccaccatcccagtgtcagcagtggatggccttgcgtgggtcgtgcaagaagccacgagttcctcatcaagatcagatgcaattattggtcttggtgaagcagaggaccgggtaggattgttgggtacacttgccaccttgcctacacactgagaaagtgtccatattaatgaaggcactcctcttgaggatcagaaggtagaagcaaggccatgaggaacctgaagcccaacttggagaagtacatgtagttgcacccaaaaggcaattatgcccttaatcactttctttacctaataatgttcctgataataatcgtgacatgcttaggttaaattgatgggacctaataggttacctagtttgtttaccctacaccttgtaaataaatgaactatttggtagtcttgctactactctacttggttttgggattaatattatatctgaactatgatcatgttaattggaacatggagcgaccacttgataaaacagtgctaccataagggtgggatgggacacccttggtt

SEQ ID NO: 82889 - DNA, 523 bp, Zea Mays
ccaggctctgccaccacctctcccaatgggcggccacagtttcttcctccgacaattcgtcacgcccatgccgccctcccctccgaccacctaacttcgctccgcccatggccgtcgtcgcccatgccggcctcccacggcctcgcctctttctccctttctccttccacggaagccccatctattcatcatgcctgtcattggctctgccttcggttgctgtagattatgaccatgggaacccatggtgtcgccctgacactcctcacaacggtgcttctcgaggccaccatcccagtgtcagcagtggatggccttgcgtgggtcgtgcaagaagccacgagttcctcatcaagatcagatgcaattattggtcttggtgaagcagaggaccgggtaggattgttgggtacacttgccaccttgcctacacactgagaaagtgtccatattaatgaaggcactcctcttgaggatcagaagaggtcaaagcagaggcccttgacggagcagacgtagtgtg

SEQ ID NO: 82890 - DNA, 981 bp, Zea Mays
ccaggctctgccaccacctctcccaatgggcggccacagtttcttcctccgacaattcgtcacgcccatgccgccctcccctccgaccacctaacttcgctccgcccatggccgtcgtcgcccatgccggcctcccacggcctcgcctctttctccctttctccttccacggaagccccatctattcatcatgcctgtcattggctctgccttcggttgctgtagattatgaccatgggaacccatggtgtcgccctgacactcctcacaacggtgcttctcgaggccaccatcccagtgtcagcagtggatggccttgcgtgggtcgtgcaagaagccacgagttcctcatcaagatcagaggaccgggtaggattgttgggtacacttgccaccttgcctacacactgagaaagtgtccatattaatgaaggcactcctcttgaggatcagaagcgagaaacttctcacacttgcaaacaacaactttgacacggaccagacgatgttcaagatccttgggcctaatccccaatgctctaagcttttgctagcaagaagtggtggtgatgctgcttgcaccaataggtctgagctacacatattttatagtctgggatgtttaatattgtagcttttcagctaatccttatatatatactagatgagtgcccgtgcgttgcaacggaaacgtataataatacgataacttatgtacaaatgtgtgttatattattatgagaaaatgtttcggaatccattgtgatcctacccatatataaatttggttatttaatctagctatttcaccattacattgcaaccattagtaacatattgatttctatatatgattttaataatgtcattgagttataatgacagcacaattgagaaagtgttatttataactcaaatatcagaaaaagggtactaagaaagcacagaaataaggtaattaactctatcacaagaaccaag

SEQ ID NO: 82891 - DNA, 1054 bp, Zea Mays
ccaggctctgccaccacctctcccaatgggcggccacagtttcttcctccgacaattcgtcacgcccatgccgccctcccctccgaccacctaacttcgctccgcccatggccgtcgtcgcccatgccggcctcccacggcctcgcctctttctccctttctccttccacggaagccccatctattcatcatgcctgtcattggctctgccttcggttgctgtagattatgaccatgggaacccatggtgtcgccctgacactcctcacaacggtgcttctcgaggccaccatcccagtgtcagcagtggatggccttgcgtgggtcgtgcaagaagccacgagttcctcatcaagatcagatgcaattattggtcttggtgaagcagaggaccgggtaggattgttgggtacacttgccaccttgcctacacactgagaaagtgtccatattaatgaaggcactcctcttgaggatcagaagaacaagtgctttgtttcgttcctgagaccaactccatctttgctagcgagaaacttctcacacttgcaaacaacaactttgacacggaccagacgatgttcaagatccttgggcctaatccccaatgctctaagcttttgctagcaagaagtggtggtgatgctgcttgcaccaataggtctgagctacacatattttatagtctgggatgtttaatattgtagcttttcagctaatccttatatatatactagatgagtgcccgtgcgttgcaacggaaacgtataataatacgataacttatgtacaaatgtgtgttatattattatgagaaaatgtttcggaatccattgtgatcctacccatatataaatttggttatttaatctagctatttcaccattacattgcaaccattagtaacatattgatttctatatatgattttaataatgtcattgagttataatgacagcacaattgagaaagtgttatttataactcaaatatcagaaaaagggtactaagaaagcacagaaataaggtaattaactctatcacaagaaccaag

SEQ ID NO: 82892 - DNA, 1017 bp, Zea Mays
gcgacatttccaggctctgccaccacctctcccaatgggcggccacagtttcttcctccgacaattcgtcacgcccatgccgccctcccctccgaccacctaacttcgctccgcccatggccgtcgtcgcccatgccggcctcccacggcctcgcctctttctccctttctccttccacggaagccccatctattcatcatgcctgtcattggctctgccttcggttgctgtagattatgaccatgggaacccatggtgtcgccctgacactcctcacaacggtgcttctcgaggccaccatcccagtgtcagcagtggatggccttgcgtgggtcgtgcaagaagccacgagttcctcatcaagatcagatgcaattattggtcttggtgaagcagaggaccgggtaggattgttgggtacacttgccaccttgcctacacactgagaaagtgtccatattaatgaaggcactcctcttgaggatcagaagcgagaaacttctcacacttgcaaacaacaactttgacacggaccagacgatgttcaagatccttgggcctaatccccaatgctctaagcttttgctagcaagaagtggtggtgatgctgcttgcaccaataggtctgagctacacatattttatagtctgggatgtttaatattgtagcttttcagctaatccttatatatatactagatgagtgcccgtgcgttgcaacggaaacgtataataatacgataacttatgtacaaatgtgtgttatattattatgagaaaatgtttcggaatccattgtgatcctacccatatataaatttggttatttaatctagctatttcaccattacattgcaaccattagtaacatattgatttctatatatgattttaataatgtcattgagttataatgacagcacaattgagaaagtgttatttataactcaaatatcagaaaaagggtactaagaaagcacagaaataaggtaattaactctatcacaagaaccaag

SEQ ID NO: 82893 - DNA, 2825 bp, Zea Mays
ctttttggttcatgtttgatttgcttgttttcttctctaccatgattgtttcttattcagtgctagcatcagcgtgcttcgttcttctcctcactttggagatctacatacacagagggcccatgtcttgctttaagagatggaggtaatgagtggatggttgtggaagactgcgctcatggaagttcccagaaaacatcacagcccaccaaaatggtcagtcatactatggatgcttgtcacagccaacctctggataatgtgcagcagcagtacccagaagaaagttctcatgccagggttcagcgcctcggaaatggattacattgataacgatgggaagtttcttctctccaatggctatgtctttggctttggctttgccaccgtcagcgtgtcagacagcacatactacgttcttgcagtagtccacttgcccaccacttctattgtctggtctgctaatgctaactctccagtttctcattcagacaactttgtgtttgacaaggatggcaatgcctacctgcagtctggaggttccacggtgtggactgccaatatctccggcaagggggccacctctatgcagctgctagactcgggcaatcttgtagtgtttggcaaggacggctcttctcctctgtggcagagtttcagccatccaacagacacacttctgtctggacaaagcttcatcgaggggatgagtttgttgagccattccaatgcacagaacatgacctatacacttgagatcaaatctggggacatgttgttgtatgcaggctttcagttgccccaaccgtactggtccgctctgcaggataacagggtgatcatcgacaagaatggcaacaataacatatactctgcaaacctgagttcaggttcctggtcgttttatgatcaatcagggcttcttcaatcacagcttgtcattgcacagcagcagggtgatgctaacaccacactggctgctgtcctcggtaatgatggtttgattaacttctatatgctccagagtgtgaatggcaagagtgctcttcctatcacagttccacaggactcgtgtgacatgcctgcccactgcaagccgtactccatttgcaacagcgggacagggtgccagtgtccttcagccctcagctcctatgcaaactgcgaccctggcgtcatatcaccatgcaactcgaagaacaagtttcagcttgttcaactggacagtgctgttgggtatgtcggcactagattcacactgcctgtgcccaagacaaacctcacaggatgcaggaatgcctgcatgggtaactgctcatgcattgctgtattcttcgaccagacttcaggaaattgcttccttttcgaccagataggaagcttgcaacagaaagatggaggtaagagtagccttgcatctttcattaaggtatcaagcagtaatggcgggtcagggcaaggtggcagtagtgacaatggatggtggtggttcgtcagaagatgatggtttcctgcacactatatcaggagcaccgacacggttcacttacaggcagctccaggatgcgacaaacaacttctcagacaagcttggccagggagggtttggatctgtgtatcttggtacgctgcctgatggcagccgcatcgctgtaaagaagctagagggcatgggacaagggaagaaagaattccgttctgaggtgaccatcattggcagcatacatcacatccatcttgttaaactccgaggcttttgcgctgaaggagcgcacaggctccttgcatacgagtacatggcaaaggggtctctagatagatggattttccaaaggaacgaggattcctccctgcttgactgggacacgaggtttagcatcgcccttggaacagccaaggggttggcgtacctccaccatgactgtgagtcgaagatcattcactgtgacatcaagcctgagaatgttctccttgacgacaacttcctcgcgaaggtgtcagacttcggcctcgccaagctgatgaccagggagcagagccatgtgttcacgacgctcaagggcactcggggctatcttgcacccgaatggatcaccaactatgccatctcagagaagtgcgacgtgtacagctacgggatggttctcctcgagataatcagtgggaggaagagctatgatcctgtggaaggttcggagaaggctcacttcccctcctacgcttttaagaagctggaagaaggtgacctccgcgatatctccgactccaagctaaaatacaagggccaggatagccggattgagatggcaatcaaggtcgccttgtggtgcatccaggaggacttctatcagaggccgtccatgtccaaggttgtccagatgctggaaggcgtctgcgacgtgccccagccaccaatgtcttcgcatattggataccggctgtacgcgaatgccttcaaatctagcagcgaagagggcacgtcgtctgggatgtcagactacaatagtgatgccttgctttctgctgtgcggctctctgggcccaggtgatatggttatgtacattgctctgctttagttagcatggcgaatcgatgatgtccaatttttggggaaggccattcgtttgttcgtagtcatgacatatatgttgaaagcttgaggtgtttagttcgaattttctgaaatgccctaaatggggcacaatttcacaccttagaaaagtcagtttgcaatttcacaaaacaccaaaaaaaaatctatctcgaagctacgaccaggtgtatataccaggatttggaaattgcaatactggctgactttgat

SEQ ID NO: 82894 - DNA, 3113 bp, Zea Mays
caccacttgcggtgcgcccatcgaccaccgctccctccttaattccgcctctcatctcaccaagtcaccatccacccacctgctcgacccgcctccgtccgcctctctccattcaatcacgccatcgccacgcctcctccgcttctcagttctccctctctgcgcccacaagcgccaaatcattttcaccggaggccatggccccgctgcctccgggcccagagtctgtctgggactcaactgaactgtaaaatgctcctaaaggaggttgacaaacaaatacaaagctttatcacgaatcgctcccacccaagatggaggtaatgagtggatggttgtggaagactgcgctcatggaagttcccagaaaacatcacagcccaccaaaatggtcagtcatactatggatgcttgtcacagccaacctctggataatgtgcagcagcagtacccagaagaaagttctcatgccagggttcagcgcctcggaaatggattacattgataacgatgggaagtttcttctctccaatggctatgtctttggctttggctttgccaccgtcagcgtgtcagacagcacatactacgttcttgcagtagtccacttgcccaccacttctattgtctggtctgctaatgctaactctccagtttctcattcagacaactttgtgtttgacaaggatggcaatgcctacctgcagtctggaggttccacggtgtggactgccaatatctccggcaagggggccacctctatgcagctgctagactcgggcaatcttgtagtgtttggcaaggacggctcttctcctctgtggcagagtttcagccatccaacagacacacttctgtctggacaaagcttcatcgaggggatgagtttgttgagccattccaatgcacagaacatgacctatacacttgagatcaaatctggggacatgttgttgtatgcaggctttcagttgccccaaccgtactggtccgctctgcaggataacagggtgatcatcgacaagaatggcaacaataacatatactctgcaaacctgagttcaggttcctggtcgttttatgatcaatcagggcttcttcaatcacagcttgtcattgcacagcagcagggtgatgctaacaccacactggctgctgtcctcggtaatgatggtttgattaacttctatatgctccagagtgtgaatggcaagagtgctcttcctatcacagttccacaggactcgtgtgacatgcctgcccactgcaagccgtactccatttgcaacagcgggacagggtgccagtgtccttcagccctcagctcctatgcaaactgcgaccctggcgtcatatcaccatgcaactcgaagaacaagtttcagcttgttcaactggacagtgctgttgggtatgtcggcactagattcacactgcctgtgcccaagacaaacctcacaggatgcaggaatgcctgcatgggtaactgctcatgcattgctgtattcttcgaccagacttcaggaaattgcttccttttcgaccagataggaagcttgcaacagaaagatggaggtaagagtagccttgcatctttcattaaggtatcaagcagtaatggcgggtcagggcaaggtggcagtagtgacaatggtaggctcaccatcgtaattgttgtcattatagttggaactttggctgtcataggggtccttgtgtatgttggtttctgcatttaccggaggagtcaccatacaccctcgcaggatggtggtggttcgtcagaagatgatggtttcctgcacactatatcaggagcaccgacacggttcacttacaggcagctccaggatgcgacaaacaacttctcagacaagcttggccagggagggtttggatctgtgtatcttggtacgctgcctgatggcagccgcatcgctgtaaagaagctagagggcatgggacaagggaagaaagaattccgttctgaggtgaccatcattggcagcatacatcacatccatcttgttaaactccgaggcttttgcgctgaaggagcgcacaggctccttgcatacgagtacatggcaaaggggtctctagatagatggattttccaaaggaacgaggattcctccctgcttgactgggacacgaggtttagcatcgcccttggaacagccaaggggttggcgtacctccaccatgactgtgagtcgaagatcattcactgtgacatcaagcctgagaatgttctccttgacgacaacttcctcgcgaaggtgtcagacttcggcctcgccaagctgatgaccagggagcagagccatgtgttcacgacgctcaagggcactcggggctatcttgcacccgaatggatcaccaactatgccatctcagagaagtgcgacgtgtacagctacgggatggttctcctcgagataatcagtgggaggaagagctatgatcctgtggaaggttcggagaaggctcacttcccctcctacgcttttaagaagctggaagaaggtgacctccgcgatatctccgactccaagctaaaatacaagggccaggatagccggattgagatggcaatcaaggtcgccttgtggtgcatccaggaggacttctatcagaggccgtccatgtccaaggttgtccagatgctggaaggcgtctgcgacgtgccccagccaccaatgtcttcgcatattggataccggctgtacgcgaatgccttcaaatctagcagcgaagagggcacgtcgtctgggatgtcagactacaatagtgatgccttgctttctgctgtgcggctctctgggcccaggtgatatggttatgtacattgctctgctttagttagcatggcgaatcgatgatgtccaatttttggggaaggccattcgtttgttcgtagtcatgacatatatgttgaaagcttgaggtgtttagttcgaattttctgaaatgccctaaatggggcacaatttcacaccttagaaaagtcagtttgcaatttcacaaaacaccaaaaaaaaatctatctcgaagctacgaccaggtgtatataccaggatttggaaattgcaatactggctgactttgat

SEQ ID NO: 82895 - DNA, 2926 bp, Zea Mays
caccacttgcggtgcgcccatcgaccaccgctccctccttaattccgcctctcatctcaccaagtcaccatccacccacctgctcgacccgcctccgtccgcctctctccattcaatcacgccatcgccacgcctcctccgcttctcagttctccctctctgcgcccacaagcgccaaatcattttcaccggaggccatggccccgctgcctccgggcccagaggtagtctgtctgggactcaactgaactgtaaaatgctcctaaaggaggttgacaaacaaatacaaagctttatcacgaatcgctcccacccaagatggaggtaatgagtggatggttgtggaagactgcgctcatggaagttcccagaaaacatcacagcccaccaaaatggtcagtcatactatggatgcttgtcacagccaacctctggataatgtgcagcagcagtacccagaagaaagttctcatgccagggttcagcgcctcggaaatggattacattgataacgatgggaagtttcttctctccaatggctatgtctttggctttggctttgccaccgtcagcgtgtcagacagcacatactacgttcttgcagtagtccacttgcccaccacttctattgtctggtctgctaatgctaactctccagtttctcattcagacaactttgtgtttgacaaggatggcaatgcctacctgcagtctggaggttccacggtgtggactgccaatatctccggcaagggggccacctctatgcagctgctagactcgggcaatcttgtagtgtttggcaaggacggctcttctcctctgtggcagagtttcagccatccaacagacacacttctgtctggacaaagcttcatcgaggggatgagtttgttgagccattccaatgcacagaacatgacctatacacttgagatcaaatctggggacatgttgttgtatgcaggctttcagttgccccaaccgtactggtccgctctgcaggataacagggtgatcatcgacaagaatggcaacaataacatatactctgcaaacctgagttcaggttcctggtcgttttatgatcaatcagggcttcttcaatcacagcttgtcattgcacagcagcagggtgatgctaacaccacactggctgctgtcctcggtaatgatggtttgattaacttctatatgctccagagtgtgaatggcaagagtgctcttcctatcacagttccacaggactcgtgtgacatgcctgcccactgcaagccgtactccatttgcaacagcgggacagggtgccagtgtccttcagccctcagctcctatgcaaactgcgaccctggcgtcatatcaccatgcaactcgaagaacaagtttcagcttgttcaactggacagtgctgttgggtatgtcggcactagattcacactgcctgtgcccaagacaaacctcacaggatgcaggaatgcctgcatgggtaactgctcatgcattgctgtattcttcgaccagacttcaggaaattgcttccttttcgaccagataggaagcttgcaacagaaagatggaggatggtggtggttcgtcagaagatgatggtttcctgcacactatatcaggagcaccgacacggttcacttacaggcagctccaggatgcgacaaacaacttctcagacaagcttggccagggagggtttggatctgtgtatcttggtacgctgcctgatggcagccgcatcgctgtaaagaagctagagggcatgggacaagggaagaaagaattccgttctgaggtgaccatcattggcagcatacatcacatccatcttgttaaactccgaggcttttgcgctgaaggagcgcacaggctccttgcatacgagtacatggcaaaggggtctctagatagatggattttccaaaggaacgaggattcctccctgcttgactgggacacgaggtttagcatcgcccttggaacagccaaggggttggcgtacctccaccatgactgtgagtcgaagatcattcactgtgacatcaagcctgagaatgttctccttgacgacaacttcctcgcgaaggtgtcagacttcggcctcgccaagctgatgaccagggagcagagccatgtgttcacgacgctcaagggcactcggggctatcttgcacccgaatggatcaccaactatgccatctcagagaagtgcgacgtgtacagctacgggatggttctcctcgagataatcagtgggaggaagagctatgatcctgtggaaggttcggagaaggctcacttcccctcctacgcttttaagaagctggaagaaggtgacctccgcgatatctccgactccaagctaaaatacaagggccaggatagccggattgagatggcaatcaaggtcgccttgtggtgcatccaggaggacttctatcagaggccgtccatgtccaaggttgtccagatgctggaaggcgtctgcgacgtgccccagccaccaatgtcttcgcatattggataccggctgtacgcgaatgccttcaaatctagcagcgaagagggcacgtcgtctgggatgtcagactacaatagtgatgccttgctttctgctgtgcggctctctgggcccaggtgatatggttatgtacattgctctgctttagttagcatggcgaatcgatgatgtccaatttttggggaaggccattcgtttgttcgtagtcatgacatatatgttgaaagcttgaggtgtttagttcgaattttctgaaatgccctaaatggggcacaatttcacaccttagaaaagtcagtttgcaatttcacaaaacaccaaaaaaaaatctatctcgaagctacgaccaggtgtatataccaggatttggaaattgcaatactggctgactttgat

SEQ ID NO: 82896 - DNA, 3434 bp, Zea Mays
caccacttgcggtgcgcccatcgaccaccgctccctccttaattccgcctctcatctcaccaagtcaccatccacccacctgctcgacccgcctccgtccgcctctctccattcaatcacgccatcgccacgcctcctccgcttctcagttctccctctctgcgcccacaagcgccaaatcattttcaccggaggccatggccccgctgcctccgggcccagaggtagtctgtctgggactcaactgaactgtaaaatgctcctaaaggaggttgacaaacaaatacaaagctttatcacgaatcgctcccacccaaggtagcataatgagctcttgttctggattctgacgagggtaacttttatgatgacgattattttaccctcatgagaggctagggttatggtggtggtggttgttggttattgagattctagggcctccaaacatgcctagagaaacacctcttgctgggtgggaaatttttttgttacagcccggatgcaaactaggatttctacagcccctcacaaacaggagggtaggctcggcatgcagcagcagcaacaacaactagaacactatcccgtaacagctggtggacttgcacgtgggacctattctccagtttgtgaggggttgcaaagatccctgtttgcatgtggtctgcaaagaaaatttactgctgggcaaagtgggtcagcatcttggcgacggaatccggtgacagctcatcggaacctggcatcttcgatatcaaatgttatggtggtggctcgtattgagggagcgcaagggggtcagacgaggtcttgtccatgaccaatggaggtaatgagtggatggttgtggaagactgcgctcatggaagttcccagaaaacatcacagcccaccaaaatggtcagtcatactatggatgcttgtcacagccaacctctggataatgtgcagcagcagtacccagaagaaagttctcatgccagggttcagcgcctcggaaatggattacattgataacgatgggaagtttcttctctccaatggctatgtctttggctttggctttgccaccgtcagcgtgtcagacagcacatactacgttcttgcagtagtccacttgcccaccacttctattgtctggtctgctaatgctaactctccagtttctcattcagacaactttgtgtttgacaaggatggcaatgcctacctgcagtctggaggttccacggtgtggactgccaatatctccggcaagggggccacctctatgcagctgctagactcgggcaatcttgtagtgtttggcaaggacggctcttctcctctgtggcagagtttcagccatccaacagacacacttctgtctggacaaagcttcatcgaggggatgagtttgttgagccattccaatgcacagaacatgacctatacacttgagatcaaatctggggacatgttgttgtatgcaggctttcagttgccccaaccgtactggtccgctctgcaggataacagggtgatcatcgacaagaatggcaacaataacatatactctgcaaacctgagttcaggttcctggtcgttttatgatcaatcagggcttcttcaatcacagcttgtcattgcacagcagcagggtgatgctaacaccacactggctgctgtcctcggtaatgatggtttgattaacttctatatgctccagagtgtgaatggcaagagtgctcttcctatcacagttccacaggactcgtgtgacatgcctgcccactgcaagccgtactccatttgcaacagcgggacagggtgccagtgtccttcagccctcagctcctatgcaaactgcgaccctggcgtcatatcaccatgcaactcgaagaacaagtttcagcttgttcaactggacagtgctgttgggtatgtcggcactagattcacactgcctgtgcccaagacaaacctcacaggatgcaggaatgcctgcatgggtaactgctcatgcattgctgtattcttcgaccagacttcaggaaattgcttccttttcgaccagataggaagcttgcaacagaaagatggaggatggtggtggttcgtcagaagatgatggtttcctgcacactatatcaggagcaccgacacggttcacttacaggcagctccaggatgcgacaaacaacttctcagacaagcttggccagggagggtttggatctgtgtatcttggtacgctgcctgatggcagccgcatcgctgtaaagaagctagagggcatgggacaagggaagaaagaattccgttctgaggtgaccatcattggcagcatacatcacatccatcttgttaaactccgaggcttttgcgctgaaggagcgcacaggctccttgcatacgagtacatggcaaaggggtctctagatagatggattttccaaaggaacgaggattcctccctgcttgactgggacacgaggtttagcatcgcccttggaacagccaaggggttggcgtacctccaccatgactgtgagtcgaagatcattcactgtgacatcaagcctgagaatgttctccttgacgacaacttcctcgcgaaggtgtcagacttcggcctcgccaagctgatgaccagggagcagagccatgtgttcacgacgctcaagggcactcggggctatcttgcacccgaatggatcaccaactatgccatctcagagaagtgcgacgtgtacagctacgggatggttctcctcgagataatcagtgggaggaagagctatgatcctgtggaaggttcggagaaggctcacttcccctcctacgcttttaagaagctggaagaaggtgacctccgcgatatctccgactccaagctaaaatacaagggccaggatagccggattgagatggcaatcaaggtcgccttgtggtgcatccaggaggacttctatcagaggccgtccatgtccaaggttgtccagatgctggaaggcgtctgcgacgtgccccagccaccaatgtcttcgcatattggataccggctgtacgcgaatgccttcaaatctagcagcgaagagggcacgtcgtctgggatgtcagactacaatagtgatgccttgctttctgctgtgcggctctctgggcccaggtgatatggttatgtacattgctctgctttagttagcatggcgaatcgatgatgtccaatttttggggaaggccattcgtttgttcgtagtcatgacatatatgttgaaagcttgaggtgtttagttcgaattttctgaaatgccctaaatggggcacaatttcacaccttagaaaagtcagtttgcaatttcacaaaacaccaaaaaaaaatctatctcgaagctacgaccaggtgtatataccaggatttggaaattgcaatactggctgactttgat

SEQ ID NO: 82897 - DNA, 3629 bp, Zea Mays
gggatcgtcaccacttgcggtgcgcccatcgaccaccgctccctccttaattccgcctctcatctcaccaagtcaccatccacccacctgctcgacccgcctccgtccgcctctctccattcaatcacgccatcgccacgcctcctccgcttctcagttctccctctctgcgcccacaagcgccaaatcattttcaccggaggccatggccccgctgcctccgggcccagagtctgtctgggactcaactgaactgtaaaatgctcctaaaggaggttgacaaacaaatacaaagctttatcacgaatcgctcccacccaaggtagcataatgagctcttgttctggattctgacgagggtaacttttatgatgacgattattttaccctcatgagaggctagggttatggtggtggtggttgttggttattgagattctagggcctccaaacatgcctagagaaacacctcttgctgggtgggaaatttttttgttacagcccggatgcaaactaggatttctacagcccctcacaaacaggagggtaggctcggcatgcagcagcagcaacaacaactagaacactatcccgtaacagctggtggacttgcacgtgggacctattctccagtttgtgaggggttgcaaagatccctgtttgcatgtggtctgcaaagaaaatttactgctgggcaaagtgggtcagcatcttggcgacggaatccggtgacagctcatcggaacctggcatcttcgatatcaaatgttatggtggtggctcgtattgagggagcgcaagggggtcagacgaggtcttgtccatgaccaatggaggtaatgagtggatggttgtggaagactgcgctcatggaagttcccagaaaacatcacagcccaccaaaatggtcagtcatactatggatgcttgtcacagccaacctctggataatgtgcagcagcagtacccagaagaaagttctcatgccagggttcagcgcctcggaaatggattacattgataacgatgggaagtttcttctctccaatggctatgtctttggctttggctttgccaccgtcagcgtgtcagacagcacatactacgttcttgcagtagtccacttgcccaccacttctattgtctggtctgctaatgctaactctccagtttctcattcagacaactttgtgtttgacaaggatggcaatgcctacctgcagtctggaggttccacggtgtggactgccaatatctccggcaagggggccacctctatgcagctgctagactcgggcaatcttgtagtgtttggcaaggacggctcttctcctctgtggcagagtttcagccatccaacagacacacttctgtctggacaaagcttcatcgaggggatgagtttgttgagccattccaatgcacagaacatgacctatacacttgagatcaaatctggggacatgttgttgtatgcaggctttcagttgccccaaccgtactggtccgctctgcaggataacagggtgatcatcgacaagaatggcaacaataacatatactctgcaaacctgagttcaggttcctggtcgttttatgatcaatcagggcttcttcaatcacagcttgtcattgcacagcagcagggtgatgctaacaccacactggctgctgtcctcggtaatgatggtttgattaacttctatatgctccagagtgtgaatggcaagagtgctcttcctatcacagttccacaggactcgtgtgacatgcctgcccactgcaagccgtactccatttgcaacagcgggacagggtgccagtgtccttcagccctcagctcctatgcaaactgcgaccctggcgtcatatcaccatgcaactcgaagaacaagtttcagcttgttcaactggacagtgctgttgggtatgtcggcactagattcacactgcctgtgcccaagacaaacctcacaggatgcaggaatgcctgcatgggtaactgctcatgcattgctgtattcttcgaccagacttcaggaaattgcttccttttcgaccagataggaagcttgcaacagaaagatggaggtaagagtagccttgcatctttcattaaggtatcaagcagtaatggcgggtcagggcaaggtggcagtagtgacaatggtaggctcaccatcgtaattgttgtcattatagttggaactttggctgtcataggggtccttgtgtatgttggtttctgcatttaccggaggagtcaccatacaccctcgcaggatggtggtggttcgtcagaagatgatggtttcctgcacactatatcaggagcaccgacacggttcacttacaggcagctccaggatgcgacaaacaacttctcagacaagcttggccagggagggtttggatctgtgtatcttggtacgctgcctgatggcagccgcatcgctgtaaagaagctagagggcatgggacaagggaagaaagaattccgttctgaggtgaccatcattggcagcatacatcacatccatcttgttaaactccgaggcttttgcgctgaaggagcgcacaggctccttgcatacgagtacatggcaaaggggtctctagatagatggattttccaaaggaacgaggattcctccctgcttgactgggacacgaggtttagcatcgcccttggaacagccaaggggttggcgtacctccaccatgactgtgagtcgaagatcattcactgtgacatcaagcctgagaatgttctccttgacgacaacttcctcgcgaaggtgtcagacttcggcctcgccaagctgatgaccagggagcagagccatgtgttcacgacgctcaagggcactcggggctatcttgcacccgaatggatcaccaactatgccatctcagagaagtgcgacgtgtacagctacgggatggttctcctcgagataatcagtgggaggaagagctatgatcctgtggaaggttcggagaaggctcacttcccctcctacgcttttaagaagctggaagaaggtgacctccgcgatatctccgactccaagctaaaatacaagggccaggatagccggattgagatggcaatcaaggtcgccttgtggtgcatccaggaggacttctatcagaggccgtccatgtccaaggttgtccagatgctggaaggcgtctgcgacgtgccccagccaccaatgtcttcgcatattggataccggctgtacgcgaatgccttcaaatctagcagcgaagagggcacgtcgtctgggatgtcagactacaatagtgatgccttgctttctgctgtgcggctctctgggcccaggtgatatggttatgtacattgctctgctttagttagcatggcgaatcgatgatgtccaatttttggggaaggccattcgtttgttcgtagtcatgacatatatgttgaaagcttgaggtgtttagttcgaattttctgaaatgccctaaatggggcacaatttcacaccttagaaaagtcagtttgcaatttcacaaaacaccaaaaaaaaatctatctcgaagctacgaccaggtgtatataccaggatttggaaattgcaatactggctgactttgat

SEQ ID NO: 82898 - DNA, 720 bp, Zea Mays
cctactccggtggagtccacctccactcctccagcgagtcaccactgggcactggccaccgccacctcggccccgctcctcacgttgtcatccgtccacactgcacccgctcctctccgtctccccaacagtttcattcctcgagggggatcgcttgtcggcggggaagcaaagcttagttcttgacgcccaacctccccgttgcctattcgcctcaggcacgtgactacatgctatacatatcattgctcgatgtgctcaaccggaatgatcaaatccctctgcaagcttacagcgagctctcgcttctgtttcagcatcacgaagatctgttagcggagctgtcgaagttcaggcccctcccatgcccaaacaacgtttatacacacggctcgatttggatgatcatattcctcatgccttttctgctcctgagccttgtcctcgccttgagaagccattgaagtgtttcctgctccatagactgttgcgagcctaaatgatttgtcgtagcactaacacctagttgttgtatatagatatatggatggggttctatatcctgtaatttctttatgatctccttgtacgctcgtgcgcacggaaataatcgtacaatattatttcagtcgcggcagtctggcagtatgtaaagcctaaacagagatcgtttgacctcgtccaatcggaaattcagctttgtacagagaatttttggtt

SEQ ID NO: 82899 - DNA, 382 bp, Zea Mays
ctccgctatttcggcacctactccggtggagtccacctccactcctccagcgagtcaccactgggcactggccaccgccacctcggccccgctcctcacgttgtcatccgtccacactgcacccgctcctctccgtctccccaacagtttcattcctcgagggggatcgcttgtcggcggggaagcaaagcttagttcttgacgcccaacctccccgttgcctattcgcctcaggaatttgggaattatgtctctttgaggggaatcaagggacttgcttttacttgtctgggctccatgtctaagtgggagccagtcacgtttcaggaatctcttagctttgttaagaaagtaaagtctccgtctggagatgagatctcct

SEQ ID NO: 82900 - DNA, 988 bp, Zea Mays
cctactccggtggagtccacctccactcctccagcgagtcaccactgggcactggccaccgccacctcggccccgctcctcacgttgtcatccgtccacactgcacccgctcctctccgtctccccaacagtttcattcctcgagggggatcgcttgtcggcggggaagcaaagcttagttcttgacgcccaacctccccgttgcctattcgcctcaggagctttgcctttcaattagtagaatggtcttgatcaggtttataagggaattaggcccgaaaactgtacaggcacgctgtttgtttgaaggaaaaccaggaaaaaactcaccacgtcaacccagatgacaaaccctggcaactcacatacacataaaggacacccaatggagcccaccaaacgtcatcattgccgagcttaccacaagcagcaataagaagctcttgcttcccactgtgaacatcagccaaggaccctgtcatgccaccgcaaactcacaacaagccttggcctcccaagaagtgatcgtggcatgtcatcattgttgagcttcgttgcaccaaaaatgaagcagctctgactccaccactgcagatcaccctctaggagagccaaagacgcaccacaagcaagcaacaaacccgaaagagctttacttcgtcgcaaattcaaaggcttgcagacaaatcgatgctaggcagacgggccaaaagcatgaggccgctacaggccatcgttgccatgctcaagcgcatcatgaagaacaactccaatttcctacctcgaacaaaaaacactccccctggcagctgcacaaacatcaatagaaaccccaagtcgtcgatgaaggagatttcatcctgtgttatcgttgccaagccatatcccttgacgcaacagctttgacttcacgctacaagaccaatccccacacgtcaagcatgcatggagaagtgaagggcaaccaccaaaggtgacatcaattgat

SEQ ID NO: 82901 - DNA, 4945 bp, Zea Mays
ccctgccatatattcccacagatttccaacacgaacacacacttccagctgcatcccacccgaaacgaggagccggagccacaggcacaaggcagcgccgccggccgctgccaattctcttcccgctgtcatgtacagctcctactccgccgcggcctttgcgctgagggccgcgaagccatccttgcacgcccattcctcctactcctatttctaccacccccctccccacctctgccattgcgacgacgccgacgagcaccgccaccataataaggtcgtcccgcggagcccgtacctcgccccacgcttcttgttcgacggctgcctgctccgccactcggcctacctgcttctttccgcgcagctccggctcctgccgccgccgccgcgcccgtatgcatcccgatgctgccgccggcgagcacccataggctgttgccgcgacggcggtggtgggagacagctggctggacaactctgttgtcatgttgaggcgcacaagtgccggtgctgtgggagtggcgctgggaggccggatcttggggcgatccgccggcgattgaaagcgcctgagtgccgctgcggcagttccggggatgggaccttgcttggagctggatgcgtacggcgggatgtgccgagattggtggggagggcgatgcggcaggaggtgtgggagtatgagggcggccagtggctgtacggaaggtcttcgacggaatgccttgattcggaggaggaagaagaggattgcggttatggtcaattggaggtaggtgggatgcatttcagtaggagatgggaagatggtaatgttgatgatggggatggtcattgtatggattgctgtcggaggaagggcatagaaaactattacagtggtgaggatgtgtacagtagccggcgtagagagaggagagatctgaatgagggccgtcatagtttcagagattctgaccggcgccagcgaagtgagtactatgatgatgaggatgatcttgacttggggcagcgaaagcagggatgggaagggagagatacgaggaattttgtacccaatgatgcagttgacacaaggagtgttgaaactagaaggtactgtgatgatggcagggaatataactgcataagagacaggaggaattttaactctgatgatgtggccaatgtcaggagggctggtcggtatgcagaggatataggaggatttgatcgtagaagagagagtagggattttgagatcgatgataaggttattgtgaggagagaaggcaggcgccatagaaatgaccacagatatgtttcacggcacccaagaagaagtgaagatacagatggagaggatgtttcactcttgagatcacgtcattggaatgacaaagagattggttacaatgagcaagatcttgctgacagaaggtactactctatggtgagatctcaaaagtctgcgggagcatcttcattgcatgaggatgattcaaagagggcttcaaattttaggagcacatttgatgctagacatacagggcagaaggagaattcagcctcaagtgtgaggtggcatgacaatgtaggtggacgaactgagcagatatctgaggagagggaccggcgacgttcagctggttggtcaaatgatgagagagagagatatgattacgatgatgcgcagtttgtgagagtaagaaattctaggataggaagacaagatgacaagtttataactgaggatgaaactagggttacatccagttcaaagaacacatccattttaaaacacggtagcaatgctgatcagcaggctgcagtacataaggatggttcaacgaagagctcacagaagataacggagatatcagaagtccacgataattccactgaacaagattcaagagcacagcgctatcatcaggaagatagagaaaactacactaagaatacgccatcttctgttcaaaattctgtgaagatggctagtgacagtagaagacaagttgatcagcataatgaggtgaatcagaacttggtctcagtcactgattcaaggaaaaactcagggaacctcaatgtaacaattgatagcagtcacaatgtcagcagggtctcacactcaatgagaaatcataatgaaataaaccagatggatattgatgacagttctacttccttacagaatataactcatgttataagagataagaagagcattgtaaaccaacaagtgatacatgaaacggatatagacgcgcagaatattacacatgtcgatatttcaaagatccatgctagtgatacttccacgtctaggagttcacaaagtcatttggaaactagatcagacatgaactcatcttccagtatgggtttcatcaatagaacaagaagccaggaaaaagaagggtatggaaatatgatctctgctaatgatagtggcatggttaggggttcacaaagtcatcttgagactggattgtatgatccatttcactcaaagccatcggctaatattactgacaacaaaagggaaagtcatgaacaagctgaacttaatattgccaatgctagtaatgctgctgcagccaacacttcaggcagtcatctccaaaccaaaacagattaccaatttcaatcgccttcagctgtagcaattgacagtatgaatgaacaaattgattttgctaagatccatgctattgatgctacagttagcagttcacaaggtcctgtgattagaaatgacaatcaagttcataaggcatcaactgtacattggtcaagtgagagacaaggcatgaatggtcggcaaattacacaagtttccaatacagaacgagatgatgaagcaagaagtatttttcctgaatcctctcaggatacacatcataacatggatttgatctggcagcaggcagacaccagtgggatctctgatgacaaaaatattactggtttgctcgtggagagcaccaaaaagggatttatgactaatgtggatatgggaaaacaagaagcaacaatgggtagctatgaccaagaagtaaggagtgaaattactgcaggaagtagtttaccaagtgattcaagtgccagacagtctgtcaaggaaagcatgctagaatcagctgctcgattagagaaatcatctacctttcttgttggacggtttgttgatgagctccaacagggagtctcagatccagatgctactttaacaaagaaaaatgggaaatccataatggaaggtataacaagctcttcatcaaggtctagaacaaaaggaccagcagatgaaatgtgggatgtccagagtactacttctgaagagaccttcaagacggccgacaaggaggaaggttcctcagctgatggagctactaattctgcctctcagacaccaaaaaatgaatctgttgttgctaggaaagttcacaagtcactctgggcttatgttgctgatataatccgtcttggatttattcaacatggtgactcccatgattctagtcacaaatcagttaagaaaagttcatctaataattctcagagcacagagggttggctttctagtcaggaacgtgataatgatggcacaaagaagaaaaatggaagtaccaacactctgggtggtggtgaacaagaatctggagtggcttcaatgtcaaatgaggaatatttgcacactgatacccatggtttgcagatatcagaaactgttgttgaacctcaagtaggtagatctgagggagacttgttgcctacaagttctacagatgatctacatatatcaggggggagaacaaagcaatctgatgcaggtgaattacgcaaaggaaatagcatagatgatagcactccaacttatctagatatcacgataggacatttacctgaacgcaaaactgcatccaggatcacaacagagggttctggtgagtttattactgggaaaggaatgttagctggcacatcttctgtgaccatcagtgcaatggaagctggtcgcagtgaagatggagctgattcgatatatgatccttcaggtgctataactccttatcatgattctcaaacgcaaacagtaatgccacatgagaatacctcaactggtatccttggaccaccagcgttacctgtgggagtttctacaaggtttgaagaaaagaatatcatgcaagaggccccagaaattattaaaacaggagggaaggatacagaattgaaaaggagaaattttcaaagaaataaacaagtattgaaggatacatttgatgaatgggaggaagcataccagcgggatgctgagcagagaaaagctgatgagttattcatgagagaagctttacttgaggcccagagagctgcagatatttgggaggtacccgttggtgcagtgttagtacagaatggcgaaattattgctcgtggttgtaatcttgtcgaagatcatagggattcaactgcgcatgctgaaattgtttgtataagagaagcttctaacaaactcaagacatggcgcctagcggctgttccctggggatggacaaacaagcactcttgattcaacaaaccagagccaggccgcagggcctgtccaccctttccatccgaagatagccatcaggcgtggtgtgctgtcggccgagtgctcagagataatgcagcagttcttccagctgaggaggaagaagaaaccacagtcaccaccgcaggcccaccgccatgggcaccatcatcctgtcaagttcttcagcaagatgcaccacatgttcggcacgatattctgtttataacttcgcctctctgttttattttagcttcctaaatttcgtattatggaagtgtgaaaaatgcatttctttctgtgcatctagtgtttttatacaggtaccagtttgtattgtgagatgtcatcgataattgcttagttccaatgtcgaaa

SEQ ID NO: 82902 - DNA, 969 bp, Zea Mays
tccccagctcagagtgcggcgcacattcaccacccaccaactctgtcttctgtacgttacgcccaagcaaccatggcggccgtcatgccagcgacaccaaccacgacgacggtgccgctgcccaactaccaggtgtccggcgcgggcgcagctgcagcagcgccgcggcacggcgcctctgggtcaggctcggtcggcgccttcttcggggtgctggccgcggtgctggtgctcaccgtgctctcctgtgtgtttggccgggtgtgcgccgcgcaggccgagggacccgacgagtcctacgactgcaccaggctagcgcgctggcggaggagcgcgcaccggcggcgaccggtgctgccagccgcggagacaaagcagccggctgcatcgcagccactgccgctgccgctgccggagccgtgaaacgtaaacctgtcaacctaaccgggcgctcagcggctcaagcagaaaacggcatacgagaggaggattaatagatggcgggaatcttcccttctcaagggggcagcaagacaatgcgccccgcgttgcaggagagtggcacggaaggcacccagacgggggaccccgccccagctcacgcaggacggctcggtttccgttgccttgcctctttccgacggcgaatcgtgggacgcggggagaaagaaggtgtggctccggctcgggaaaattcgaagctttggggaggaggagacggacgagagggggcgggggggaggtcaatggaaaatgcaagggagcaggcgccgggcgaggcgtgcaatgcaatgccgacgcgacgagaaggggaggggagcaggacgtgtgcgatgggtttggtagttggtggcctcctccccgagtccgtcatggtgatagctggatctgctgctgccgccgtgtcatatctccctcagatatgtctttcctcccttgtctttagtgttcgcctaatatattagtgcg

SEQ ID NO: 82903 - DNA, 1504 bp, Zea Mays
cggcatccgccgccctccttccccagctcagagtgcggcgcacattcaccacccaccaactctgtcttctgtacgttacgcccaagcaaccatggcggccgtcatgccagcgacaccaaccacgacgacggtgccgctgcccaactaccaggtgtccggcgcgggcgcagctgcagcagcgccgcggcacggcgcctctgggtcaggctcggtcggcgccttcttcggggtgctggccgcggtgctggtgctcaccgtgctctcctgtgtgtttggccgggtgtgcgccgcgcaggccgagggacccgacgagtcctacgactgcaccaggctagcgcgctggcggaggagcgcgcaccggcggcgaccggtgctgccagccgcggagacaaagcagccggctgcatcgcagccactgccgctgccgctgccggagccgtgaaacgtaaacctgtcaacctaaccgggcgctcagcggctcaagttagttgctttctttgcttcccttaaatcatctccagcagactcatacatgtattcaagctatactctacaagctctacaaacggtataatctatagtacaaaactgtggttttgatgatcatatgggtaaaccactgtacattgcacccacatggtcactaaatatatctattttacactgtatattgtactgtttgtagatagtattttgaatatgagtttggataagctactggagacggttgtaactgcagcaggttagtatggtatactaataatagaacggaaaggagtaagacaaatattgtaaatccatgtaatgttgatccttgagttctctctgtgtcactatttgaagtttatttacctcttggttcatttattcatctttcatacagtaagccttgattttatcttagttctatacaatttttttatttttttgccatgctggctcaccattaacagttgaatcaaatcaggatatgttgttttcacatagaaagtgttgttttctccaaaatacccattttcttccacttattaatcagtagtacagaagaataattttttcctaggaaaattgaataagaacaagtgtacgaaattttttggtgatggcacaaaggcacctttgtggcctccccatatttgaaaagtcatggaaacaaatattagaggccaatcttacattctatatcactcaattatgattctttccaaaataaagcatgaaagccactcaaacaagatgccttacattattgtttaaaatacagttgagagggggcaggcaaggggggtaaagaggaataaaaacaacgaaattctaccaatctggttacaagcatctatgatgtaagagaagcaggggggggggggggggaaacacagccttgaactgctaaaattgaactttacaacaggatctcttggcctccttgtgagttgtgacctatctaagcaatttgtagtcttgctctaccatcagcttccatgacagccatcatagaagcagc

SEQ ID NO: 82904 - DNA, 330 bp, Zea Mays
atgactagctggtcacccgacttgaaaatagtgtttcagctacttgcaaagatcaatctccagacctttgctccccagtttggagaaggaagcttcatgcagtggtggcaaaggtgtagtgaccagctgcggggtattgccaagaaagggtttaattctcttattacccttaggctatggactttatggaatcacaggaatggatgtgttttcgacaaaattcttcctaatttgggagcagctattagaaaagctgaggagagggatttgtgggtgctggctggggccaagaatttggatctcctaacagcccctatcccagggttgtag

SEQ ID NO: 82905 - DNA, 1473 bp, Zea Mays
ctgcttttcaggattttctttcccttgtacgtctacaggcagcaagaagatagtcggggtgttctacaaggccggggagtatgccgacaagaaccccaacttcgtcggctgcgtcgagggtgcactcggcatccgcggctggctcgagtcgcagggccatcagtacattgtcaccgatgacaaggaaggccccaactgtgaactggagaagcacattgaagacatgcatgtcctgattaccaccccattccacccagcttatgtcactgcagagaggataaagaaggcgaagaatcttgagcttcttctcacggcaggaatcggctccgatcatattgatcttccagcagctgctgctgcgggcttaactgtggctgaggtcactggaagcaacactgtctctgtggcagaagatgagctcttgcgcattctgattctgctcaggaacttcttgcctgggtaccaacaggtagttcaaggcgaatggaacgtagcaggcattgcccacagagcttatgatcttgaaggaaaaactgttgggactgttggggctggtcgtattggcaggctcttgcttcagcgtcttaagccctttaactgcaacctgctttaccatgacagacttcagattgacccagagcttgagaaagaaattggggccaaatttgaggaggacctggatgctatgcttccaaagtgtgatgtgattgtgatcaacacacctcttacggagaaaacaagaggcatgtttaacaaagagaggattgcaaagatgaagaaaggtgtaattgttgtaaataatgctcgaggagcaatcatggatgctcaagcagtcgcagatgcatgttctagcggtcacattgctggatacggtggtgatgtgtggttcccacagccagcaccaaaggatcacccctggcgctacatgcctaaccatgccatgacccctcacatctctgggactacaattgatgcgcagctgcggtatgcggatggtgtgagggacatgctggataggtatttcaagggcgaggacttcccggtgcagaactacatcgtcaaggaaggccagcttgccagtcagtaccagtgaccgcgcgagatgttgctgtgctgtgtaggcttttctggtgagaagctgcgaggaagaaactcctgttgcgtacttgcgttactgtatgagtagctctgagaaatctgtcagcggccacctgtaataaaagaatgccttgctggtatctcaccgtggagatcaataagtcccttttttttccttctctgtcactgaactgcatgcactgtcttttttcggctgtgacaacgcaaatggtaaccaactggagccatttgtcacatgtttgttttaacaagcacatggtaatgaaatcaggttgcactgtaaccagagatgggatcagagtgcctccggcggggtaacctgttttcaaagagagaaaaaaacctactcatcca

SEQ ID NO: 82906 - DNA, 1574 bp, Zea Mays
ggagtctttttatcggtcgtgcccgcagtcgactcgccgcccacttctgtagctgtagactgtagttctgttcctcttcctccccactcactcctgcgcttcctcgccgcgcggttccttctccctgatcctcctttggcttcgcggttcatggcgatgtggagggccgccgctaggcagctggccgacaagaaccccaacttcgtcggctgcgtcgagggtgcactcggcatccgcggctggctcgagtcgcagggccatcagtacattgtcaccgatgacaaggaaggccccaactgtgaactggagaagcacattgaagacatgcatgtcctgattaccaccccattccacccagcttatgtcactgcagagaggataaagaaggcgaagaatcttgagcttcttctcacggcaggaatcggctccgatcatattgatcttccagcagctgctgctgcgggcttaactgtggctgaggtcactggaagcaacactgtctctgtggcagaagatgagctcttgcgcattctgattctgctcaggaacttcttgcctgggtaccaacaggtagttcaaggcgaatggaacgtagcaggcattgcccacagagcttatgatcttgaaggaaaaactgttgggactgttggggctggtcgtattggcaggctcttgcttcagcgtcttaagccctttaactgcaacctgctttaccatgacagacttcagattgacccagagcttgagaaagaaattggggccaaatttgaggaggacctggatgctatgcttccaaagtgtgatgtgattgtgatcaacacacctcttacggagaaaacaagaggcatgtttaacaaagagaggattgcaaagatgaagaaaggtgtaattgttgtaaataatgctcgaggagcaatcatggatgctcaagcagtcgcagatgcatgttctagcggtcacattgctggatacggtggtgatgtgtggttcccacagccagcaccaaaggatcacccctggcgctacatgcctaaccatgccatgacccctcacatctctgggactacaattgatgcgcagctgcggtatgcggatggtgtgagggacatgctggataggtatttcaagggcgaggacttcccggtgcagaactacatcgtcaaggaaggccagcttgccagtcagtaccagtgaccgcgcgagatgttgctgtgctgtgtaggcttttctggtgagaagctgcgaggaagaaactcctgttgcgtacttgcgttactgtatgagtagctctgagaaatctgtcagcggccacctgtaataaaagaatgccttgctggtatctcaccgtggagatcaataagtcccttttttttccttctctgtcactgaactgcatgcactgtcttttttcggctgtgacaacgcaaatggtaaccaactggagccatttgtcacatgtttgttttaacaagcacatggtaatgaaatcaggttgcactgtaaccagagatgggatcagagtgcctccggcggggtaacctgttttcaaagagagaaaaaaacctactcatcca

SEQ ID NO: 82907 - DNA, 1651 bp, Zea Mays
ggagtctttttatcggtcgtgcccgcagtcgactcgccgcccacttctgtagctgtagactgtagttctgttcctcttcctccccactcactcctgcgcttcctcgccgcgcggttccttctccctgatcctcctttggcttcgcggttcatggcgatgtggagggccgccgctaggcagctggtcgaccgggcgctcggctcaagggccgcgcacgcagcaagaagatagtcggggtgttctacaaggccggggagtatgccgacaagaaccccaacttcgtcggctgcgtcgagggtgcactcggcatccgcggctggctcgagtcgcagggccatcagtacattgtcaccgatgacaaggaaggccccaactgtgaactggagaagcacattgaagacatgcatgtcctgattaccaccccattccacccagcttatgtcactgcagagaggataaagaaggcgaagaatcttgagcttcttctcacggcaggaatcggctccgatcatattgatcttccagcagctgctgctgcgggcttaactgtggctgaggtcactggaagcaacactgtctctgtggcagaagatgagctcttgcgcattctgattctgctcaggaacttcttgcctgggtaccaacaggtagttcaaggcgaatggaacgtagcaggcattgcccacagagcttatgatcttgaaggaaaaactgttgggactgttggggctggtcgtattggcaggctcttgcttcagcgtcttaagccctttaactgcaacctgctttaccatgacagacttcagattgacccagagcttgagaaagaaattggggccaaatttgaggaggacctggatgctatgcttccaaagtgtgatgtgattgtgatcaacacacctcttacggagaaaacaagaggcatgtttaacaaagagaggattgcaaagatgaagaaaggtgtaattgttgtaaataatgctcgaggagcaatcatggatgctcaagcagtcgcagatgcatgttctagcggtcacattgctggatacggtggtgatgtgtggttcccacagccagcaccaaaggatcacccctggcgctacatgcctaaccatgccatgacccctcacatctctgggactacaattgatgcgcagctgcggtatgcggatggtgtgagggacatgctggataggtatttcaagggcgaggacttcccggtgcagaactacatcgtcaaggaaggccagcttgccagtcagtaccagtgaccgcgcgagatgttgctgtgctgtgtaggcttttctggtgagaagctgcgaggaagaaactcctgttgcgtacttgcgttactgtatgagtagctctgagaaatctgtcagcggccacctgtaataaaagaatgccttgctggtatctcaccgtggagatcaataagtcccttttttttccttctctgtcactgaactgcatgcactgtcttttttcggctgtgacaacgcaaatggtaaccaactggagccatttgtcacatgtttgttttaacaagcacatggtaatgaaatcaggttgcactgtaaccagagatgggatcagagtgcctccggcggggtaacctgttttcaaagagagaaaaaaacctactcatcca

SEQ ID NO: 82908 - DNA, 1574 bp, Zea Mays
ggagtctttttatcggtcgtgcccgcagtcgactcgccgcccacttctgtagctgtagactgtagttctgttcctcttcctccccactcactcctgcgcttcctcgccgcgcggttccttctccctgatcctcctttggcttcgcggttcatggcgatgtggagggccgccgctaggcagctggtcgaccggaaccccaacttcgtcggctgcgtcgagggtgcactcggcatccgcggctggctcgagtcgcagggccatcagtacattgtcaccgatgacaaggaaggccccaactgtgaactggagaagcacattgaagacatgcatgtcctgattaccaccccattccacccagcttatgtcactgcagagaggataaagaaggcgaagaatcttgagcttcttctcacggcaggaatcggctccgatcatattgatcttccagcagctgctgctgcgggcttaactgtggctgaggtcactggaagcaacactgtctctgtggcagaagatgagctcttgcgcattctgattctgctcaggaacttcttgcctgggtaccaacaggtagttcaaggcgaatggaacgtagcaggcattgcccacagagcttatgatcttgaaggaaaaactgttgggactgttggggctggtcgtattggcaggctcttgcttcagcgtcttaagccctttaactgcaacctgctttaccatgacagacttcagattgacccagagcttgagaaagaaattggggccaaatttgaggaggacctggatgctatgcttccaaagtgtgatgtgattgtgatcaacacacctcttacggagaaaacaagaggcatgtttaacaaagagaggattgcaaagatgaagaaaggtgtaattgttgtaaataatgctcgaggagcaatcatggatgctcaagcagtcgcagatgcatgttctagcggtcacattgctggatacggtggtgatgtgtggttcccacagccagcaccaaaggatcacccctggcgctacatgcctaaccatgccatgacccctcacatctctgggactacaattgatgcgcagctgcggtatgcggatggtgtgagggacatgctggataggtatttcaagggcgaggacttcccggtgcagaactacatcgtcaaggaaggccagcttgccagtcagtaccagtgaccgcgcgagatgttgctgtgctgtgtaggcttttctggtgagaagctgcgaggaagaaactcctgttgcgtacttgcgttactgtatgagtagctctgagaaatctgtcagcggccacctgtaataaaagaatgccttgctggtatctcaccgtggagatcaataagtcccttttttttccttctctgtcactgaactgcatgcactgtcttttttcggctgtgacaacgcaaatggtaaccaactggagccatttgtcacatgtttgttttaacaagcacatggtaatgaaatcaggttgcactgtaaccagagatgggatcagagtgcctccggcggggtaacctgttttcaaagagagaaaaaaacctactcatcca

SEQ ID NO: 82909 - DNA, 1498 bp, Zea Mays
gtcagggtcccgttgggagtctttttatcggtcgtgcccgcagtcgactcgccgcccacttctgtagctgtagactgtagttctgttcctcttcctccccactcactcctgcgcttcctcgccgcgcggttccttctccctgatcctcctttggcttcgcggttcatggcgattcgcagggccatcagtacattgtcaccgatgacaaggaaggccccaactgtgaactggagaagcacattgaagacatgcatgtcctgattaccaccccattccacccagcttatgtcactgcagagaggataaagaaggcgaagaatcttgagcttcttctcacggcaggaatcggctccgatcatattgatcttccagcagctgctgctgcgggcttaactgtggctgaggtcactggaagcaacactgtctctgtggcagaagatgagctcttgcgcattctgattctgctcaggaacttcttgcctgggtaccaacaggtagttcaaggcgaatggaacgtagcaggcattgcccacagagcttatgatcttgaaggaaaaactgttgggactgttggggctggtcgtattggcaggctcttgcttcagcgtcttaagccctttaactgcaacctgctttaccatgacagacttcagattgacccagagcttgagaaagaaattggggccaaatttgaggaggacctggatgctatgcttccaaagtgtgatgtgattgtgatcaacacacctcttacggagaaaacaagaggcatgtttaacaaagagaggattgcaaagatgaagaaaggtgtaattgttgtaaataatgctcgaggagcaatcatggatgctcaagcagtcgcagatgcatgttctagcggtcacattgctggatacggtggtgatgtgtggttcccacagccagcaccaaaggatcacccctggcgctacatgcctaaccatgccatgacccctcacatctctgggactacaattgatgcgcagctgcggtatgcggatggtgtgagggacatgctggataggtatttcaagggcgaggacttcccggtgcagaactacatcgtcaaggaaggccagcttgccagtcagtaccagtgaccgcgcgagatgttgctgtgctgtgtaggcttttctggtgagaagctgcgaggaagaaactcctgttgcgtacttgcgttactgtatgagtagctctgagaaatctgtcagcggccacctgtaataaaagaatgccttgctggtatctcaccgtggagatcaataagtcccttttttttccttctctgtcactgaactgcatgcactgtcttttttcggctgtgacaacgcaaatggtaaccaactggagccatttgtcacatgtttgttttaacaagcacatggtaatgaaatcaggttgcactgtaaccagagatgggatcagagtgcctccggcggggtaacctgttttcaaagagagaaaaaaacctactcatcca

SEQ ID NO: 82910 - DNA, 819 bp, Zea Mays
atggtgactcagggagagagatacagatacctggacaaaattgggcacgtcttcttctccgcgaacctcgcgtcctcctcgccttccttcctacaagtctcctcccctccccatgcctccctcgggcctcgcttctcgtgctcttcctctcctgcccccgccagcctccaacaacccgcgagggcgccgtccgcccctgcctccgggagcgatgatgatcgcgcgacgcctgctctgatccaacaatgcccccgcccagtttctgtttctgcttggagccagctacttactttagcagtcgaggcaagcagcttattgaagcatgtaactggcaccgcaagtttgcaaggctatgcggatagcttgttggatgcgacagtcagacattttggttcagcaccgtctgctcagcctgaagaaaatgggtacacaggttcctatgtctatgacattaatgggaacaagtatctggactctcttgcaggattatggtgcacagctttagagcaatccaccacaaccacgacgcgaaggactccaagctacaatttctgcatcactaaaacaaaaaaacaacagtaatgcatccaagttctgaacctggaacactatgaagatgcaagggcttgctgcatatggatatttgttttgcatattggttatttatttaggatctagatcaccgatgactatgagtcatatgtaaatatatttttatcataccaaaagtgtctcgaacatatattatatatgaaactatggatcaacttcttgtaatgcaattattgatttttaatatatattattttttcttctttg

SEQ ID NO: 82911 - DNA, 1194 bp, Zea Mays
atggtgactcagggagagagatacagatacctggacaaaattgggcacgtcttcttctccgcgaacctcgcgtcctcctcgccttccttcctacaagtctcctcccctccccatgcctccctcgggcctcgcttctcgtgctcttcctctcctgcccccgccagcctccaacaacccgcgagggcgccgtccgcccctgcctccgggagcgatgatgatcgcgcgacgcctgctctgatccaacaatgcccccgcccaggcaagcagcttattgaagcatgtaactggcaccgcaagtttgcaaggctatgcggatagcttgttggatgcgacagtcagacattttggttcagcaccgtctgctcagcctgaagaaaatgggttcaagggccacggcatgctggcgccttttacagctggctggtagagcaatgatttgcaccctctgatcattgagagatctgaggttgtcactctgaatctgaactttacaccatagtttctgttacatctcttgaaatgcagtgttcagttgtggagaagtagattttaatctttacatttacagaatatatttcacagtctagcttatcaccattttgattatgcagggttcctatgtctatgacattaatgggaacaagtatctggactctcttgcaggattatggtgcacagctttaggtggtagcgagcctcgattagtcaaagcagcaactgagcaattaaacaaattacccttctaccattccttctagaaccgtacaacaaaaccttcgttggatcttgcgctggagatccttagcatgttcactgcaagggaaatggggaaagttttcttcacaaacaatggttcagaagcaaatgactctcagtgcagagcaatccaccacaaccacgacgcgaaggactccaagctacaatttctgcatcactaaaacaaaaaaacaacagtaatgcatccaagttctgaacctggaacactatgaagatgcaagggcttgctgcatatggatatttgttttgcatattggttatttatttaggatctagatcaccgatgactatgagtcatatgtaaatatatttttatcataccaaaagtgtctcgaacatatattatatatgaaactatggatcaacttcttgtaatgcaattattgatttttaatatatattattttttcttctttg

SEQ ID NO: 82912 - DNA, 2177 bp, Zea Mays
atggtgactcagggagagagatacagatacctggacaaaattgggcacgtcttcttctccgcgaacctcgcgtcctcctcgccttccttcctacaagtctcctcccctccccatgcctccctcgggcctcgcttctcgtgctcttcctctcctgcccccgccagcctccaacaacccgcgagggcgccgtccgcccctgcctccgggagcgatgatgatcgcgcgacgcctgctctgatccaacaatgcccccgcccagtttctgtttctgcttggagccagctacttactttagcagtcgaggcaagcagcttattgaagcatgtaactggcaccgcaagtttgcaaggctatgcggatagcttgttggatgcgacagtcagacattttggttcagcaccgtctgctcagcctgaagaaaatgggtacacaggttcctatgtctatgacattaatgggaacaagtatctggactctcttgcaggattatggtgcacagctttaggtggtagcgagcctcgattagtcaaagcagcaactgagcaattaaacaaattacccttctaccattccttctagaaccgtacaacaaaaccttcgttggatcttgcgctggagatccttagcatgttcactgcaagggaaatggggaaagttttcttcacaaacaatggttcagaagcaaatgactctcaggtgtccctattttacagcccctcagtaccatcaatggtgtttttttgccggacacgtaggagagttgagtaacattatattaagaagaataccatcaatggtggtgctgtcagcgttctttgcttttactgcagataactgaaagtgtttaaatactgatttttgcatcagcagctcatctttaaagaacttaaacacaaaaactgaaagtaaagttacatggtctttacacctcgctaaagaaatatgtctgtgctctctcattactggtaataaaatggttgttggttcatcgaccatggtattcatgtatccatcatagcccaatttctctttgaaatatacctagctagttggcagaccttgaagctttctattctagcattttagtatgttgtttttatttctctttgatatagacatggttttgtttctaataggtctattgctttcagagataatatgctcaacctttgcaaccctgagttgcatagaactaccctagttgagctctccaaggtccctcctgtgccttgtctgcagattataaatctcagcaacgaaagatttagcccgattttagctctagagagaattcttgcctgaattcttattagtgaaactctgcatcttgtggtatgatatgtttttctgggattaggatggttcggttttaatgctggctgcaggggctatcatataactaggtaattaaacaacatttcttcttgatcaaatctgggtgtgcaacgactgcactatttgaaatcttgcagattttaacatgagggtgcatggttatgttgtgcgattagatccatctatgaattgtttgtgcttctacatttaggaacaatgggcaattaggattttttatgtatgttttgaatgattcttaattgttgcagtaacagtgacaagataggttgtttaattatgtcctcattgcaatatcattggtaaagtaggcagtagtcataggatattctgtaccaaggttgctttttataggaattacttgaactaaataacaacaatgtatgatctgtctaggaataagattgtttatatcatattgtatacatgctgaaagtagcagcaagcaacagatttcctaaactatgttcccaagtagttcacatgtaattgtgtgttcttgaagtgcagagcaatccaccacaaccacgacgcgaaggactccaagctacaatttctgcatcactaaaacaaaaaaacaacagtaatgcatccaagttctgaacctggaacactatgaagatgcaagggcttgctgcatatggatatttgttttgcatattggttatttatttaggatctagatcaccgatgactatgagtcatatgtaaatatatttttatcataccaaaagtgtctcgaacatatattatatatgaaactatggatcaacttcttgtaatgcaattattgatttttaatatatattattttttcttctttg

SEQ ID NO: 82913 - DNA, 1189 bp, Zea Mays
atggtgactcagggagagagatacagatacctggacaaaattgggcacgtcttcttctccgcgaacctcgcgtcctcctcgccttccttcctacaagtctcctcccctccccatgcctccctcgggcctcgcttctcgtgctcttcctctcctgcccccgccagcctccaacaacccgcgagggcgccgtccgcccctgcctccgggagcgatgatgatcgcgcgacgcctgctctgatccaacaatgcccccgcccaggcaagcagcttattgaagcatgtaactggcaccgcaagtttgcaaggctatgcggatagcttgttggatgcgacagtcagacattttggttcagcaccgtctgctcagcctgaagaaaatgggttcaagggccacggcatgctggcgccttttacagctggctggtagagcaatgatttgcaccctctgatcattgagagatctgaggttgtcactctgaatctgaactttacaccatagtttctgttacatctcttgaaatgcagtgttcagttgtggagaagtagattttaatctttacatttacagaatatatttcacagtctagcttatcaccattttgattatgcagggttcctatgtctatgacattaatgggaacaagtatctggactctcttgcaggattatggtgcacagctttaggtggtagcgagcctcgattagtcaaagcagcaactgagcaattaaacaaattacccttctaccattccttctagaaccgtacaacaaaaccttcgttggatcttgcgctggagatccttagcatgttcactgcaagggaaatggggaaagttttcttcacaaacaatggttcagaagcaaatgactctcagagcaatccaccacaaccacgacgcgaaggactccaagctacaatttctgcatcactaaaacaaaaaaacaacagtaatgcatccaagttctgaacctggaacactatgaagatgcaagggcttgctgcatatggatatttgttttgcatattggttatttatttaggatctagatcaccgatgactatgagtcatatgtaaatatatttttatcataccaaaagtgtctcgaacatatattatatatgaaactatggatcaacttcttgtaatgcaattattgatttttaatatatattattttttcttctttg

SEQ ID NO: 82914 - DNA, 1010 bp, Zea Mays
atggtgactcagggagagagatacagatacctggacaaaattgggcacgtcttcttctccgcgaacctcgcgtcctcctcgccttccttcctacaagtctcctcccctccccatgcctccctcgggcctcgcttctcgtgctcttcctctcctgcccccgccagcctccaacaacccgcgagggcgccgtccgcccctgcctccgggagcgatgatgatcgcgcgacgcctgctctgatccaacaatgcccccgcccagtttctgtttctgcttggagccagctacttactttagcagtcgaggcaagcagcttattgaagcatgtaactggcaccgcaagtttgcaaggctatgcggatagcttgttggatgcgacagtcagacattttggttcagcaccgtctgctcagcctgaagaaaatgggtacacaggttcctatgtctatgacattaatgggaacaagtatctggactctcttgcaggattatggtgcacagctttaggtggtagcgagcctcgattagtcaaagcagcaactgagcaattaaacaaattacccttctaccattccttctagaaccgtacaacaaaaccttcgttggatcttgcgctggagatccttagcatgttcactgcaagggaaatggggaaagttttcttcacaaacaatggttcagaagcaaatgactctcagagcaatccaccacaaccacgacgcgaaggactccaagctacaatttctgcatcactaaaacaaaaaaacaacagtaatgcatccaagttctgaacctggaacactatgaagatgcaagggcttgctgcatatggatatttgttttgcatattggttatttatttaggatctagatcaccgatgactatgagtcatatgtaaatatatttttatcataccaaaagtgtctcgaacatatattatatatgaaactatggatcaacttcttgtaatgcaattattgatttttaatatatattattttttcttctttg

SEQ ID NO: 82915 - DNA, 2356 bp, Zea Mays
atggtgactcagggagagagatacagatacctggacaaaattgggcacgtcttcttctccgcgaacctcgcgtcctcctcgccttccttcctacaagtctcctcccctccccatgcctccctcgggcctcgcttctcgtgctcttcctctcctgcccccgccagcctccaacaacccgcgagggcgccgtccgcccctgcctccgggagcgatgatgatcgcgcgacgcctgctctgatccaacaatgcccccgcccaggcaagcagcttattgaagcatgtaactggcaccgcaagtttgcaaggctatgcggatagcttgttggatgcgacagtcagacattttggttcagcaccgtctgctcagcctgaagaaaatgggttcaagggccacggcatgctggcgccttttacagctggctggtagagcaatgatttgcaccctctgatcattgagagatctgaggttgtcactctgaatctgaactttacaccatagtttctgttacatctcttgaaatgcagtgttcagttgtggagaagtagattttaatctttacatttacagaatatatttcacagtctagcttatcaccattttgattatgcagggttcctatgtctatgacattaatgggaacaagtatctggactctcttgcaggattatggtgcacagctttaggtggtagcgagcctcgattagtcaaagcagcaactgagcaattaaacaaattacccttctaccattccttctagaaccgtacaacaaaaccttcgttggatcttgcgctggagatccttagcatgttcactgcaagggaaatggggaaagttttcttcacaaacaatggttcagaagcaaatgactctcaggtgtccctattttacagcccctcagtaccatcaatggtgtttttttgccggacacgtaggagagttgagtaacattatattaagaagaataccatcaatggtggtgctgtcagcgttctttgcttttactgcagataactgaaagtgtttaaatactgatttttgcatcagcagctcatctttaaagaacttaaacacaaaaactgaaagtaaagttacatggtctttacacctcgctaaagaaatatgtctgtgctctctcattactggtaataaaatggttgttggttcatcgaccatggtattcatgtatccatcatagcccaatttctctttgaaatatacctagctagttggcagaccttgaagctttctattctagcattttagtatgttgtttttatttctctttgatatagacatggttttgtttctaataggtctattgctttcagagataatatgctcaacctttgcaaccctgagttgcatagaactaccctagttgagctctccaaggtccctcctgtgccttgtctgcagattataaatctcagcaacgaaagatttagcccgattttagctctagagagaattcttgcctgaattcttattagtgaaactctgcatcttgtggtatgatatgtttttctgggattaggatggttcggttttaatgctggctgcaggggctatcatataactaggtaattaaacaacatttcttcttgatcaaatctgggtgtgcaacgactgcactatttgaaatcttgcagattttaacatgagggtgcatggttatgttgtgcgattagatccatctatgaattgtttgtgcttctacatttaggaacaatgggcaattaggattttttatgtatgttttgaatgattcttaattgttgcagtaacagtgacaagataggttgtttaattatgtcctcattgcaatatcattggtaaagtaggcagtagtcataggatattctgtaccaaggttgctttttataggaattacttgaactaaataacaacaatgtatgatctgtctaggaataagattgtttatatcatattgtatacatgctgaaagtagcagcaagcaacagatttcctaaactatgttcccaagtagttcacatgtaattgtgtgttcttgaagtgcagagcaatccaccacaaccacgacgcgaaggactccaagctacaatttctgcatcactaaaacaaaaaaacaacagtaatgcatccaagttctgaacctggaacactatgaagatgcaagggcttgctgcatatggatatttgttttgcatattggttatttatttaggatctagatcaccgatgactatgagtcatatgtaaatatatttttatcataccaaaagtgtctcgaacatatattatatatgaaactatggatcaacttcttgtaatgcaattattgatttttaatatatattattttttcttctttg

SEQ ID NO: 82916 - DNA, 1148 bp, Zea Mays
cacaccaatcaatcaccccagggtggtggcgtgcttcctctgtcgtccgatctgccgttatcagagcggagcatggtgactcagggagagagatacagatacctggacaaaattgggcacgtcttcttctccgcgaacctcgcgtcctcctcgccttccttcctacaagtctcctcccctccccatgcctccctcgggcctcgcttctcgtgctcttcctctcctgcccccgccagcctccaacaacccgcgagggcgccgtccgcccctgcctccgggagcgatgatgatcgcgcgacgcctgctctgatccaacaatgcccccgcccaggcaagcagcttattgaagcatgtaactggcaccgcaagtttgcaaggctatgcggatagcttgttggatgcgacagtcagacattttggttcagcaccgtctgctcagcctgaagaaaatgggtacacaggttcctatgtctatgacattaatgggaacaagtatctggactctcttgcaggattatggtgcacagctttaggtggtagcgagcctcgattagtcaaagcagcaactgagcaattaaacaaattacccttctaccattccttctagaaccgtacaacaaaaccttcgttggatcttgcgctggagatccttagcatgttcactgcaagggaaatggggaaagttttcttcacaaacaatggttcagaagcaaatgactctcagagcaatccaccacaaccacgacgcgaaggactccaagctacaatttctgcatcactaaaacaaaaaaacaacagtaatgcatccaagttgtgcaggcttggagctgaagtttgggagctgaaggcaaagaggcagggactatgtgcagaaataagaaataatgattagatcagtctaggatatacatgcttcccattttctgaacctggaacactatgaagatgcaagggcttgctgcatatggatatttgttttgcatattggttatttatttaggatctagatcaccgatgactatgagtcatatgtaaatatatttttatcataccaaaagtgtctcgaacatatattatatatgaaactatggatcaacttcttgtaatgcaattattgatttttaatatatattattttttcttctttg

SEQ ID NO: 82917 - DNA, 1054 bp, Zea Mays
gaactaactagctaaccacaccaatcaatcaccccagggtggtggcgtgcttcctctgtcgtccgatctgccgttatcagagcggagcatggtgactcagggagagagatacagatacctggacaaaattgggcacgtcttcttctccgcgaacctcgcgtcctcctcgccttccttcctacaagtctcctcccctccccatgcctccctcgggcctcgcttctcgtgctcttcctctcctgcccccgccagcctccaacaacccgcgagggcgccgtccgcccctgcctccgggagcgatgatgatcgcgcgacgcctgctctgatccaacaatgcccccgcccaggcaagcagcttattgaagcatgtaactggcaccgcaagtttgcaaggctatgcggatagcttgttggatgcgacagtcagacattttggttcagcaccgtctgctcagcctgaagaaaatgggtacacaggttcctatgtctatgacattaatgggaacaagtatctggactctcttgcaggattatggtgcacagctttaggtggtagcgagcctcgattagtcaaagcagcaactgagcaattaaacaaattacccttctaccattccttctagaaccgtacaacaaaaccttcgttggatcttgcgctggagatccttagcatgttcactgcaagggaaatggggaaagttttcttcacaaacaatggttcagaagcaaatgactctcagagcaatccaccacaaccacgacgcgaaggactccaagctacaatttctgcatcactaaaacaaaaaaacaacagtaatgcatccaagttctgaacctggaacactatgaagatgcaagggcttgctgcatatggatatttgttttgcatattggttatttatttaggatctagatcaccgatgactatgagtcatatgtaaatatatttttatcataccaaaagtgtctcgaacatatattatatatgaaactatggatcaacttcttgtaatgcaattattgatttttaatatatattattttttcttctttg

SEQ ID NO: 82918 - DNA, 252 bp, Zea Mays
ttactgagaaagtttgggttgcacagtttaacccctgagccggggcatatttccttcctggactggtgggaggagtctgctgagcaagtccatgggatggttaagaaaggtctgaactcacttataatcttgggggcctggatgatctggaaccatcaaaaccgatgtgttttttatggtctggctcctagtcttccctccatccttgcgcagtctgatgaggagagaagaaaatgggagcttgccggggtc

SEQ ID NO: 82919 - DNA, 485 bp, Zea Mays
caataaccaccttaaattcaaagaccaacttatcatctccaaattgtgtattatcacaattaatattagtttgcattatgtagcaatgctcatgactcatgagccaccaacatatatatactgtaacacagaacatacaaaatcttctagaaaggtattatattgaacacttcaataaattgatggtgtacttaagctattttcgttccttttggcagctcatacgaagtttgaggtttgtagtcatattctacgtatcgacggcgcaacttcttcaaggaaacgatgtcctacaaaattaaatgaaactctagtatcaagcaaagaacaatataagggctttaagtctgtagtccaacttatataagtattgcattggttagtgaatatggataacattagaagtagagtacctcagaattatcatgcacataaagaacaaggattttgcaatcacattcttctcctgaattatgtgttttcct

SEQ ID NO: 82920 - DNA, 1545 bp, Zea Mays
cagtcggcctcgctactttcctaagtggaaaaagggttctctccggccatttccttgagtcgttccgccgccactcgaccaccaccgccatggcggcgccgacgccgaccacaaccactcgcagagactaccgcctccgcccccgctgcttctcgtctccacgcagctgtccgatggccaagcgactcgccggcatcgacaaagaggtgctcgtcgaggtggtgaggttcacgcataagagcggactgaggggctgtgacggtggctggaaggatttcctggcccggaacgatagaaagtttggcgcgtcggtgagcgacccgaggaagcgctccagggacgtgctgttcgccttcctgcaaaccttccccaaggatttccagaagaaacacttgatgccactagtccgacgagagccaccggaaggcaacgcaggcattcctcagtccccaaagtgagctgctgggcagctgctcatcaccaacacaattctaacccccagcagtttcaggcgattggcatacgaatcgcaaagacgctgcatgccttctatcagttctgccgaccacacacaatatttggaaccgcattacttcggtgtctctcctaccagtgaaagagcctggacgattttatgttgatagctatatggggatttctcgaggctttggccgccgcattatgtatgaacgtttatgtagtagggctgaacaaggtcaataagccaaccctcccattagcgtcaggagagttttcagtgccaactccagtattgttagtagtggcattcttggtcatggtgtctggtcatggcttgcttgcctccacactctggcaaagagcacaacaatttgacattgagaataaggattgtatcacacaattttatatgttcatttggaagttattctacgccgagtattttcttataccatttgtgtagtaaagaatcatgcgaagaacaacacccctgctatagacatgtgaaggtttattgctaatgttactctaccgaatggtctgaatgtctatgcgtcatttgaatgtaatatgactatttgttgtatcagggtaacaactggagcaaatgtaccatgtatattaagtattaatttaactgcatcatttgtaccatgtatattatgactatgtatgagatattgtctcttattattactggatgtgatgtgtcttattttgactatggatgagacttttgtgatgtaattgatgagactatggatttaaatattgttatgtgattgtgtgtgagatattttatgtgaaaatatgttgtgctatattgttgatatatttgttatgttgtggaatatggtgtaaaataaaaataaacaacatttgtaatgctggtcaaattaacttcctagaggcttattggaccataggaagttagccagctaacttcctaggggctacagacagccgtagaaagttagccagctaacttcctagggctacagtcagccgtaggaagttagtcgtaggaagttagtcagctgacggcgctaacggcgtgaagctact

SEQ ID NO: 82921 - DNA, 1688 bp, Zea Mays
cagtcggcctcgctactttcctaagtggaaaaagggttctctccggccatttccttgagtcgttccgccgccactcgaccaccaccgccatggcggcgccgacgccgaccacaaccactcgcagagactaccgcctccgcccccgctgcttctcgtctccacgcagctgtccgatggccaagcgactcgccggcatcgacaaagaggtagggggcggcacgccaacagagcagcccacccagaccgggcaggccgcctcgttgcgctcacccatttggtcagcgccaggtgctcgtcgaggtggtgaggttcacgcataagagcggactgaggggctgtgacggtggctggaaggatttcctggcccggaacgatagaaagtttggcgcgtcggtgagcgacccgaggaagcgctccagggacgtgctgttcgccttcctgcaaaccttccccaaggatttccagaagaaacacttgatgccactagtccgacgagagccaccggaaggcaacgcaggcattcctcagtccccaaagtgagctgctgggcagctgctcatcaccaacacaattctaacccccagcagtttcaggcgattggcatacgaatcgcaaagacgctgcatgccttctatcagttctgccgaccacacacaatatttggaaccataataggcattacttcggtgtctctcctaccagtgaaagagcctggacgattttatgttgatagctatatggggatttctcgaggtataaatgctttggccgccgcattatgtatgaacgtttatgtagtagggctgaacaaggtcaataagccaaccctcccattagcgtcaggagagttttcagtgccaactccagtattgttagtagtggcattcttggtcatggtaatgttatatgtttcacacagagatctacgaaccatctattctggtgtctggtcatggcttgcttgcctccacactctggcaaagagcacaacaatttgacattgagaataaggattgtatcacacaattttatatgttcatttggaagttattctacgccgagtattttcttataccatttgtgtagtaaagaatcatgcgaagaacaacacccctgctatagacatgtgaaggtttattgctaatgttactctaccgaatggtctgaatgtctatgcgtcatttgaatgtaatatgactatttgttgtatcagggtaacaactggagcaaatgtaccatgtatattaagtattaatttaactgcatcatttgtaccatgtatattatgactatgtatgagatattgtctcttattattactggatgtgatgtgtcttattttgactatggatgagacttttgtgatgtaattgatgagactatggatttaaatattgttatgtgattgtgtgtgagatattttatgtgaaaatatgttgtgctatattgttgatatatttgttatgttgtggaatatggtgtaaaataaaaataaacaacatttgtaatgctggtcaaattaacttcctagaggcttattggaccataggaagttagccagctaacttcctaggggctacagacagccgtagaaagttagccagctaacttcctagggctacagtcagccgtaggaagttagtcgtaggaagttagtcagctgacggcgctaacggcgtgaagctact

SEQ ID NO: 82922 - DNA, 1278 bp, Zea Mays
cagtcggcctcgctactttcctaagtggaaaaagggttctctccggccatttccttgagtcgttccgccgccactcgaccaccaccgccatggcggcgccgacgccgaccacaaccactcgcagagactaccgcctccgcccccgctgcttctcgtctccacgcagctgtccgatggccaagcgactcgccggcatcgacaaagaggtgctcgtcgaggtggtgaggttcacgcataagagcggactgaggggctgtgacggtggctggaaggatttcctggcccggaacgatagaaagtttggcgcgtcggtgagcgacccgaggaagcgctccagggacgtgctgttcgccttcctgcaaaccttccccaaggatttccagaagaaacacttgatgccactagtccgacgagagccaccggaaggcaacgcaggcattcctcagtccccaaaataataggcattacttcggtgtctctcctaccagtgaaagagcctggacgattttatgttgatagctatatggggatttctcgaggctttggccgccgcattatgtatgaacgtttatgtagtagggctgaacaagagatctacgaaccatctattctggtgtctggtcatggcttgcttgcctccacactctggcaaagagcacaacaatttgacattgagaataaggattgtatcacacaattttatatgttcatttggaagttattctacgccgagtattttcttataccatttgtgtagtaaagaatcatgcgaagaacaacacccctgctatagacatgtgaagggtaacaactggagcaaatgtaccatgtatattaagtattaatttaactgcatcatttgtaccatgtatattatgactatgtatgagatattgtctcttattattactggatgtgatgtgtcttattttgactatggatgagacttttgtgatgtaattgatgagactatggatttaaatattgttatgtgattgtgtgtgagatattttatgtgaaaatatgttgtgctatattgttgatatatttgttatgttgtggaatatggtgtaaaataaaaataaacaacatttgtaatgctggtcaaattaacttcctagaggcttattggaccataggaagttagccagctaacttcctaggggctacagacagccgtagaaagttagccagctaacttcctagggctacagtcagccgtaggaagttagtcgtaggaagttagtcagctgacggcgctaacggcgtgaagctact

SEQ ID NO: 82923 - DNA, 1502 bp, Zea Mays
cagtcggcctcgctactttcctaagtggaaaaagggttctctccggccatttccttgagtcgttccgccgccactcgaccaccaccgccatggcggcgccgacgccgaccacaaccactcgcagagactaccgcctccgcccccgctgcttctcgtctccacgcagctgtccgatggccaagcgactcgccggcatcgacaaagaggtagggggcggcacgccaacagagcagcccacccagaccgggcaggccgcctcgttgcgctcacccatttggtcagcgccaggtgctcgtcgaggtggtgaggttcacgcataagagcggactgaggggctgtgacggtggctggaaggatttcctggcccggaacgatagaaagtttggcgcgtcggtgagcgacccgaggaagcgctccagggacgtgctgttcgccttcctgcaaaccttccccaaggatttccagaagaaacacttgatgccactagtccgacgagagccaccggaaggcaacgcaggcattcctcagtccccaaaataataggcattacttcggtgtctctcctaccagtgaaagagcctggacgattttatgttgatagctatatggggatttctcgaggctttggccgccgcattatgtatgaacgtttatgtagtagggctgaacaaggtcaataagccaaccctcccattagcgtcaggagagttttcagtgccaactccagtattgttagtagtggcattcttggtcatggtgtctggtcatggcttgcttgcctccacactctggcaaagagcacaacaatttgacattgagaataaggattgtatcacacaattttatatgttcatttggaagttattctacgccgagtattttcttataccatttgtgtagtaaagaatcatgcgaagaacaacacccctgctatagacatgtgaaggtttattgctaatgttactctaccgaatggtctgaatgtctatgcgtcatttgaatgtaatatgactatttgttgtatcagggtaacaactggagcaaatgtaccatgtatattaagtattaatttaactgcatcatttgtaccatgtatattatgactatgtatgagatattgtctcttattattactggatgtgatgtgtcttattttgactatggatgagacttttgtgatgtaattgatgagactatggatttaaatattgttatgtgattgtgtgtgagatattttatgtgaaaatatgttgtgctatattgttgatatatttgttatgttgtggaatatggtgtaaaataaaaataaacaacatttgtaatgctggtcaaattaacttcctagaggcttattggaccataggaagttagccagctaacttcctaggggctacagacagccgtagaaagttagccagctaacttcctagggctacagtcagccgtaggaagttagtcgtaggaagttagtcagctgacggcgctaacggcgtgaagctact

SEQ ID NO: 82924 - DNA, 1552 bp, Zea Mays
cagtcggcctcgctactttcctaagtggaaaaagggttctctccggccatttccttgagtcgttccgccgccactcgaccaccaccgccatggcggcgccgacgccgaccacaaccactcgcagagactaccgcctccgcccccgctgcttctcgtctccacgcagctgtccgatggccaagcgactcgccggcatcgacaaagaggtgctcgtcgaggtggtgaggttcacgcataagagcggactgaggggctgtgacggtggctggaaggatttcctggcccggaacgatagaaagtttggcgcgtcggtgagcgacccgaggaagcgctccagggacgtgctgttcgccttcctgcaaaccttccccaaggatttccagaagaaacacttgatgccactagtccgacgagagccaccggaaggcaacgcaggcattcctcagtccccaaagtgagctgctgggcagctgctcatcaccaacacaattctaacccccagcagtttcaggcgattggcatacgaatcgcaaagacgctgcatgccttctatcagttctgccgaccacacacaatatttggaaccataataggcattacttcggtgtctctcctaccagtgaaagagcctggacgattttatgttgatagctatatggggatttctcgaggctttggccgccgcattatgtatgaacgtttatgtagtagggctgaacaaggtcaataagccaaccctcccattagcgtcaggagagttttcagtgccaactccagtattgttagtagtggcattcttggtcatggtgtctggtcatggcttgcttgcctccacactctggcaaagagcacaacaatttgacattgagaataaggattgtatcacacaattttatatgttcatttggaagttattctacgccgagtattttcttataccatttgtgtagtaaagaatcatgcgaagaacaacacccctgctatagacatgtgaaggtttattgctaatgttactctaccgaatggtctgaatgtctatgcgtcatttgaatgtaatatgactatttgttgtatcagggtaacaactggagcaaatgtaccatgtatattaagtattaatttaactgcatcatttgtaccatgtatattatgactatgtatgagatattgtctcttattattactggatgtgatgtgtcttattttgactatggatgagacttttgtgatgtaattgatgagactatggatttaaatattgttatgtgattgtgtgtgagatattttatgtgaaaatatgttgtgctatattgttgatatatttgttatgttgtggaatatggtgtaaaataaaaataaacaacatttgtaatgctggtcaaattaacttcctagaggcttattggaccataggaagttagccagctaacttcctaggggctacagacagccgtagaaagttagccagctaacttcctagggctacagtcagccgtaggaagttagtcgtaggaagttagtcagctgacggcgctaacggcgtgaagctact

SEQ ID NO: 82925 - DNA, 1603 bp, Zea Mays
cagtcggcctcgctactttcctaagtggaaaaagggttctctccggccatttccttgagtcgttccgccgccactcgaccaccaccgccatggcggcgccgacgccgaccacaaccactcgcagagactaccgcctccgcccccgctgcttctcgtctccacgcagctgtccgatggccaagcgactcgccggcatcgacaaagaggtgctcgtcgaggtggtgaggttcacgcataagagcggactgaggggctgtgacggtggctggaaggatttcctggcccggaacgatagaaagtttggcgcgtcggtgagcgacccgaggaagcgctccagggacgtgctgttcgccttcctgcaaaccttccccaaggatttccagaagaaacacttgatgccactagtccgacgagagccaccggaaggcaacgcaggcattcctcagtccccaaagtgagctgctgggcagctgctcatcaccaacacaattctaacccccagcagtttcaggcgattggcatacgaatcgcaaagacgctgcatgccttctatcagttctgccgaccacacacaatatttggaaccataataggcattacttcggtgtctctcctaccagtgaaagagcctggacgattttatgttgatagctatatggggatttctcgagagtttcggataaccttttgaaggtcaataagccaaccctcccattagcgtcaggagagttttcagtgccaactccagtattgttagtagtggcattcttggtcatggtaatgttatatgtttcacacagagatctacgaaccatctattctggtatccctcatggtcttatattttatatgttcaggtgtctggtcatggcttgcttgcctccacactctggcaaagagcacaacaatttgacattgagaataaggattgtatcacacaattttatatgttcatttggaagttattctacgccgagtattttcttataccatttgtgtagtaaagaatcatgcgaagaacaacacccctgctatagacatgtgaaggtttattgctaatgttactctaccgaatggtctgaatgtctatgcgtcatttgaatgtaatatgactatttgttgtatcagggtaacaactggagcaaatgtaccatgtatattaagtattaatttaactgcatcatttgtaccatgtatattatgactatgtatgagatattgtctcttattattactggatgtgatgtgtcttattttgactatggatgagacttttgtgatgtaattgatgagactatggatttaaatattgttatgtgattgtgtgtgagatattttatgtgaaaatatgttgtgctatattgttgatatatttgttatgttgtggaatatggtgtaaaataaaaataaacaacatttgtaatgctggtcaaattaacttcctagaggcttattggaccataggaagttagccagctaacttcctaggggctacagacagccgtagaaagttagccagctaacttcctagggctacagtcagccgtaggaagttagtcgtaggaagttagtcagctgacggcgctaacggcgtgaagctact

SEQ ID NO: 82926 - DNA, 1492 bp, Zea Mays
cagtcggcctcgctactttcctaagtggaaaaagggttctctccggccatttccttgagtcgttccgccgccactcgaccaccaccgccatggcggcgccgacgccgaccacaaccactcgcagagactaccgcctccgcccccgctgcttctcgtctccacgcagctgtccgatggccaagcgactcgccggcatcgacaaagaggtagggggcggcacgccaacagagcagcccacccagaccgggcaggccgcctcgttgcgctcacccatttggtcagcgccaggtgctcgtcgaggtggtgaggttcacgcataagagcggactgaggggctgtgacggtggctggaaggatttcctggcccggaacgatagaaagtttggcgcgtcggtgagcgacccgaggaagcgctccagggacgtgctgttcgccttcctgcaaaccttccccaaggatttccagaagaaacacttgatgccactagtccgacgagagccaccggaaggcaacgcaggcattcctcagtccccaaagtgagctgctgggcagctgctcatcaccaacacaattctaacccccagcagtttcaggcgattggcatacgaatcgcaaagacgctgcatgccttctatcagttctgccgaccacacacaatatttggaaccgcattacttcggtgtctctcctaccagtgaaagagcctggacgattttatgttgatagctatatggggatttctcgaggtgtctggtcatggcttgcttgcctccacactctggcaaagagcacaacaatttgacattgagaataaggattgtatcacacaattttatatgttcatttggaagttattctacgccgagtattttcttataccatttgtgtagtaaagaatcatgcgaagaacaacacccctgctatagacatgtgaaggtttattgctaatgttactctaccgaatggtctgaatgtctatgcgtcatttgaatgtaatatgactatttgttgtatcagggtaacaactggagcaaatgtaccatgtatattaagtattaatttaactgcatcatttgtaccatgtatattatgactatgtatgagatattgtctcttattattactggatgtgatgtgtcttattttgactatggatgagacttttgtgatgtaattgatgagactatggatttaaatattgttatgtgattgtgtgtgagatattttatgtgaaaatatgttgtgctatattgttgatatatttgttatgttgtggaatatggtgtaaaataaaaataaacaacatttgtaatgctggtcaaattaacttcctagaggcttattggaccataggaagttagccagctaacttcctaggggctacagacagccgtagaaagttagccagctaacttcctagggctacagtcagccgtaggaagttagtcgtaggaagttagtcagctgacggcgctaacggcgtgaagctact

SEQ ID NO: 82927 - DNA, 2253 bp, Zea Mays
cttatcatgtaacattatggtggctgatgtccataacgatcttcgagatctgaaattcattgctgatccagcagaagaggatgctggaaaagtaattctggagatgcttcggcattctgaagtatccgaacaaacggagcttcagactttccttgaagcagcttccaaactgaacattacatcacctaaagctgtcctaattgaaagaagagcaatcaagaaactacttgccaagatcaatggcactgatcataaaaaggaaggaatccttaagtacctcctatatcttgttaggaaatatgggaagaatgtcaagccagagactgatgaaaagaatcaaaatctgaatgtggcaactgaagttttgagtttagactctgttgttaatgtcatcaatactgcagaaatatgcatttcagctacagagtctgccaatatgatatatgatggtcagagtagtttatctggagcaaccacaccacctcaagagctctgctgcccattgtctttgaagctgatgcgagatcctgtgataataacatctgggcaaacatatgaaagagaaaatatcgagagatggttcagtgagggatatgatacttgtcctaggacaaatatgaagttaaagaacttcacggtaactccaaatacatgcatgaaggctgttattcataactggctcaaagatcatgagcttgaatctactgatttgcctaagcaatttcagaattattattctgtatcaagtttgcacaatatctctgcacctctaattatagaaaagaatagagactacacagttgattatagcagctcatcttttggactatcaggtgctagttatatatcatcccccatgagggaaacagagcagtcaaagactagttttgaccagttttattctaatgccaatttccagttgtatttgtccttctgcaactttgacaaggcaatgttcttgggtttctttcatgagctatccgagcttccctttgaactgcaaagaaaagctgtcagagatttgaagacttctctgagcggtgaaaatgaaatttggcattctatggtctacaatgggttttttgaagcattccatgaattcctcaagaatgacagtggaattcacacactgcaagctcgaagggctgggattcagttttttcttgctttcctttctagtggcagggctcgaattccttcagtttgtgaagatgtggtacttctgattgcatcactacatgattccgagttcaaacaggaggctcttctgattgtacatgaactgcttcaggaaccaagctgtccaaaatctagtctcatggcctccattctttctccttcagtgtttggagctttggacagtggagaaaccaagtgcctggacctcgctctgcagatcatctgcaagatttcatctgataatgatataaaatcttaccttctttcgtccggaatagtgtcgaggttatctccgctccttggtgaaggaaagatgacagaatgctctttgaagattctacggaacttgagtgacgtgaaagagaccgcagggtttataatcagaacaggtaattgcgtcagctccatttcagatcatctggacactggaagccacagcgaacgtgaacatgcggtggtcatccttctaggggtatgctcccacagtcctgaggtttgttcactttccatgaaggaaggcgtcatcccagcccttgtagacttatcagtgagtggaaccaaggtggcaagggattgctcggtcaagttgcttcagcttctgaggaacttcaggcgatgtgaccagttcagcagttcatgctcaagagagcttgctgtcgatcatgtttcagagaacactcgcaatggttcaatttgcatgcagccgatatcaaagtcagcccggtatatttcaagaaagctcaaccttttctcaaaacctcggtcgctgaccctggcttgagaaatggaaggggtcggttggatcgagccctattccgcagcgctaactgccagatgtacagatagtagcaggtagcgttcgtcgagatgaaatgtttgtgggaggctttttaaaactcaccatgtatttcaagagtttttattagttttttttggattttctttactggcgctacaaacagtagatgtatgactgttcgagctggaaacctgtgcgctttttatcgtagcattgtcttgtttacttccaccataacaactgaaagttgcaaccttcgctaccggaacaagctg

SEQ ID NO: 82928 - DNA, 2386 bp, Zea Mays
cccagatctagcgcagtccactccgacactgccctccgtccgtcgtcctctccgctctggggctctgagcctctgacctaggccgccgtccccgccgcgcatgccaccgtctccgccatgcaggccgttgtccttgccgtcatccacgccatgtggctgatgtccataacgatcttcgagatctgaaattcattgctgatccagcagaagaggatgctggaaaagtaattctggagatgcttcggcattctgaagtatccgaacaaacggagcttcagactttccttgaagcagcttccaaactgaacattacatcacctaaagctgtcctaattgaaagaagagcaatcaagaaactacttgccaagatcaatggcactgatcataaaaaggaaggaatccttaagtacctcctatatcttgttaggaaatatgggaagaatgtcaagccagagactgatgaaaagaatcaaaatctgaatgtggcaactgaagttttgagtttagactctgttgttaatgtcatcaatactgcagaaatatgcatttcagctacagagtctgccaatatgatatatgatggtcagagtagtttatctggagcaaccacaccacctcaagagctctgctgcccattgtctttgaagctgatgcgagatcctgtgataataacatctgggcaaacatatgaaagagaaaatatcgagagatggttcagtgagggatatgatacttgtcctaggacaaatatgaagttaaagaacttcacggtaactccaaatacatgcatgaaggctgttattcataactggctcaaagatcatgagcttgaatctactgatttgcctaagcaatttcagaattattattctgtatcaagtttgcacaatatctctgcacctctaattatagaaaagaatagagactacacagttgattatagcagctcatcttttggactatcaggtgctagttatatatcatcccccatgagggaaacagagcagtcaaagactagttttgaccagttttattctaatgccaatttccagttgtatttgtccttctgcaactttgacaaggcaatgttcttgggtttctttcatgagctatccgagcttccctttgaactgcaaagaaaagctgtcagagatttgaagacttctctgagcggtgaaaatgaaatttggcattctatggtctacaatgggttttttgaagcattccatgaattcctcaagaatgacagtggaattcacacactgcaagctcgaagggctgggattcagttttttcttgctttcctttctagtggcagggctcgaattccttcagtttgtgaagatgtggtacttctgattgcatcactacatgattccgagttcaaacaggaggctcttctgattgtacatgaactgcttcaggaaccaagctgtccaaaatctagtctcatggcctccattctttctccttcagtgtttggagctttggacagtggagaaaccaagtgcctggacctcgctctgcagatcatctgcaagatttcatctgataatgatataaaatcttaccttctttcgtccggaatagtgtcgaggttatctccgctccttggtgaaggaaagatgacagaatgctctttgaagattctacggaacttgagtgacgtgaaagagaccgcagggtttataatcagaacaggtaattgcgtcagctccatttcagatcatctggacactggaagccacagcgaacgtgaacatgcggtggtcatccttctaggggtatgctcccacagtcctgaggtttgttcactttccatgaaggaaggcgtcatcccagcccttgtagacttatcagtgagtggaaccaaggtggcaagggattgctcggtcaagttgcttcagcttctgaggaacttcaggcgatgtgaccagttcagcagttcatgctcaagagagcttgctgtcgatcatgtttcagagaacactcgcaatggttcaatttgcatgcagccgatatcaaagtcagcccggtatatttcaagaaagctcaaccttttctcaaaacctcggtcgctgaccctggcttgagaaatggaaggggtcggttggatcgagccctattccgcagcgctaactgccagatgtacagatagtagcaggtagcgttcgtcgagatgaaatgtttgtgggaggctttttaaaactcaccatgtatttcaagagtttttattagttttttttggattttctttactggcgctacaaacagtagatgtatgactgttcgagctggaaacctgtgcgctttttatcgtagcattgtcttgtttacttccaccataacaactgaaagttgcaaccttcgctaccggaacaagctg

SEQ ID NO: 82929 - DNA, 2768 bp, Zea Mays
caacggtccaaccgagtgagagtgaaaagcttccagttttcgtctacacgcagtgcagcagcggccatcgttagtgacctttgcctttccccatgcgtgctgccctcccctcccatctcgctgtttcccttctgaaatcccgagaaaaagaggatcgagccaggaatctgcaagcttcttccttgcttcagagtttgagaatcttgtggttgcttcttccctctgtgaatggagaaaaataatgatgaagcaatgggtacaccacgacacaacgctcatccgaaggtttcctctattcttccatcaatagaagatgctcaaccaggatgcaaagcaggtgtagatgaactatgcaacctatacaacatagttgacaaagggaaactcataatacagaattgcgttgaatgtagcagcctttacctggctattactagtgaagcgactacaatgcgatgtgaaaggataaggaactcattgcgacggagcttgttcctaatacagaacatggttgaacaattgttagctgatgaggtggctgatgtccataacgatcttcgagatctgaaattcattgctgatccagcagaagaggatgctggaaaagtaattctggagatgcttcggcattctgaagtatccgaacaaacggagcttcagactttccttgaagcagcttccaaactgaacattacatcacctaaagctgtcctaattgaaagaagagcaatcaagaaactacttgccaagatcaatggcactgatcataaaaaggaaggaatccttaagtacctcctatatcttgttaggaaatatgggaagaatgtcaagccagagactgatgaaaagaatcaaaatctgaatgtggcaactgaagttttgagtttagactctgttgttaatgtcatcaatactgcagaaatatgcatttcagctacagagtctgccaatatgatatatgatggtcagagtagtttatctggagcaaccacaccacctcaagagctctgctgcccattgtctttgaagctgatgcgagatcctgtgataataacatctgggcaaacatatgaaagagaaaatatcgagagatggttcagtgagggatatgatacttgtcctaggacaaatatgaagttaaagaacttcacggtaactccaaatacatgcatgaaggctgttattcataactggctcaaagatcatgagcttgaatctactgatttgcctaagcaatttcagaattattattctgtatcaagtttgcacaatatctctgcacctctaattatagaaaagaatagagactacacagttgattatagcagctcatcttttggactatcaggtgctagttatatatcatcccccatgagggaaacagagcagtcaaagactagttttgaccagttttattctaatgccaatttccagttgtatttgtccttctgcaactttgacaaggcaatgttcttgggtttctttcatgagctatccgagcttccctttgaactgcaaagaaaagctgtcagagatttgaagacttctctgagcggtgaaaatgaaatttggcattctatggtctacaatgggttttttgaagcattccatgaattcctcaagaatgacagtggaattcacacactgcaagctcgaagggctgggattcagttttttcttgctttcctttctagtggcagggctcgaattccttcagtttgtgaagatgtggtacttctgattgcatcactacatgattccgagttcaaacaggaggctcttctgattgtacatgaactgcttcaggaaccaagctgtccaaaatctagtctcatggcctccattctttctccttcagtgtttggagctttggacagtggagaaaccaagtgcctggacctcgctctgcagatcatctgcaagatttcatctgataatgatataaaatcttaccttctttcgtccggaatagtgtcgaggttatctccgctccttggtgaaggaaagatgacagaatgctctttgaagattctacggaacttgagtgacgtgaaagagaccgcagggtttataatcagaacaggtaattgcgtcagctccatttcagatcatctggacactggaagccacagcgaacgtgaacatgcggtggtcatccttctaggggtatgctcccacagtcctgaggtttgttcactttccatgaaggaaggcgtcatcccagcccttgtagacttatcagtgagtggaaccaaggtggcaagggattgctcggtcaagttgcttcagcttctgaggaacttcaggcgatgtgaccagttcagcagttcatgctcaagagagcttgctgtcgatcatgtttcagagaacactcgcaatggttcaatttgcatgcagccgatatcaaagtcagcccggtatatttcaagaaagctcaaccttttctcaaaacctcggtcgctgaccctggcttgagaaatggaaggggtcggttggatcgagccctattccgcagcgctaactgccagatgtacagatagtagcaggtagcgttcgtcgagatgaaatgtttgtgggaggctttttaaaactcaccatgtatttcaagagtttttattagttttttttggattttctttactggcgctacaaacagtagatgtatgactgttcgagctggaaacctgtgcgctttttatcgtagcattgtcttgtttacttccaccataacaactgaaagttgcaaccttcgctaccggaacaagctg

SEQ ID NO: 82930 - DNA, 1091 bp, Zea Mays
caccaatggttcatcagagtaataagccaagtacaaagccctattggcctgcaggttcatgtagtggacgtagaagaggcattgctggggttttggaggcaaacttcataagacctacacatgataagcaagattttgagaggacgggtcttttccaaagacttgagacacgattgaaagacatggcaaaagagtattggacttaccattgtcatatggttggttacactcgggtcatgaaaaagcctcctccagcacattatgtatcaactattgctgagaagggtgatgataacttagcagctcagtctaccacaaagacttatggttacaattcaagagccagggtaccggtagcattgcagccttgttccaatgcatataacacacaagatcctatgcatgctgatgttggtgtcgtgatggatcaaatgaactatggtgcatgcccttcaatgactataaatgtggggacaacattacattcactaagatatgcaccacaacaatctcaatctgaactatgcaaacgaagaaagtcttcggagattcactggagatctcaaaaaaagcagaacaccaatatttattcggataaacctgaaagcgatagtggaacagagatggcagagttcagagttgtacttgactcgtccaccatgctaaaggctgagtgctctgaacttgaggcagcaggaaagcagctggcctctaaggcagataaattgaggatagaactcgatgtgtggcagcggatgtaccagggcctaagtgacaaattgcgatcctacgatgggcttcaaaggttgcgttgcagtcgccattgcagcagctccagtattgggttcatatgagctaagagaagcaattccagcgttggattcacaatcaagttagaaatggcattagtccctcaaagtctatcttttcgtgactgtagatctggcagtatattatttgttagacctagtaagggtttttggggctagtccccttgtaattaactgcataccctgtgtaaggcagacccatctatacttagtctattaatacaactcctaaccctagttagggctagtttttccattctc

SEQ ID NO: 82931 - DNA, 3104 bp, Zea Mays
ccccactccccagcaagtctctaccaccatctcttctgctactgcaactgagaaccccagcaactgaaaaccccattctccgcggagcagccccattgtagattaagcaatgctagtagacattgttgatctttccagtgatgatgacgaggtggctgttacagaagaacacagtgttgatggaaaaggtgtttatgcgaaggcaaatttttttgacttaactattgacgatggcattcttgaaggagagcatattgcttacgaacaagaacaaggagattctgctcagggcacatcattttataaacaagagttcattgcagatgatggacaagctgaagctgcccagtgcatagtaacattagagttgcaaaatcttggagcagatggtggatgctatgcttctcaatgcacagagacattgttggtgcaacaacttagaagaaatgatggacaaaatgatgctgcccactccacaggaacactaccgatacaagaacttagaacagatggtggacaacacgatgcggcccagtgcacaacaagtctacatatgcaagagcttagagcaactgatgtacaaggtgatgctgcctgtttcacaccaacattacagaggcaagaacatacagcagggaatgaacaaggtgacactgtccagtacacaacaacacaacagggtcaggaatctattgcagatgacacacgaggtgattttactcactgcacaacagcactgcaatggcaaggatctcataaagctcagtgcacaacaacattactaaggcaggagtttctagcagcaggtgatagaatgcaagatgctgcactgttgagaaattcagctgaagctaccacatccttgacaagtacacaacaagggagacacatgagaactgaattattcaatgtgtcaactgcaacaccatttccccggcaattttggaaagctggagagaaagctggagactatggattagcttctcaagctgatctcaacaatgaccacaaccgcttacagattcaccccaagtttcttcattctaatgctacttcacataaatggccattcggtgatatagacaagctagtgttggaactgattaatttctgttatacagctattgcagaactgctcgacaacgctattgatgaggtgagcagtggggcaacctttgtgaaaattgataagatgaagcattctcctaagggggattattcattggtaatagaagataatggcggcggcatgagtccaaaatctctacgacaatgtatgagctttggattttcccagaaaagcacaacttcatccatcgggcaatatggaaatggcttcaaaactagcacgatgaggcttggggcagatgctattgtattcacatgcactaaagatgataggagattgacacgaagtatcgggttgctgtcttacacattccttatgagaagtaactgcaatgacatatttgtaccagtggttgattatgaattggatgccttgtcttcaactttcaagaggaaaatgaactgcggtgaaaaacattttttatctaatcttttcactattttgaagtggtctccattttcgacagaagatgaattattgaatcaacaatatggagtgccatggcacaaaaatcattgtattcaacttgtggttgaatgatgcattggaaatggagcttgactttataactgataaagaggatattttggtctcaggagcaccggaaatacgagcagggcggaatacagtggaaagcttgacacagatgcatgtagcaaaccgtttccgatattcgcttcgggtgtatgcatctatactatacctacatgtacctgaaaactttcaaatcatcttgtgtggacgagctgttgaaccacattatgttgtcaatgatctcatataccgtgaatgtatcatatatcgaccacatgttcaagtaaccacagaggttgatgtcattactacaattggctacttaaaaggtgctccacgacttgatatctatggatttagtgtctaccataagaaccgtcttatactgccctattggcctgcaggttcatgtagtggacgtagaagaggcattgctggggttttggaggcaaacttcataagacctacacatgataagcaagattttgagaggacgggtcttttccaaagacttgagacacgattgaaagacatggcaaaagagtattggacttaccattgtcatatggttggttacactcgggtcatgaaaaagcctcctccagcacattatgtatcaactattgctgagaagggtgatgataacttagcagctcagtctaccacaaagacttatggttacaattcaagagccagggtaccggtagcattgcagccttgttccaatgcatataacacacaagatcctatgcatgctgatgttggtgtcgtgatggatcaaatgaactatggtgcatgcccttcaatgactataaatgtggggacaacattacattcactaagatatgcaccacaacaatctcaatctgaactatgcaaacgaagaaagtcttcggagattcactggagatctcaaaaaaagcagaacaccaatatttattcggataaacctgaaagcgatagtggaacagagatggcagagttcagagttgtacttgactcgtccaccatgctaaaggctgagtgctctgaacttgaggcagcaggaaagcagctggcctctaaggcagataaattgaggatagaactcgatgtgtggcagcggatgtaccagggcctaagtgacaaattgcgatcctacgatgggcttcaaaggttgcgttgcagtcgccattgcagcagctccagtattgggttcatatgagctaagagaagcaattccagcgttggattcacaatcaagttagaaatggcattagtccctcaaagtctatcttttcgtgactgtagatctggcagtatattatttgttagacctagtaagggtttttggggctagtccccttgtaattaactgcataccctgtgtaaggcagacccatctatacttagtctattaatacaactcctaaccctagttagggctagtttttccattctc

SEQ ID NO: 82932 - DNA, 3233 bp, Zea Mays
agcaaactttccagtttcccttgattctctctcttcgaaaactaaaagcaaactttccggtttcccttgattttctctcttcgaaaactaaagagcatcgaaactgaaacatcagagcaaaacccccttctccccactccccagcaagtctctaccaccatctcttctgctactgcaactgagaaccccagcaactgaaaaccccattctccgcggagcagccccattattaagcaatgctagtagacattgttgatctttccagtgatgatgacgaggtggctgttacagaagaacacagtgttgatggaaaaggtgtttatgcgaaggcaaatttttttgacttaactattgacgatggcattcttgaaggagagcatattgcttacgaacaagaacaaggagattctgctcagggcacatcattttataaacaagagttcattgcagatgatggacaagctgaagctgcccagtgcatagtaacattagagttgcaaaatcttggagcagatggtggatgctatgcttctcaatgcacagagacattgttggtgcaacaacttagaagaaatgatggacaaaatgatgctgcccactccacaggaacactaccgatacaagaacttagaacagatggtggacaacacgatgcggcccagtgcacaacaagtctacatatgcaagagcttagagcaactgatgtacaaggtgatgctgcctgtttcacaccaacattacagaggcaagaacatacagcagggaatgaacaaggtgacactgtccagtacacaacaacacaacagggtcaggaatctattgcagatgacacacgaggtgattttactcactgcacaacagcactgcaatggcaaggatctcataaagctcagtgcacaacaacattactaaggcaggagtttctagcagcaggtgatagaatgcaagatgctgcactgttgagaaattcagctgaagctaccacatccttgacaagtacacaacaagggagacacatgagaactgaattattcaatgtgtcaactgcaacaccatttccccggcaattttggaaagctggagagaaagctggagactatggattagcttctcaagctgatctcaacaatgaccacaaccgcttacagattcaccccaagtttcttcattctaatgctacttcacataaatggccattcggtgatatagacaagctagtgttggaactgattaatttctgttatacagctattgcagaactgctcgacaacgctattgatgaggtgagcagtggggcaacctttgtgaaaattgataagatgaagcattctcctaagggggattattcattggtaatagaagataatggcggcggcatgagtccaaaatctctacgacaatgtatgagctttggattttcccagaaaagcacaacttcatccatcgggcaatatggaaatggcttcaaaactagcacgatgaggcttggggcagatgctattgtattcacatgcactaaagatgataggagattgacacgaagtatcgggttgctgtcttacacattccttatgagaagtaactgcaatgacatatttgtaccagtggttgattatgaattggatgccttgtcttcaactttcaagaggaaaatgaactgcggtgaaaaacattttttatctaatcttttcactattttgaagtggtctccattttcgacagaagatgaattattgaatcaattcagcaatatggagtgccatggcacaaaaatcattgtattcaacttgtggttgaatgatgcattggaaatggagcttgactttataactgataaagaggatattttggtctcaggagcaccggaaatacgagcagggcggaatacagtggaaagcttgacacagatgcatgtagcaaaccgtttccgatattcgcttcgggtgtatgcatctatactatacctacatgtacctgaaaactttcaaatcatcttgtgtggacgagctgttgaaccacattatgttgtcaatgatctcatataccgtgaatgtatcatatatcgaccacatgttcaagtaaccacagagccaggttgatgtcattactacaattggctacttaaaaggtgctccacgacttgatatctatggatttagtgtctaccataagaaccgtcttatactgccctattggcctgcaggttcatgtagtggacgtagaagaggcattgctggggttttggaggcaaacttcataagacctacacatgataagcaagattttgagaggacgggtcttttccaaagacttgagacacgattgaaagacatggcaaaagagtattggacttaccattgtcatatggttggttacactcgggtcatgaaaaagcctcctccagcacattatgtatcaactattgctgagaagggtgatgataacttagcagctcagtctaccacaaagacttatggttacaattcaagagccagggtaccggtagcattgcagccttgttccaatgcatataacacacaagatcctatgcatgctgatgttggtgtcgtgatggatcaaatgaactatggtgcatgcccttcaatgactataaatgtggggacaacattacattcactaagatatgcaccacaacaatctcaatctgaactatgcaaacgaagaaagtcttcggagattcactggagatctcaaaaaaagcagaacaccaatatttattcggataaacctgaaagcgatagtggaacagagagttcagagttgtacttgactcgtccaccatgctaaaggctgagtgctctgaacttgaggcagcaggaaagcagctggcctctaaggcagataaattgaggatagaactcgatgtgtggcagcggatgtaccagggcctaagtgacaaattgcgatcctacgatgggcttcaaaggttgcgttgcagtcgccattgcagcagctccagtattgggttcatatgagctaagagaagcaattccagcgttggattcacaatcaagttagaaatggcattagtccctcaaagtctatcttttcgtgactgtagatctggcagtatattatttgttagacctagtaagggtttttggggctagtccccttgtaattaactgcataccctgtgtaaggcagacccatctatacttagtctattaatacaactcctaaccctagttagggctagtttttccattctc

SEQ ID NO: 82933 - DNA, 3192 bp, Zea Mays
agcaaactttccagtttcccttgattctctctcttcgaaaactaaaagcaaactttccggtttcccttgattttctctcttcgaaaactaaagagcatcgaaactgaaacatcagagcaaaacccccttctccccactccccagcaagtctctaccaccatctcttctgctactgcaactgagaaccccagcaactgaaaaccccattctccgcggagcagccccattgtagattaagcaatgctagtagacattgttgatctttccagtgatgatgacgaggtggctgttacagaagaacacagtgttgatggaaaaggtgtttatgcgaaggcaaatttttttgacttaactattgacgatggcattcttgaaggagagcatattgcttacgaacaagaacaaggagattctgctcagggcacatcattttataaacaagagttcattgcagatgatggacaagctgaagctgcccagtgcatagtaacattagagttgcaaaatcttggagcagatggtggatgctatgcttctcaatgcacagagacattgttggtgcaacaacttagaagaaatgatggacaaaatgatgctgcccactccacaggaacactaccgatacaagaacttagaacagatggtggacaacacgatgcggcccagtgcacaacaagtctacatatgcaagagcttagagcaactgatgtacaaggtgatgctgcctgtttcacaccaacattacagaggcaagaacatacagcagggaatgaacaaggtgacactgtccagtacacaacaacacaacagggtcaggaatctattgcagatgacacacgaggtgattttactcactgcacaacagcactgcaatggcaaggatctcataaagctcagtgcacaacaacattactaaggcaggagtttctagcagcaggtgatagaatgcaagatgctgcactgttgagaaattcagctgaagctaccacatccttgacaagtacacaacaagggagacacatgagaactgaattattcaatgtgtcaactgcaacaccatttccccggcaattttggaaagctggagagaaagctggagactatggattagcttctcaagctgatctcaacaatgaccacaaccgcttacagattcaccccaagtttcttcattctaatgctacttcacataaatggccattcgctattgcagaactgctcgacaacgctattgatgaggtgagcagtggggcaacctttgtgaaaattgataagatgaagcattctcctaagggggattattcattggtaatagaagataatggcggcggcatgagtccaaaatctctacgacaatgtatgagctttggattttcccagaaaagcacaacttcatccatcgggcaatatggaaatggcttcaaaactagcacgatgaggcttggggcagatgctattgtattcacatgcactaaagatgataggagattgacacgaagtatcgggttgctgtcttacacattccttatgagaagtaactgcaatgacatatttgtaccagtggttgattatgaattggatgccttgtcttcaactttcaagaggaaaatgaactgcggtgaaaaacattttttatctaatcttttcactattttgaagtggtctccattttcgacagaagatgaattattgaatcaattcagcaatatggagtgccatggcacaaaaatcattgtattcaacttgtggttgaatgatgcattggaaatggagcttgactttataactgataaagaggatattttggtctcaggagcaccggaaatacgagcagggcggaatacagtggaaagcttgacacagatgcatgtagcaaaccgtttccgatattcgcttcgggtgtatgcatctatactatacctacatgtacctgaaaactttcaaatcatcttgtgtggacgagctgttgaaccacattatgttgtcaatgatctcatataccgtgaatgtatcatatatcgaccacatgttcaagtaaccacagaggttgatgtcattactacaattggctacttaaaaggtgctccacgacttgatatctatggatttagtgtctaccataagaaccgtcttatactgccctattggcctgcaggttcatgtagtggacgtagaagaggcattgctggggttttggaggcaaacttcataagacctacacatgataagcaagattttgagaggacgggtcttttccaaagacttgagacacgattgaaagacatggcaaaagagtattggacttaccattgtcatatggttggttacactcgggtcatgaaaaagcctcctccagcacattatgtatcaactattgctgagaagggtgatgataacttagcagctcagtctaccacaaagacttatggttacaattcaagagccagggtaccggtagcattgcagccttgttccaatgcatataacacacaagatcctatgcatgctgatgttggtgtcgtgatggatcaaatgaactatggtgcatgcccttcaatgactataaatgtggggacaacattacattcactaagatatgcaccacaacaatctcaatctgaactatgcaaacgaagaaagtcttcggagattcactggagatctcaaaaaaagcagaacaccaatatttattcggataaacctgaaagcgatagtggaacagagatggcagagttcagagttgtacttgactcgtccaccatgctaaaggctgagtgctctgaacttgaggcagcaggaaagcagctggcctctaaggcagataaattgaggatagaactcgatgtgtggcagcggatgtaccagggcctaagtgacaaattgcgatcctacgatgggcttcaaaggttgcgttgcagtcgccattgcagcagctccagtattgggttcatatgagctaagagaagcaattccagcgttggattcacaatcaagttagaaatggcattagtccctcaaagtctatcttttcgtgactgtagatctggcagtatattatttgttagacctagtaagggtttttggggctagtccccttgtaattaactgcataccctgtgtaaggcagacccatctatacttagtctattaatacaactcctaaccctagttagggctagtttttccattctc

SEQ ID NO: 82934 - DNA, 3204 bp, Zea Mays
agcaaacaaagcaaactttccagtttcccttgattctctctcttcgaaaactaaaagcaaactttccggtttcccttgattttctctcttcgaaaactaaagagcatcgaaactgaaacatcagagcaaaacccccttctccccactccccagcaagtctctaccaccatctcttctgctactgcaactgagaaccccagcaactgaaaaccccattctccgcggagcagccccattgtagattaagcaatgctagtagacattgttgatctttccagtgatgatgacgaggtggctgttacagaagaacacagtgttgatggaaaaggtgtttatgcgaaggcaaatttttttgacttaactattgacgatggcattcttgaaggagagcatattgcttacgaacaagaacaaggagattctgctcagggcacatcattttataaacaagagttcattgcagatgatggacaagctgaagctgcccagtgcatagtaacattagagttgcaaaatcttggagcagatggtggatgctatgcttctcaatgcacagagacattgttggtgcaacaacttagaagaaatgatggacaaaatgatgctgcccactccacaggaacactaccgatacaagaacttagaacagatggtggacaacacgatgcggcccagtgcacaacaagtctacatatgcaagagcttagagcaactgatgtacaaggtgatgctgcctgtttcacaccaacattacagaggcaagaacatacagcagggaatgaacaaggtgacactgtccagtacacaacaacacaacagggtcaggaatctattgcagatgacacacgaggtgattttactcactgcacaacagcactgcaatggcaaggatctcataaagctcagtgcacaacaacattactaaggcaggagtttctagcagcaggtgatagaatgcaagatgctgcactgttgagaaattcagctgaagctaccacatccttgacaagtacacaacaagggagacacatgagaactgaattattcaatgtgtcaactgcaacaccatttccccggcaattttggaaagctggagagaaagctggagactatggattagcttctcaagctgatctcaacaatgaccacaaccgcttacagattcaccccaagtttcttcattctaatgctacttcacataaatggccattcggtgctattgcagaactgctcgacaacgctattgatgaggtgagcagtggggcaacctttgtgaaaattgataagatgaagcattctcctaagggggattattcattggtaatagaagataatggcggcggcatgagtccaaaatctctacgacaatgtatgagctttggattttcccagaaaagcacaacttcatccatcgggcaatatggaaatggcttcaaaactagcacgatgaggcttggggcagatgctattgtattcacatgcactaaagatgataggagattgacacgaagtatcgggttgctgtcttacacattccttatgagaagtaactgcaatgacatatttgtaccagtggttgattatgaattggatgccttgtcttcaactttcaagaggaaaatgaactgcggtgaaaaacattttttatctaatcttttcactattttgaagtggtctccattttcgacagaagatgaattattgaatcaattcagcaatatggagtgccatggcacaaaaatcattgtattcaacttgtggttgaatgatgcattggaaatggagcttgactttataactgataaagaggatattttggtctcaggagcaccggaaatacgagcagggcggaatacagtggaaagcttgacacagatgcatgtagcaaaccgtttccgatattcgcttcgggtgtatgcatctatactatacctacatgtacctgaaaactttcaaatcatcttgtgtggacgagctgttgaaccacattatgttgtcaatgatctcatataccgtgaatgtatcatatatcgaccacatgttcaagtaaccacagaggttgatgtcattactacaattggctacttaaaaggtgctccacgacttgatatctatggatttagtgtctaccataagaaccgtcttatactgccctattggcctgcaggttcatgtagtggacgtagaagaggcattgctggggttttggaggcaaacttcataagacctacacatgataagcaagattttgagaggacgggtcttttccaaagacttgagacacgattgaaagacatggcaaaagagtattggacttaccattgtcatatggttggttacactcgggtcatgaaaaagcctcctccagcacattatgtatcaactattgctgagaagggtgatgataacttagcagctcagtctaccacaaagacttatggttacaattcaagagccagggtaccggtagcattgcagccttgttccaatgcatataacacacaagatcctatgcatgctgatgttggtgtcgtgatggatcaaatgaactatggtgcatgcccttcaatgactataaatgtggggacaacattacattcactaagatatgcaccacaacaatctcaatctgaactatgcaaacgaagaaagtcttcggagattcactggagatctcaaaaaaagcagaacaccaatatttattcggataaacctgaaagcgatagtggaacagagatggcagagttcagagttgtacttgactcgtccaccatgctaaaggctgagtgctctgaacttgaggcagcaggaaagcagctggcctctaaggcagataaattgaggatagaactcgatgtgtggcagcggatgtaccagggcctaagtgacaaattgcgatcctacgatgggcttcaaaggttgcgttgcagtcgccattgcagcagctccagtattgggttcatatgagctaagagaagcaattccagcgttggattcacaatcaagttagaaatggcattagtccctcaaagtctatcttttcgtgactgtagatctggcagtatattatttgttagacctagtaagggtttttggggctagtccccttgtaattaactgcataccctgtgtaaggcagacccatctatacttagtctattaatacaactcctaaccctagttagggctagtttttccattctc

SEQ ID NO: 82935 - DNA, 3245 bp, Zea Mays
ccggtttttacaccgcccatcaaccacgcaatatgggatttccacagcaaacaaagcaaactttccagtttcccttgattctctctcttcgaaaactaaaagcaaactttccggtttcccttgattttctctcttcgaaaactaaagagcatcgaaactgaaacatcagagcaaaacccccttctccccactccccagcaagtctctaccaccatctcttctgctactgcaactgagaaccccagcaactgaaaaccccattctccgcggagcagccccattattaagcaatgctagtagacattgttgatctttccagtgatgatgacgaggtggctgttacagaagaacacagtgttgatggaaaaggtgtttatgcgaaggcaaatttttttgacttaactattgacgatggcattcttgaaggagagcatattgcttacgaacaagaacaaggagattctgctcagggcacatcattttataaacaagagttcattgcagatgatggacaagctgaagctgcccagtgcatagtaacattagagttgcaaaatcttggagcagatggtggatgctatgcttctcaatgcacagagacattgttggtgcaacaacttagaagaaatgatggacaaaatgatgctgcccactccacaggaacactaccgatacaagaacttagaacagatggtggacaacacgatgcggcccagtgcacaacaagtctacatatgcaagagcttagagcaactgatgtacaaggtgatgctgcctgtttcacaccaacattacagaggcaagaacatacagcagggaatgaacaaggtgacactgtccagtacacaacaacacaacagggtcaggaatctattgcagatgacacacgaggtgattttactcactgcacaacagcactgcaatggcaaggatctcataaagctcagtgcacaacaacattactaaggcaggagtttctagcagcaggtgatagaatgcaagatgctgcactgttgagaaattcagctgaagctaccacatccttgacaagtacacaacaagggagacacatgagaactgaattattcaatgtgtcaactgcaacaccatttccccggcaattttggaaagctggagagaaagctggagactatggattagcttctcaagctgatctcaacaatgaccacaaccgcttacagattcaccccaagtttcttcattctaatgctacttcacataaatggccattcggtgctattgcagaactgctcgacaacgctattgatgaggtgagcagtggggcaacctttgtgaaaattgataagatgaagcattctcctaagggggattattcattggtaatagaagataatggcggcggcatgagtccaaaatctctacgacaatgtatgagctttggattttcccagaaaagcacaacttcatccatcgggcaatatggaaatggcttcaaaactagcacgatgaggcttggggcagatgctattgtattcacatgcactaaagatgataggagattgacacgaagtatcgggttgctgtcttacacattccttatgagaagtaactgcaatgacatatttgtaccagtggttgattatgaattggatgccttgtcttcaactttcaagaggaaaatgaactgcggtgaaaaacattttttatctaatcttttcactattttgaagtggtctccattttcgacagaagatgaattattgaatcaattcagcaatatggagtgccatggcacaaaaatcattgtattcaacttgtggttgaatgatgcattggaaatggagcttgactttataactgataaagaggatattttggtctcaggagcaccggaaatacgagcagggcggaatacagtggaaagcttgacacagatgcatgtagcaaaccgtttccgatattcgcttcgggtgtatgcatctatactatacctacatgtacctgaaaactttcaaatcatcttgtgtggacgagctgttgaaccacattatgttgtcaatgatctcatataccgtgaatgtatcatatatcgaccacatgttcaagtaaccacagaggttgatgtcattactacaattggctacttaaaaggtgctccacgacttgatatctatggatttagtgtctaccataagaaccgtcttatactgccctattggcctgcaggttcatgtagtggacgtagaagaggcattgctggggttttggaggcaaacttcataagacctacacatgataagcaagattttgagaggacgggtcttttccaaagacttgagacacgattgaaagacatggcaaaagagtattggacttaccattgtcatatggttggttacactcgggtcatgaaaaagcctcctccagcacattatgtatcaactattgctgagaagggtgatgataacttagcagctcagtctaccacaaagacttatggttacaattcaagagccagggtaccggtagcattgcagccttgttccaatgcatataacacacaagatcctatgcatgctgatgttggtgtcgtgatggatcaaatgaactatggtgcatgcccttcaatgactataaatgtggggacaacattacattcactaagatatgcaccacaacaatctcaatctgaactatgcaaacgaagaaagtcttcggagattcactggagatctcaaaaaaagcagaacaccaatatttattcggataaacctgaaagcgatagtggaacagagatggcagagttcagagttgtacttgactcgtccaccatgctaaaggctgagtgctctgaacttgaggcagcaggaaagcagctggcctctaaggcagataaattgaggatagaactcgatgtgtggcagcggatgtaccagggcctaagtgacaaattgcgatcctacgatgggcttcaaaggttgcgttgcagtcgccattgcagcagctccagtattgggttcatatgagctaagagaagcaattccagcgttggattcacaatcaagttagaaatggcattagtccctcaaagtctatcttttcgtgactgtagatctggcagtatattatttgttagacctagtaagggtttttggggctagtccccttgtaattaactgcataccctgtgtaaggcagacccatctatacttagtctattaatacaactcctaaccctagttagggctagtttttccattctc

SEQ ID NO: 82936 - DNA, 3403 bp, Zea Mays
ggatcatatgtagagccagtgcccggtttttacaccgcccatcaaccacgcaatatgggatttccacagcaaacaaagcaaactttccagtttcccttgattctctctcttcgaaaactaaaagcaaactttccggtttcccttgattttctctcttcgaaaactaaagagcatcgaaactgaaacatcagagcaaaacccccttctccccactccccagcaagtctctaccaccatctcttctgctactgcaactgagaaccccagcaactgaaaaccccattctccgcggagcagccccattattaagcaatgctagtagacattgttgatctttccagtgatgatgacgaggtggctgttacagaagaacacagtgttgatggaaaaggtgtttatgcgaaggcaaatttttttgacttaactattgacgatggcattcttgaaggagagcatattgcttacgaacaagaacaaggagattctgctcagggcacatcattttataaacaagagttcattgcagatgatggacaagctgaagctgcccagtgcatagtaacattagagttgcaaaatcttggagcagatggtggatgctatgcttctcaatgcacagagacattgttggtgcaacaacttagaagaaatgatggacaaaatgatgctgcccactccacaggaacactaccgatacaagaacttagaacagatggtggacaacacgatgcggcccagtgcacaacaagtctacatatgcaagagcttagagcaactgatgtacaaggtgatgctgcctgtttcacaccaacattacagaggcaagaacatacagcagggaatgaacaaggtgacactgtccagtacacaacaacacaacagggtcaggaatctattgcagatgacacacgaggtgattttactcactgcacaacagcactgcaatggcaaggatctcataaagctcagtgcacaacaacattactaaggcaggagtttctagcagcaggtgatagaatgcaagatgctgcactgttgagaaattcagctgaagctaccacatccttgacaagtacacaacaagggagacacatgagaactgaattattcaatgtgtcaactgcaacaccatttccccggcaattttggaaagctggagagaaagctggagactatggattagcttctcaagctgatctcaacaatgaccacaaccgcttacagattcaccccaagtttcttcattctaatgctacttcacataaatggccattcggtgatatagacaagctagtgttggaactgattaatttctgttatacagctattgcagaactgctcgacaacgctattgatgaggtgagcagtggggcaacctttgtgaaaattgataagatgaagcattctcctaagggggattattcattggtaatagaagataatggcggcggcatgagtccaaaatctctacgacaatgtatgagctttggattttcccagaaaagcacaacttcatccatcgggcaatatggaaatggcttcaaaactagcacgatgaggcttggggcagatgctattgtattcacatgcactaaagatgataggagattgacacgaagtatcgggttgctgtcttacacattccttatgagaagtaactgcaatgacatatttgtaccagtggttgattatgaattggatgccttgtcttcaactttcaagaggaaaatgaactgcggtgaaaaacattttttatctaatcttttcactattttgaagtggtctccattttcgacagaagatgaattattgaatcaattcagcaatatggagtgccatggcacaaaaatcattgtattcaacttgtggttgaatgatgcattggaaatggagcttgactttataactgataaagaggatattttggtctcaggagcaccggaaatacgagcagggcggaatacagtggaaagcttgacacagatgcatgtagcaaaccgtttccgatattcgcttcgggtgtatgcatctatactatacctacatgtacctgaaaactttcaaatcatcttgtgtggacgagctgttgaaccacattatgttgtcaatgatctcatataccgtgaatgtatcatatatcgaccacatgttcaagtaaccacagaggttgatgtcattactacaattggctacttaaaaggtgctccacgacttgatatctatggatttagtgtctaccataagaaccgtcttatactggccctattggcctgcaggttcatgtagtggacgtagaagaggcattgctggggttttggaggcaaacttcataagacctacacatgataagcaagattttgagaggacgggtcttttccaaagacttgagacacgattgaaagacatggcaaaagagtattggacttaccattgtcatatggttggttacactcgggtcatgaaaaagcctcctccagcacattatgtatcaactattgctgagaagggtgatgataacttagcagctcagtctaccacaaagacttatggttacaattcaagagccagggtaccggtagcattgcagccttgttccaatgcatataacacacaagatcctatgcatgctgatgttggtgtcgtgatggatcaaatgaactatggtgcatgcccttcaatgactataaatgtggggacaacattacattcactaagatatgcaccacaacaatctcaatctgaactatgcaaacgaagaaagtcttcggagattcactggagatctcaaaaaaagcagaacaccaatatttattcggataaacctgaaagcgatagtggaacagaggttggaaatgtgctgattacttaattacgctgttttcttcaaagtatatcaatttcttttccccccttacaatcattcacatacttctagatggcagagttcagagttgtacttgactcgtccaccatgctaaaggctgagtgctctgaacttgaggcagcaggaaagcagctggcctctaaggcagataaattgaggatagaactcgatgtgtggcagcggatgtaccagggcctaagtgacaaattgcgatcctacgatgggcttcaaaggttgcgttgcagtcgccattgcagcagctccagtattgggttcatatgagctaagagaagcaattccagcgttggattcacaatcaagttagaaatggcattagtccctcaaagtctatcttttcgtgactgtagatctggcagtatattatttgttagacctagtaagggtttttggggctagtccccttgtaattaactgcataccctgtgtaaggcagacccatctatacttagtctattaatacaactcctaaccctagttagggctagtttttccattctc

SEQ ID NO: 82937 - DNA, 2444 bp, Zea Mays
gtcacctatgctgtgcaaaggtctctccttcaatcgccacccagaataaaagaaacaaaggctggcgtgtctttcagattaagcaatgctagtagacattgttgatctttccagtgatgatgacgaggtggctgttacagaagaacacagtgttgatggaaaaggtgtttatgcgaaggcaaatttttttgacttaactattgacgatggcattcttgaaggagagcatattgcttacgaacaagaacaaggagattctgctcagggcacatcattttataaacaagagttcattgcagatgatggacaagctgaagctgcccagtgcatagtaacattagagttgcaaaatcttggagcagatggtggatgctatgcttctcaatgcacagagacattgttggtgcaacaacttagaagaaatgatggacaaaatgatgctgcccactccacaggaacactaccgatacaagaacttagaacagatggtggacaacacgatgcggcccagtgcacaacaagtctacatatgcaagagcttagagcaactgatgtacaaggtgatgctgcctgtttcacaccaacattacagaggcaagaacatacagcagggaatgaacaaggtgacactgtccagtacacaacaacacaacagggtcaggaatctattgcagatgacacacgagcaggtgatagaatgcaagatgctgcactgttgagaaattcagctgaagctaccacatccttgacaagtacacaacaagggagacacatgagaactgaattattcaatgtgtcaactgcaacaccatttccccggcaattttggaaagctggagagaaagctggagactatggattagcttctcaagctgatctcaacaatgaccacaaccgcttacagattcaccccaagtttcttcattctaatgctacttcacataaatggccattcggtgctattgcagaactgctcgacaacgctattgatgaggtgagcagtggggcaacctttgtgaaaattgataagatgaagcattctcctaagggggattattcattggtaatagaagataatggcggcggcatgagtccaaaatctctacgacaatgtatgagctttggattttcccagaaaagcacaacttcatccatcgggcaatatggaaatggcttcaaaactagcacgatgaggcttggggcagatgctattgtattcacatgcactaaagatgataggagattgacacgaagtatcgggttgctgtcttacacattccttatgagaagtaactgcaatgacatatttgtaccagtggttgattatgaattggatgccttgtcttcaactttcaagaggaaaatgaactgcggtgaaaaacattttttatctaatcttttcactattttgaagtggtctccattttcgacagaagatgaattattgaatcaattcagcaatatggagtgccatggcacaaaaatcattgtattcaacttgtggttgaatgatgcattggaaatggagcttgactttataactgataaagaggatattttggtctcaggagcaccggaaatacgagcagggcggaatacagtggaaagcttgacacagatgcatgtagcaaaccgtttccgatattcgcttcgggtgtatgcatctatactatacctacatgtacctgaaaactttcaaatcatcttgtgtggacgagctgttgaaccacattatgttgtcaatgatctcatataccgtgaatgtatcatatatcgaccacatgttcaagtaaccacagagccaggttgatgtcattactacaattggctacttaaaaggtgctccacgacttgatatctatggatttagtgtctaccataagaaccgtcttatactgccctattggcctgcaggttcatgtagtggacgtagaagaggcattgctggggttttggaggcaaacttcataagacctacacatgataagcaagattttgagaggacgggtcttttccaaagacttgagacacgattgaaagacatggcaaaagagtattggacttaccattgtcatatggttggttacactcgggtcatgaaaaagcctcctccagcacattatgtatcaactattgctgagaagggtgatgataacttagcagctcagtctaccacaaagacttatggttacaattcaagagccagggtaccggtagcattgcagccttgttccaatgcatataacacacaagatcctatgcatgctgatgttggtgtcgtgatggatcaaatgaactatggtgcatgcccttcaatgactataaatgtggggacaacattacattcactaagatatgcaccacaacaatctcaatctgaactatgcaaacgaagaaagtcttcggagattcactggagatctcaaaaaaagcagaacaccaat

SEQ ID NO: 82938 - DNA, 1981 bp, Zea Mays
gtttcccttgattttctctcttcgaaaactaaagagcatcgaaactgaaacatcagagcaaaacccccttctccccactccccagcaagtctctaccaccatctcttctgctactgcaactgagaaccccagcaactgaaaaccccattctccgcggagcagccccattgtagattaagcaatgctagtagacattgttgatctttccagtgatgatgacgaggtggctgttacagaagaacacagtgttgatggaaaaggtgtttatgcgaaggcaaatttttttgacttaactattgacgatggcattcttgaaggagagcatattgcttacgaacaagaacaaggagattctgctcagggcacatcattttataaacaagagttcattgcagatgatggacaagctgaagctgcccagtgcatagtaacattagagttgcaaaatcttggagcagatggtggatgctatgcttctcaatgcacagagacattgttggtgcaacaacttagaagaaatgatggacaaaatgatgctgcccactccacaggaacactaccgatacaagaacttagaacagatggtggacaacacgatgcggcccagtgcacaacaagtctacatatgcaagagcttagagcaactgatgtacaaggtgatgctgcctgtttcacaccaacattacagaggcaagaacatacagcagggaatgaacaaggtgacactgtccagtacacaacaacacaacagggtcaggaatctattgcagatgacacacgaggtgattttactcactgcacaacagcactgcaatggcaaggatctcataaagctcagtgcacaacaacattactaaggcaggagtttctagcagcaggtgatagaatgcaagatgctgcactgttgagaaattcagctgaagctaccacatccttgacaagtacacaacaagggagacacatgagaactgaattattcaatgtgtcaactgcaacaccatttccccggcaattttggaaagctggagagaaagctggagactatggattagcttctcaagctgatctcaacaatgaccacaaccgcttacagattcaccccaagtttcttcattctaatgctacttcacataaatggccattcggtgatatagacaagctagtgttggaactgattaatttctgttatacagctattgcagaactgctcgacaacgctattgatgaggtgagcagtggggcaacctttgtgaaaattgataagatgaagcattctcctaagggggattattcattggtaatagaagataatggcggcggcatgagtccaaaatctctacgacaatgtatgagctttggattttcccagaaaagcacaacttcatccatcgggcaatatggaaatggcttcaaaactagcacgatgaggcttggggcagatgctattgtattcacatgcactaaagatgataggagattgacacgaagtatcgggttgctgtcttacacattccttatgagaagtaactgcaatgacatatttgtaccagtggttgattatgaattggatgccttgtcttcaactttcaagaggaaaatgaactgcggtgaaaaacattttttatctaatcttttcactattttgaagtggtctccattttcgacagaagatgaattattgaatcaattcagcaatatggagtgccatggcacaaaaatcattgtattcaacttgtggttgaatgatgcattggaaatggagcttgactttataactgataaagaggatattttggtctcaggagcaccggaaatacgagcagggcggaatacagtggaaagcttgacacagatgcatgtagcaaaccgtttccgatattcgcttcgggttgatgtcattactacaattggctacttaaaaggtgctccacgacttgatatctatggatttagtgtctaccataagaaccgtcttatactg

SEQ ID NO: 82939 - DNA, 710 bp, Zea Mays
cagcatcctgtttatcctcttgagatgtgacaatctgatcaatctgaagtttagctgcaaaagtctccttggggattcctagattgactgagcaatgaaatcttctacatgttattgttggcaacaggagatgacaatgaagcttcaaactggaaaatgaacgtagtaacttctgtttgtgacaatacagaatcagcagcagcagcacttccaaaacagcccaccactcaccagccatgtagttgctgggttttcctgcttgcatgctgcaacagcttcacattattgaagaaaccgatgaggcttctgtggaattatgagctgagatgaacctggcaagcattggaatctggtttcagaatgctctaattttgaagattaacttgtgttccattttaagcgtgtagtaagttgcaaggaagccctttacttctgttcataggttgcaatcagttttgtgtgctccaaaggtaatatttgattgccacagttgcagggattcaataaatccacgagttagaaatgaccatttgatgatgaataagaatgaatgtctgccttgtgctattggatatggataccaataacagacacattgtcatgtatgcgggtttaatcccataacaatgaaacaaatatgttggacatgcaaacctttgtctcagcaacttggtccttgcttgagttctattacatttatattttatttc

SEQ ID NO: 82940 - DNA, 1979 bp, Zea Mays
ccgaatccctcatgggcttccgggcgcgatgaggacgtgggactagcagacttcgtcgaagtcttcccttcgtcttgcaatggagaggacgaagggtgaccgcgccagtcatcatccggccggcgctctcggctcactcgggcgaaaggccgaaagcccagtcggaccacgccactcccaaaccctaagctgagcctgtgacgctttcatccaatggtgcaagagcaagacgcacccaacgcacttgcctccgacgccgatcaccccgctccgccgccccgcctcctttctaagcaccgcccgcgtcgccgcgccgctgcccctcgcccgcccctgccaccacctgcgccaccactgcccgcgcgtcgcctgcccgatctcagccagtgccactgctgcggcttccgcttccgaacgccccagccgggggccaggcccaagcgccgcccgctctgtccactcagttccctatggcgcgtcgtcctcctctgcgccgaatgcctctccctggtccgctgtggcgctgtatgctcttactgcctctccctcgacaacctgccgcccgaggattccgccgtcgtctgtcgccgctgcaaccgctatgtccatcgatcctgtatccctgccgaacaccgcacggccgtgatccagccggtcgatgtggaggatttcctctgcgtcgattgccgtcccaccgtgagatcgaagaacgggggcttcaatttggggctgaatctggatgcttgcatctgggatcgtacatccgttgccagggagaacgctctgaggaaggctgtggaggtgaagcccgcttctaagcgggggaacgacgctgttggcggcagtgggttggtcggaaggggcagtgatgttccagttctgccggacgaagagttagctttgcagctgcacctggcaatgaatggatcacagaggatttcacgttcaggtggtgcctctgccgatccagccaaggggaagaatgatggggttgctagtaggatttgcaacacaaatcaggatatttgcgtaacaaatatgatggctcagcttgatgaagaagaaccaggttgcaacagggtattaaagggccttaggaattctgattcctctgtcacagtggttcttgcgctggaatgtgtgaaaggtaaacgcactgaggaaagcatgaaagctaaaggaaaaggtcctcatgtgattacacagaaggatgatttggtggatccctataagaagtatagtaaaaggagttcaagcaaattagcaaaagatgaatatgttgcaagcccgaaaatgtatgatgggatggacatagaagatgctgatcatgatggtaatggggtagctcctatgaaatagactgcttataccattctgaggttattgttggcaacaggagatgacaatgaagcttcaaactggaaaatgaacgtagtaacttctgtttgtgacaatacagaatcagcagcagcagcacttccaaaacagcccaccactcaccagccatgtagttgctgggttttcctgcttgcatgctgcaacagcttcacattattgaagaaaccgatgaggcttctgtggaattatgagctgagatgaacctggcaagcattggaatctggtttcagaatgctctaattttgaagattaacttgtgttccattttaagcgtgtagtaagttgcaaggaagccctttacttctgttcataggttgcaatcagttttgtgtgctccaaaggtaatatttgattgccacagttgcagggattcaataaatccacgagttagaaatgaccatttgatgatgaataagaatgaatgtctgccttgtgctattggatatggataccaataacagacacattgtcatgtatgcgggtttaatcccataacaatgaaacaaatatgttggacatgcaaacctttgtctcagcaacttggtccttgcttgagttctattacatttatattttatttc

SEQ ID NO: 82941 - DNA, 496 bp, Zea Mays
gtcctcggggccgccccaacggcccttgcgatcgccaccacgtcagcgcggaggatgcacggccaccagcagcagccgtacccatacgggctgcggcaagacccgcggcggcggggtcactgggatggtggtgcagccgctggaccaggggtcgaagcgccatggtgtccaaggcgccgccgcgttcgtggggcaccgccgcctgccacgggacatcgacgttgctggtgaatgatggtttggcggcgtgtgtgcaaacttttctatgctagtttagtttgcaggtgtgtatggattttgatttatggcctggatggatcacactatgtagcgaacgatgtgttcaatttactgttggaataaaactgcagattggtgttacttaataataacgtcctagggaaaattgaaatactctcagcgtcctaaaaaactttatattctagaatttaataaatactgtatgatgtttttggagaatattgttttttacaca

SEQ ID NO: 82942 - DNA, 571 bp, Zea Mays
aataattgctctaattgtttgcattccacctgcattgatctttgaagggccccagctaatgcagcatggatttagtgatgccattgcaaaagtaggtttgacaaagtttgtcagtgacctattcttggttggactgttctaccatctgtataatcagattgctacaaacaccttggagcgagtggctcctctgacacatgctgtcgggaatgtgttgaaacgtgtttttgccatcggtttctcaatcattgtttttggcaacaaaattagcacacaaactggaattggcacgtccattgccatagctggtgttgctatgtactcttacattaaggctaagattgaagaggagaaaaggagcgcatgactgctgtgaataatattatcgggaccttcctcggacacaacatcgtcgacaatcacgacctacttctataccttgttttgttttcatcttgagtcagtcggtccattgtttgttcccagtctggtgattaaaagtctgcaaattctgtttgtggaattggcagcgatacaaatttggcttctttaagtaaatccggttgccggt

SEQ ID NO: 82943 - DNA, 577 bp, Zea Mays
aataattgctctaattgtttgcattccacctgcattgatctttgaagggccccagctaatgcagcatggatttagtgatgccattgcaaaagtaggtttgacaaagtttgtcagtgacctattcttggttggactgttctaccatctgtataatcagattgctacaaacaccttggagcgagtggctcctctgacacatgctgtcgggaatgtgttgaaacgtgtttttgccatcggtttctcaatcattgtttttggcaacaaaattagcacacaaactggaattggcacgtccattgccatagctggtgttgctatgtactcttacattaaggctaagattgaagaggagaaaaggaaaaagagcgcatgactgctgtgaataatattatcgggaccttcctcggacacaacatcgtcgacaatcacgacctacttctataccttgttttgttttcatcttgagtcagtcggtccattgtttgttcccagtctggtgattaaaagtctgcaaattctgtttgtggaattggcagcgatacaaatttggcttctttaagtaaatccggttgccggt

SEQ ID NO: 82944 - DNA, 769 bp, Zea Mays
ctcatttgctcacactatcaaagctctggagcccttcttcagcgcagctgctactcagtttatccttggacagcaagttcccttctctctgtggctttctcttgcccctgtggtccttggtgtttcaatggcatcccttactgagctttcattcaactggactggcttcatcaatgccatgatatcaaacatctcattcacttacatgagcatttattccaagaaagctatgtttgaagggccccagctaatgcagcatggatttagtgatgccattgcaaaagtaggtttgacaaagtttgtcagtgacctattcttggttggactgttctaccatctgtataatcagattgctacaaacaccttggagcgagtggctcctctgacacatgctgtcgggaatgtgttgaaacgtgtttttgccatcggtttctcaatcattgtttttggcaacaaaattagcacacaaactggaattggcacgtccattgccatagctggtgttgctatgtactcttacattaaggctaagattgaagaggagaaaaggaaaaagagcgcatgactgctgtgaataatattatcgggaccttcctcggacacaacatcgtcgacaatcacgacctacttctataccttgttttgttttcatcttgagtcagtcggtccattgtttgttcccagtctggtgattaaaagtctgcaaattctgtttgtggaattggcagcgatacaaatttggcttctttaagtaaatccggttgccggt

SEQ ID NO: 82945 - DNA, 785 bp, Zea Mays
tgtccttcgctgctgttgcagtctcatttgctcacactatcaaagctctggagcccttcttcagcgcagctgctactcagtttatccttggacagcaagttcccttctctctgtggctttctcttgcccctgtggtccttggtgtttcaatggcatcccttactgagctttcattcaactggactggcttcatcaatgccatgatatcaaacatctcattcacttacatgagcatttattccaagaaagctatgtttgaagggccccagctaatgcagcatggatttagtgatgccattgcaaaagtaggtttgacaaagtttgtcagtgacctattcttggttggactgttctaccatctgtataatcagattgctacaaacaccttggagcgagtggctcctctgacacatgctgtcgggaatgtgttgaaacgtgtttttgccatcggtttctcaatcattgtttttggcaacaaaattagcacacaaactggaattggcacgtccattgccatagctggtgttgctatgtactcttacattaaggctaagattgaagaggagaaaaggagcgcatgactgctgtgaataatattatcgggaccttcctcggacacaacatcgtcgacaatcacgacctacttctataccttgttttgttttcatcttgagtcagtcggtccattgtttgttcccagtctggtgattaaaagtctgcaaattctgtttgtggaattggcagcgatacaaatttggcttctttaagtaaatccggttgccggt

SEQ ID NO: 82946 - DNA, 237 bp, Zea Mays
tgcttgaccacgaggagacagagagaaacatgagcgttatcaccattggaaggaggttggcgctcagctttggagtacaacaaacttggtggctaggaaaggtttacaccgactgaacaccagagctacctctcccatgtagtggacactagctagaggtcgagggcaggagaacagctccactgaacctagcacttgaggcactgcatacgtaggtaactatccttgatctttgtc

SEQ ID NO: 82947 - DNA, 723 bp, Zea Mays
ctccaaacagccccaaatttttaccatattgtcacttgaccaaaataaagctacccaaaaaatttcataatttttggaactatatttttatttctaaaattcatttaaacctttgtagagcactttttaattacctaaaatttattatctgttgcaaatatcctaacattggtttttatcgaaaatttgtgattttatgtacccaggaaaactggtttccccatctttgcattttcctataatttttagcgtattttacaagttgtcagcaaaatgaaaagaagaaaacctaaacaatattggaccgcatttagtctgatccggcccaagactagcaggatcacgcgcgccgtccgcgcaacctacgccgacaaccccaggtcgaacacctggttgcgatcgcccgaactcgctgccgatgatcttcttcggcgaagacaagctccgtcgcaccaaccccaaagcaaagcagtttgattcattcaataacccagatcactactaccgcagatttatcttgcctgcgaccacgacgatgctctagatctagcgaacccacaaccgagaaaccgtgatggtagcgttctaacaaaggacttggaaaacaccaggggagcactaaggacacggtgctcacataaattttgatcggagaagtcgtgaatcgagcgatcgatgattaggtggttcccggcggcgttctgcgacgttgaggccatgttc

SEQ ID NO: 82948 - DNA, 539 bp, Zea Mays
atgaacgccgcgaaggaactccgcgagcagagcgcgacgctggagcacacgcggccctggcgagctgggcaccggcgctggagagctgagcaccgcggagcgcgcagggaggaagacacaccagggagctacgcaggtctggcggaatccgaacagggagggagaggatctgggcgcggccatggctggggagggaaatcgagctggggagctgccatgggaggagcagggacgcgccatgagctggagcagggcgcagctgccgggcgctgggacaagacaaggaacgcgcgcgccaggagatatacgacggatgagaaatatcagatggagggtggcggctggagatttttcagaggaatgactagtggagaggaatcatatggaagctagaagatgacgtgatagagcctccaggacgttgtgcatgttcagggatatgaacagctgggcatgtgcaccgagaaatatcccaaggagccgtatgtgagaagaatgcgtgagtgacatttcaattgctgatttctggatgaagagga

SEQ ID NO: 82949 - DNA, 583 bp, Zea Mays
cttgcctgggtaacactaggttagtgttgttaggcgaccacttggcgagcatcctttggcttggcactcgttcagattatccatcttctggtccatccatcagcatcatcctgcggattagcccgcgcttggggtcgacttgagtcatctttcgcatcacgtgattaattatcgcacctgaatgaaatgcattatgcacatgaatgcatatagacaggaatatcaaaaaccctaaatagtgctacgcgatggcgaatttaaacacctagcggcgaggcgttgtacaattttgtacgaaaacactagttatgaatatatgactacgcgcaataattacacttctctagattaaccgaacctaacgcgaacatcacaaaacaacaaatttatacacctttaatacaattagcctaatcacaatttatcaattaattaattaaattctaaacttatcccttgctttataaattatactacatctttataagtgattaaaatatttcctcaacacacatgcctactaaaattctactcggtacactaattcaactaattgacgagaatagcgaaataactcgctata

SEQ ID NO: 82950 - DNA, 394 bp, Zea Mays
gcaagaatcaacttagatactttgcagaaatagcttactaaagtgaatccttactttcaatattttaatgccagattaaatattaatagactctatttgcatctggtctaatttcaccatctcatcaatacaacatcatttttattcatgaggttcacatcctgacttactttgtaggtcggagatcaagtctccactctccggagatatagcggcgatccgaatcgatttactcagctgaggatctctaaccacacgacatatgtttcttgtaaaccttgcatgtctaccattcccacggatccttcactgcatgaacaggtccgcgccacccgagagcacaccaccccttttaggcggtcctttgccagtagggtacgtgccactctcgcca

SEQ ID NO: 82951 - DNA, 1223 bp, Zea Mays
cctccccagctcctctctgctcgctctccccagccgagcggctctcgtccacgctgctctctctctctcctccctctagctcgctgaccgcgcgcccctgaagcctcctcgccgtgcgccctgctcgctagtgctgcaacttaagccgtgtcgtgccggcccggcacgagcacgctgagcttcgggcctaaattagtcgggccaagatagcacgaaaaatagtcggaccatgccttaccgggccagatgggttgaaataaagcctagcacggccctaaagcatgacgggcttccgtcgggccgtgctggcccaggcacggcacgcaaccagtacagtctccattgaagaatacatttgacagactctgctaacttccaactgcagccgaatgtaggaagatgtgtcctttggatccaatgcacgaatgcgctttgcaacgctctcagccagcttgtcgttccagttaatctgacaaccccctaacaaagccttccagaacccaatgcctggctcgctacaagtcatcatcaactagaccaatgcctggctctcgctacggagtgcagccgtgcaggaaggaagccaggaagcggacgctgcggctgcgctcccgcagacccgcaaggtctcctcggttgcggacgctgcgaagcatgggcgactgggtgtgctgtgctctccttgaggcctcgactccggctccgagtccgacctccatgctgcgtcctccctgggaggccgagacagacgaggtcgagatccacagcgagatccgaatggatggcgacggccggcggagggaagtgggagaaaatgggtgcggtgcctgcgtgactacgtctgcggtgataagtgagacggcctgcatgagtgtgtgactgcgtctgtggctggaccgtcctgttttcgtgacgggccggcacgaactcggcccacagtgacgtgctgggccttgtagcacgacgggccgacattcagagcacggcccggcccgcaattcgtgtcgtgctaacccgaattaaatcagctgtgtcgggccgtgctttgttacattttttacgggccgtgctcgggccggcccattaggcacgccccagactttcaggactactgctcgctccagctcggctccctggcgagcgccgctgctctctctccctgtccccagctcgccgcgctcgcctgctctcggctcgccggtgttgctgtactccagctccct

SEQ ID NO: 82952 - DNA, 1551 bp, Zea Mays
gtcatgtgccctgtgatgccgtgtggatgaggacctattaagtcagggccttactttgaatgatgatttacaacgtgttttagcaaagcacgatgcaattgctgctggcatagccattcgattacaaaaaccaaaatcagccccggcccgcgcagacagttctccaacgaagcctgagccgacaaaggaaacagaacaaaggtctgctaaagttgccagtagtgtgactccatttgagcagttagcacttcctgcaccaccatcatcaagtgcttcaaagtctcatggagaatcagctgttagcccaaatattgatttgcttagtggtgatgagttttttaaaccagaacctgttcattcccaagctcttgttcctttagtcactcaggcttcagcttcttcaagccccagtactttagaccttttagacatgttttctgatagcaatgctatcaataacaccagccagaaccctaccatactttctatatctaactcaaatcctaatacatcagtacaagcctatcctgttccacagcaacctgttccaccacaccatccttcaccatatgctaatggcttaaattcagatacaatgacaccctttgatcaaggctctaagttaacctcagcaagttcatggaatgaacagattgcccatggaatgattccaccacagcagtttgcccatggtcaaggtgaacaaagcaacgaccttccactaccaccctgggaagctctgcctgcagaaactgagcaattagaagctgaccatcctggtgggttgtcagctctgccacaatttggagttagtcaaccccagccagtccaaattacacattctgggcagcaagtgttaccatcgcaattaatgccaactggacaaccgggagggcagttccagcctagatttggggctcaacaaccatatgctacagaaaatacgcagtatggaggaatgtatccgccagtgcaaggcaaccaaccaacgggtatttatccccagcaaatggctggagatgtctaccagcaacagatgtttggtggccagatgataggttatggctatggtccgcagcctggaggctactacgtgccgaacgccgcatatgcatatgccggtgcaaatgatctttctcagaggatgaatggcctctcgatgcaaggcaacagtctgtatggcacacccgcgtcgtcttccctccagcagcgtaacaggccaagcagacctgaagattcgctctttagtgatcttgttagcatcgccaaacaaagccttgtaaaactgcttccaacaaggctggtaacttgtaaaccatgagtttctgctcatagtatataaaattcttgaaatttttttcctattggaaagtagtgggcgagatttgtatatcctgatattgataaagatgtttacatcttttcaagaaattatattttgtttacaagtattctgtaccattaatgtcttatgtatatacataggagcaaaaaaaaaaaaagactccagtatgctgattcctctttgaaattttggcatacgacttcagc

SEQ ID NO: 82953 - DNA, 1049 bp, Zea Mays
ttctgtggaccaattctataagcttgacagaaattcagaatgcacgtggggtcatggatgttctttcagagatgttaaatgctatcgatcctggtaacagagagggtctaaggcaggaggtcattgtggaccttgtggaccaatgtcgttcatacaagcaaagagtggtgcagcttgtcaactcaacatcgtcaaggtgaacaaagcaacgaccttccactaccaccctgggaagctctgcctgcagaaactgagcaattagaagctgaccatcctggtgggttgtcagctctgccacaatttggagttagtcaaccccagccagtccaaattacacattctgggcagcaagtgttaccatcgcaattaatgccaactggacaaccgggagggcagttccagcctagatttggggctcaacaaccatatgctacagaaaatacgcagtatggaggaatgtatccgccagtgcaaggcaaccaaccaacgggtatttatccccagcaaatggctggagatgtctaccagcaacagatgtttggtggccagatgataggttatggctatggtccgcagcctggaggctactacgtgccgaacgccgcatatgcatatgccggtgcaaatgatctttctcagaggatgaatggcctctcgatgcaaggcaacagtctgtatggcacacccgcgtcgtcttccctccagcagcgtaacaggccaagcagacctgaagattcgctctttagtgatcttgttagcatcgccaaacaaagccttgtaaaactgcttccaacaaggctggtaacttgtaaaccatgagtttctgctcatagtatataaaattcttgaaatttttttcctattggaaagtagtgggcgagatttgtatatcctgatattgataaagatgtttacatcttttcaagaaattatattttgtttacaagtattctgtaccattaatgtcttatgtatatacataggagcaaaaaaaaaaaaagactccagtatgctgattcctctttgaaattttggcatacgacttcagc

SEQ ID NO: 82954 - DNA, 1731 bp, Zea Mays
aattttattgtcgtcctcgcccgctttctctgaccgaccggaaaggcgctgcccaaacaaacgcggaggaagaagggaactcgccgcctagggttccgccgccgcctactcttccgccgatcaaggagcgggaatcattgcgcgatgccgcagtcggtgctggtggaacgcgcgacgagcgagtcgctcatcggccctgactggtctctcaaccttgagatctgcgacatcctcaaccacgacccctcgcaagccaaagatgtagtgaagactatcaagaaacggattgcacacaagaactcaaaggtccagcttcttgcattaacgttgctggagaccttgattaaaaattgtggtgattttgttcatatgcaagttgctgagaaggatatgcttcatgaaatggtgaagatagctaagaagaagcctgactatcacgtcaaagagaagatattaattctgatagacacttggcaagaagcttttggtggtgcccgtgcaagatatccccagtattacgcagcatatcaagagatgctgcgtgctggagctgtatttcctcaaaggccggagagtactgtgccaatctatactcctccacagacacagcctctacggaactatccgcctcctgcattgcgtaacactgattatcgacatgatgtgcctgaatcctcttctgcaccagaagtgcctgcattaagcttgacagaaattcagaatgcacgtggggtcatggatgttctttcagagatgttaaatgctatcgatcctggtaacagagagggtctaaggcaggaggtcattgtggaccttgtggaccaatgtcgttcatacaagcaaagagtggtgcagcttgtcaactcaacatcgtcaaggtgaacaaagcaacgaccttccactaccaccctgggaagctctgcctgcagaaactgagcaattagaagctgaccatcctggtgggttgtcagctctgccacaatttggagttagtcaaccccagccagtccaaattacacattctgggcagcaagtgttaccatcgcaattaatgccaactggacaaccgggagggcagttccagcctagatttggggctcaacaaccatatgctacagaaaatacgcagtatggaggaatgtatccgccagtgcaaggcaaccaaccaacgggtatttatccccagcaaatggctggagatgtctaccagcaacagatgtttggtggccagatgataggttatggctatggtccgcagcctggaggctactacgtgccgaacgccgcatatgcatatgccggtgcaaatgatctttctcagaggatgaatggcctctcgatgcaaggcaacagtctgtatggcacacccgcgtcgtcttccctccagcagcgtaacaggccaagcagacctgaagattcgctctttagtgatcttgttagcatcgccaaacaaagccttgtaaaactgcttccaacaaggctggtaacttgtaaaccatgagtttctgctcatagtatataaaattcttgaaatttttttcctattggaaagtagtgggcgagatttgtatatcctgatattgataaagatgtttacatcttttcaagaaattatattttgtttacaagtattctgtaccattaatgtcttatgtatatacataggagcaaaaaaaaaaaaagactccagtatgctgattcctctttgaaattttggcatacgacttcagc

SEQ ID NO: 82955 - DNA, 2247 bp, Zea Mays
aaccaagaaaatccgcaattttattgtcgtcctcgcccgctttctctgaccgaccggaaaggcgctgcccaaacaaacgcggaggaagaagggaactcgccgcctagggttccgccgccgcctactcttccgccgatcaaggagcgggaatcattgcgcgatgccgcagtcggtgctggtggaacgcgcgacgagcgagtcgctcatcggccctgactggtctctcaaccttgagatctgcgacatcctcaaccacgacccctcgcaagccaaagatgtagtgaagactatcaagaaacggattgcacacaagaactcaaaggtccagcttcttgcattaacgttgctggagaccttgattaaaaattgtggtgattttgttcatatgcaagttgctgagaaggatatgcttcatgaaatggtgaagatagctaagaagaagcctgactatcacgtcaaagagaagatattaattctgatagacacttggcaagaagcttttggtggtgcccgtgcaagatatccccagtattacgcagcatatcaagagatgctgcgtgctggagctgtatttcctcaaaggccggagagtactgtgccaatctatactcctccacagacacagcctctacggaactatccgcctcctgcattgcgtaacactgattatcgacatgatgtgcctgaatcctcttctgcaccagaagtgcctgcattaagggatgaggacctattaagtcagggccttactttgaatgatgatttacaacgtgttttagcaaagcacgatgcaattgctgctggcatagccattcgattacaaaaaccaaaatcagccccggcccgcgcagacagttctccaacgaagcctgagccgacaaaggaaacagaacaaaggtctgctaaagttgccagtagtgtgactccatttgagcagttagcacttcctgcaccaccatcatcaagtgcttcaaagtctcatggagaatcagctgttagcccaaatattgatttgcttagtggtgatgagttttttaaaccagaacctgttcattcccaagctcttgttcctttagtcactcaggcttcagcttcttcaagccccagtactttagaccttttagacatgttttctgatagcaatgctatcaataacaccagccagaaccctaccatactttctatatctaactcaaatcctaatacatcagtacaagcctatcctgttccacagcaacctgttccaccacaccatccttcaccatatgctaatggcttaaattcagatacaatgacaccctttgatcaaggctctaagttaacctcagcaagttcatggaatgaacagattgcccatggaatgattccaccacagcagtttgcccatggtcaaggtgaacaaagcaacgaccttccactaccaccctgggaagctctgcctgcagaaactgagcaattagaagctgaccatcctggtgggttgtcagctctgccacaatttggagttagtcaaccccagccagtccaaattacacattctgggcagcaagtgttaccatcgcaattaatgccaactggacaaccgggagggcagttccagcctagatttggggctcaacaaccatatgctacagaaaatacgcagtatggaggaatgtatccgccagtgcaaggcaaccaaccaacgggtatttatccccagcaaatggctggagatgtctaccagcaacagatgtttggtggccagatgataggttatggctatggtccgcagcctggaggctactacgtgccgaacgccgcatatgcatatgccggtgcaaatgatctttctcagaggatgaatggcctctcgatgcaaggcaacagtctgtatggcacacccgcgtcgtcttccctccagcagcgtaacaggccaagcagacctgaagattcgctctttagtgatcttgttagcatcgccaaacaaagccttgtaaaactgcttccaacaaggctggtaacttgtaaaccatgagtttctgctcatagtatataaaattcttgaaatttttttcctattggaaagtagtgggcgagatttgtatatcctgatattgataaagatgtttacatcttttcaagaaattatattttgtttacaagtattctgtaccattaatgtcttatgtatatacataggagcaaaaaaaaaaaaagactccagtatgctgattcctctttgaaattttggcatacgacttcagc

SEQ ID NO: 82956 - DNA, 2565 bp, Zea Mays
gtcattgccgcgtgtctggcctgtgggcctcgcacggacatcagagacgattggaaccaagaaaatccgcaattttattgtcgtcctcgcccgctttctctgaccgaccggaaaggcgctgcccaaacaaacgcggaggaagaagggaactcgccgcctagggttccgccgccgcctactcttccgccgatcaaggagcgggaatcattgcgcgatgccgcagtcggtgctggtggaacgcgcgacgagcgagtcgctcatcggccctgactggtctctcaaccttgagatctgcgacatcctcaaccacgacccctcgcaagccaaagatgtagtgaagactatcaagaaacggattgcacacaagaactcaaaggtccagcttcttgcattaacgttgctggagaccttgattaaaaattgtggtgattttgttcatatgcaagttgctgagaaggatatgcttcatgaaatggtgaagatagctaagaagaagcctgactatcacgtcaaagagaagatattaattctgatagacacttggcaagaagcttttggtggtgcccgtgcaagatatccccagtattacgcagcatatcaagagatgctgcgtgctggagctgtatttcctcaaaggccggagagtactgtgccaatctatactcctccacagacacagcctctacggaactatccgcctcctgcattgcgtaacactgattatcgacatgatgtgcctgaatcctcttctgcaccagaagtgcctgcattaagcttgacagaaattcagaatgcacgtggggtcatggatgttctttcagagatgttaaatgctatcgatcctggtaacagagaggattgtatgttgacatgttccagattgttcaactggaccatacagttccagaagttctagtcatccctggatttctaaatagtactcaacatgcagggtctaaggcaggaggtcattgtggaccttgtggaccaatgtcgttcatacaagcaaagagtggtgcagcttgtcaactcaacatcggatgaggacctattaagtcagggccttactttgaatgatgatttacaacgtgttttagcaaagcacgatgcaattgctgctggcatagccattcgattacaaaaaccaaaatcagccccggcccgcgcagacagttctccaacgaagcctgagccgacaaaggaaacagaacaaaggtctgctaaagttgccagtagtgtgactccatttgagcagttagcacttcctgcaccaccatcatcaagtgcttcaaagtctcatggagaatcagctgttagcccaaatattgatttgcttagtggtgatgagttttttaaaccagaacctgttcattcccaagctcttgttcctttagtcactcaggcttcagcttcttcaagccccagtactttagaccttttagacatgttttctgatagcaatgctatcaataacaccagccagaaccctaccatactttctatatctaactcaaatcctaatacatcagtacaagcctatcctgttccacagcaacctgttccaccacaccatccttcaccatatgctaatggcttaaattcagatacaatgacaccctttgatcaaggctctaagttaacctcagcaagttcatggaatgaacagattgcccatggaatgattccaccacagcagtttgcccatggtcaaggtgaacaaagcaacgaccttccactaccaccctgggaagctctgcctgcagaaactgagcaattagaagctgaccatcctggtgggttgtcagctctgccacaatttggagttagtcaaccccagccagtccaaattacacattctgggcagcaagtgttaccatcgcaattaatgccaactggacaaccgggagggcagttccagcctagatttggggctcaacaaccatatgctacagaaaatacgcagtatggaggaatgtatccgccagtgcaaggcaaccaaccaacgggtatttatccccagcaaatggctggagatgtctaccagcaacagatgtttggtggccagatgataggttatggctatggtccgcagcctggaggctactacgtgccgaacgccgcatatgcatatgccggtgcaaatgatctttctcagaggatgaatggcctctcgatgcaaggcaacagtctgtatggcacacccgcgtcgtcttccctccagcagcgtaacaggccaagcagacctgaagattcgctctttagtgatcttgttagcatcgccaaacaaagccttgtaaaactgcttccaacaaggctggtaacttgtaaaccatgagtttctgctcatagtatataaaattcttgaaatttttttcctattggaaagtagtgggcgagatttgtatatcctgatattgataaagatgtttacatcttttcaagaaattatattttgtttacaagtattctgtaccattaatgtcttatgtatatacataggagcaaaaaaaaaaaaagactccagtatgctgattcctctttgaaattttggcatacgacttcagc

SEQ ID NO: 82957 - DNA, 2448 bp, Zea Mays
gtcattgccgcgtgtctggcctgtgggcctcgcacggacatcagagacgattggaaccaagaaaatccgcaattttattgtcgtcctcgcccgctttctctgaccgaccggaaaggcgctgcccaaacaaacgcggaggaagaagggaactcgccgcctagggttccgccgccgcctactcttccgccgatcaaggagcgggaatcattgcgcgatgccgcagtcggtgctggtggaacgcgcgacgagcgagtcgctcatcggccctgactggtctctcaaccttgagatctgcgacatcctcaaccacgacccctcgcaagccaaagatgtagtgaagactatcaagaaacggattgcacacaagaactcaaagttgctggagaccttgattaaaaattgtggtgattttgttcatatgcaagttgctgagaaggatatgcttcatgaaatggtgaagatagctaagaagaagcctgactatcacgtcaaagagaagatattaattctgatagacacttggcaagaagcttttggtggtgcccgtgcaagatatccccagtattacgcagcatatcaagagatgctgcgtgctggagctgtatttcctcaaaggccggagagtactgtgccaatctatactcctccacagacacagcctctacggaactatccgcctcctgcattgcgtaacactgattatcgacatgatgtgcctgaatcctcttctgcaccagaagtgcctgcattaagcttgacagaaattcagaatgcacgtggggtcatggatgttctttcagagatgttaaatgctatcgatcctggtaacagagagggtctaaggcaggaggtcattgtggaccttgtggaccaatgtcgttcatacaagcaaagagtggtgcagcttgtcaactcaacatcggatgaggacctattaagtcagggccttactttgaatgatgatttacaacgtgttttagcaaagcacgatgcaattgctgctggcatagccattcgattacaaaaaccaaaatcagccccggcccgcgcagacagttctccaacgaagcctgagccgacaaaggaaacagaacaaaggtctgctaaagttgccagtagtgtgactccatttgagcagttagcacttcctgcaccaccatcatcaagtgcttcaaagtctcatggagaatcagctgttagcccaaatattgatttgcttagtggtgatgagttttttaaaccagaacctgttcattcccaagctcttgttcctttagtcactcaggcttcagcttcttcaagccccagtactttagaccttttagacatgttttctgatagcaatgctatcaataacaccagccagaaccctaccatactttctatatctaactcaaatcctaatacatcagtacaagcctatcctgttccacagcaacctgttccaccacaccatccttcaccatatgctaatggcttaaattcagatacaatgacaccctttgatcaaggctctaagttaacctcagcaagttcatggaatgaacagattgcccatggaatgattccaccacagcagtttgcccatggtcaaggtgaacaaagcaacgaccttccactaccaccctgggaagctctgcctgcagaaactgagcaattagaagctgaccatcctggtgggttgtcagctctgccacaatttggagttagtcaaccccagccagtccaaattacacattctgggcagcaagtgttaccatcgcaattaatgccaactggacaaccgggagggcagttccagcctagatttggggctcaacaaccatatgctacagaaaatacgcagtatggaggaatgtatccgccagtgcaaggcaaccaaccaacgggtatttatccccagcaaatggctggagatgtctaccagcaacagatgtttggtggccagatgataggttatggctatggtccgcagcctggaggctactacgtgccgaacgccgcatatgcatatgccggtgcaaatgatctttctcagaggatgaatggcctctcgatgcaaggcaacagtctgtatggcacacccgcgtcgtcttccctccagcagcgtaacaggccaagcagacctgaagattcgctctttagtgatcttgttagcatcgccaaacaaagccttgtaaaactgcttccaacaaggctggtaacttgtaaaccatgagtttctgctcatagtatataaaattcttgaaatttttttcctattggaaagtagtgggcgagatttgtatatcctgatattgataaagatgtttacatcttttcaagaaattatattttgtttacaagtattctgtaccattaatgtcttatgtatatacataggagcaaaaaaaaaaaaagactccagtatgctgattcctctttgaaattttggcatacgacttcagc

SEQ ID NO: 82958 - DNA, 2338 bp, Zea Mays
cccactgccgccacacgccacctgccaccgccactggtttttggctgttcccgggcaaactcgccaccaattgccacgctgggtgatgctagcttagcagcttttttgtatcttcccagttgtttgaactatatggccgctcctctcctccatgttccatgccgcctcggctgcaaggatcataaacaaacttattcactttttatccgataataaatacgaccgacggctgcatgcgtgagaagagatcaagccaccgctagtcgtcgcggtactcaagtgagatcgagccgggggattcgggatcaggccggtacggggggcgaccgaggaccgccgatggccgcggctccagacatggacgaacaagatgcggcaatcgagggagggcagctcgtcgtgcctcttctcggaagccgaagtgcaagcaccgccacgggctcgccgtcgcaggacgcgtcctcgctccgccgcctctacgccggccacgccctcgccagatggggcgccaggatgtgggagttctcagttgggctgtacatgatccgcatctggccaggctcgctgctcttcactgcgatttacggcgtcgtcgagtcgtcctccgtcgcggtgtttggtcccacagttggcacactggtcgataacctcacgtaccttcaggttcttggcctatggcttctagtccaaagcctgtccttcattgtcgccggagcctcagtaaccgccctgcttgtttacgacgacctgaaagccacaagcttccctgttttcatggcgctggtcatcatgaccaacgtggcaggtgcgctagcagcgctctcaacgcttgccggaaccatactgatcgagagagaatgggtggtggtgatctccagcaggcacccacctgcagtgctgacggggatcaactcggtggtccggcggatcgacctgagctgcaagctgctggcccctgtcttctccggcctcgtcatcagcttcgtgtcggcgcaggcctccgcggcggctctggcgttgtggaacgtcgcctcggtggggctggagtactggctcttcgtttctgtgtacaatggcgtgccagcgctcgctgagagcagccggctgagaacagctggtgcaaatgcaagtgaggccatggtgctgccatcgtcgtcgtcgtcggagaacgtggtgccggccgataaggagctggattggagggttaggatgacggagcagctatccatcataccatgctgggagtcatgggtggtgtacctgaggcaggacgtggcgctcccaggcgtcgccctcgccttcctctactttagcgttctgagcttcggcacgctgatgacggcgaccctggactgggaaggcatacctgcgtacgtcatcagtttggcaaggggcttcagcgccatcgttggcatcggcgcaacgctgctgtaccctgtggtgcactcatgggtgtccacactacggacaggactgtggtccatttggatgcaatggtgctgcctgctggtgtgcgtcgcttccatctgggcggcgagcgacgtggcgtcggcgtggatgctgatggccggcgtcgccgcgtcgcgcctagggctctggatgttcgacctcgccgtgatgcagctgatgcaggatggcgtgcccgaccacgagcgctgcgtcgtgggcggggtgcagaattcgctgcagtccgtgttcgatctgctcacctatatcatgggcatcatcatctccgaccccagggatttcagcgagctggtcgtgttgtccttcttcctggtgacctgcgctgcagccatgtacacgctgcacgtctaccgcgtgcgcaagcacctcttccacttcgacaagatcctagccaagatcagctgatatttctttgctcttggcgactggaaattgctgatttgacactgggtttgaaacaaccagcacggagtatactggttgctcttgtaaacagttgtgttttttccatcttctggtgtttagaaaattgtgtaatctaggaacatttttaccaagtatccacaagtatccactgtaggtgaactggaatttcctaaaccaacaggagttgagactgaagggttctaacccaaggtggtgtggttggatcagggcttttgtgaaaatgtggactttaaagttataatgagaaaatgagttaaaacaacaagatgatcctttatcactgatgttgttcaacgatttcgtggatatgtaagctatcatcttatatatctagagctaaggaggaagaacaaatagaacaagccattccaaacctaagtggaaaatagcatcgattttgcaatatgcaggatgacaagttttc

SEQ ID NO: 82959 - DNA, 2784 bp, Zea Mays
gcactctccctcccacctgcgtctccgtgcggcggccgccgctctctgtctcggcgtcggcgacccgatctcgacctctcggagtccctctccctccggcgcggcgctcggctgctccctcctcccggtgctccctggctggctggctccctgctcggctgctccctcttcccggcgctccctgcttcctcgatctctcctccggcggtggcttccctgctccatcggtctctcctccctgcgctccctgctccctcagtccctcctccggtggtggcttccctgctcaaccagccaaggccgtgaggaaccggtgcgcgccaccttggcgacggaactggtgctccggcctgtgagctgtgatggagcaagatgttggtggtcagaacagtcattcgcagttcatcaacaatgatctgaggattgtgcccgctgatgaggatgggccatctcagtccattaacaatggtagtagtgctgcccctattaacttagaggagggtgctgctaccaacaatggtactggagatgcaaatacttcagaaaatgttgatggtaagaagcataaaagaatttgcacatctaaagtgtggcaggattttgaaccactataccacactgtagacggcaagaggatcaggtatggtggtaagtgtcactggtgcaaatgtacattgactgctgtgtctactagtggtactggtcatttgcttaggcatcaacgtgattgcaaagttaagctttctaagcagggcaagcagtcagtccttaagtttaaccctgatggttccatgcgtaactgggattactgtcctgatcgtgctagaactcagatgtgtaggttgattgctaggcttgatcttccacttaattttgctgagtcacctgcttttgaggagtatattagactatctcataatcctgtctttaagaaagtatctcatcaaactactgctagggactttgtcaagttctttaatgatcgtcgtaagatagttgttgagtgcttgcaatctgtttcttctattgcaattacatctgatatttggagtggtaatgctaaggaagactatcttagtgtggttgctcattatgtttctaaggactgggcattagaaaagagggtcattggccttagactaattgaaacagctcacactggtgagaacattgctgagagggttatgactgtgcttgaagattatggtgttgttaataaagttttttctgtaaccttggataatgcctcctccaattctaaagctatggagaagcttagtccatccttagctgcatatgttggtactttattcttgcatcaacgttgtgcttgccatattatcaatttgattgtgaaatgtggcttcaaaagactgcaaccttaccttgattcatttagaactgcaattgtcttcttgaatgcttctaatcagcgtattgctgcatttaagggttattgtgttgctatgaatgtacgacctcgtaaatttggcattgacatgcccgtgagatggaattctacatatcttatgcttaagcatttaattccttacaagggaacctttggtgtgttcatggacactaactatcctagaaaaccaggtgaacctaatctgttgacaaattcgcattggtatgtggctgaaaagttgcttcagtttcttgaactgttttatgatgctactgtgaccctttctggggtttactatcctacatctccacttattatgcataatattcttgacattatccagcatttaaatcagcatgaaaatgatgcattgcttagacatgctgttgctcctatgaaatctaagttccttaagtactggagggatatacctatgctctatgcatttgcttttatacttgatcctagagccaaactaaggggttttagcaatatcttaagaattttatctggtctatctggtactgactactcactttattttacttgtgtgaaaagtgaattgtttaccatgtttaataaatatgatgttaagtttggtgcagttaggcaacaagtgcctcctcctcctcctatcacaggtaaaaggaaacaaaactggggattgatttatggatctgattctaattctgagttttcatatcctggttctagtactcctaaccttgcagctggaacatcagcatctgctttgcttcaacaagcacactctagtgttggtcttagttcacttgacacagaactgtcctcatatctggacagtgacactttgcagaagtttgatgaggacttcaatatcctaaactggtggcatgaacataagttgtcctatcctattctctctatcttagctagagatattatttctgttcctgtctcaacaatttcctcagaatctgcttttagcctttgtggcaggataattgaggaacgacgacgtcgcctagcaccagaaatggtagagatgctactttgcatgaaagattgggaactaggagaagctagaggccaacactctacacaggacgaagaccttgaagaagcatttgaaggactttatcctgatgacccttaggcctagggccctacactttgtaatctcctactattcttcctattcctactctattctagtgatctggacatctggtgatgtaaactgtactcttagacatgaacttattaaatcagagctgggctgtactcttttttcctttatagggttttctcacgaggagtgagtttttacctagaaaggtttttaatgaggcagccattgcacaaacaactctaatcctttatattacttatct

SEQ ID NO: 82960 - DNA, 1581 bp, Zea Mays
acaccattaatatatctttattatattatcatgaatgaacatgaactatattgaattacatttgtaccttcgtcttgacagaaggcagaaatccaagcgtgacgcacaagtgaatacaagtcagcgtgaacagtacgggggtactgtgcatctatttataggcacagggcgcagcctgtgtgaaattaaattcatgcccttcatgtttactattggcttaaggacaatctatcgaggactagatagccttttcctcttttaagtcggttcctttttctgctactatagatgtccagaaagcacgtggcccgttagcccggcacgaagcacgattttttagcacgacacgagcccggcccggcacggaatgaagcgggcccgggcttagcccggcccggatagcgtgccgggctcgacaggaatttgagcccgttgggctagcccgagcacgacccgttatcagccgggcttttaaaccgacccgttcaacaaattcacctaggacctgggctgcttacgcacttacgcagacggcccaactaagcagctgccgcaagcccgcagccgcaggccacaaatcccgtaacttgtataagtcacgacatgcgcgacggcaagcggcaaccctaaccctaacgcactctccctcccacctgcgtctccgtgcggcggccgccgctctctgtctcggcgtcggcgacccgatctcgacctctcggagtccctctccctccggcgcggcgctcggctgctccctcctcccggtgctccctggctggctggctccctgctcggctgctccctcttcccggcgctccctgcttcctcgatctctcctccggcggtggcttccctgctccatcggtctctcctccctgcgctccctgctccctcagtccctcctccggtggtggcttccctgctcaaccagccaaggtatcctttccctgtaactctgtaagcaagatctcagtctcagggattagtgggttgtgtatctgcgattagctttggcgtcaggattattggttgtgagtttgtgacacgtacaggtgcatcactgcatggagcctgctccctctttatctcgcgtccgattaattaggttgggcagctgcccacagatgtatcatgtatactgcaagcctgctggcaccgccatcttctgcaatcatagttactggcactactgcttttggctagttttagggctgcctcagctaccgtgtgtgatctgtgcagccacttcttcatcttctgattctggattccctgatgagagagaagctctttcctgcttggccttccttcgtgccggtgcatacagatacagggctagaggcgacgcgttttctgaactcctgatgagaattcgtcgtctagtgtctgctttaatttagccttgatttgtccgaccccatggttcatgtcgcgatagttctttataaacagtcaaacagatagttctttctctgcgttaatgtgcttctgtgattctgtttatatctatttatatctgtttatagctgtttatatctgtttgtatctgtttatatctgtttatagctgtttatagctgtt

SEQ ID NO: 82961 - DNA, 1065 bp, Zea Mays
cactcacaagcacgacaactggactggctggggctgccggcgggggtcaagttcgacccgacggatcaggagctgattgagcacctgcaggccaaggtccggcctgcctcggcagcggcgccgtcgcaccctctgatcgacgagttcatacccaccattgaaggggaggacggcatatgctacacccatcctgagaggctgccaggtttgacgaaggacggcctgagcaggcacttcttccaccggccatccaaggcttacactaccggcactcgcaagcgccgtaagatccagccgcccgtagccgatgcctcatcatcctccgccctgcccgcgcagcagcagcatcagcagcagcagcggagcgagacgcggtggcacaagaccggcaagacgcggccggtggtcgtcgccgggcggcagcgcgggtgcaagaagatcctggtgctctacacgaacttcggcaagaaccgcaagcccgacaagaccaactgggtgatgcaccagtaccacctcggcgacaaagaggaggagcgcgagggcgagctcgtcgtgtccaagatcttctaccagacgcagccgaggcagtgtggcgtcgcggcggagcctgccgccacagccgcctcctctgacacggtggaggaggctgctgacccgccggcgccggagggcttggtagtgccgccaccaccagatgtagccggtgccttccaaggcgccgctggcattgatgagttcagctttgcgcagttcaggagcagcttcgaggaggtggacgtcggagcatcagttcaggtttcgatgagggacgaggaggaaatgcatgcagcgcatctcaaccttcaccaggatcataatcttcaccgcaatcaatttggcaaccaagagcacaggcgccgcatggctgcaactgctgcagcattcccacatcaacacaccagtagagcctatcaccacgatgatcacctcctcgccggtggttcacggttctgccatacttcaacatccagagggcatatggccatggcagctcgacttattgtcatcatcagcaccagatggtag

SEQ ID NO: 82962 - DNA, 1054 bp, Zea Mays
cccgaagctggactggctggggctgccggcgggggtcaagttcgacccgacggatcaggagctgattgagcacctgcaggccaaggtccggcctgcctcggcagcggcgccgtcgcaccctctgatcgacgagttcatacccaccattgaaggggaggacggcatatgctacacccatcctgagaggctgccaggtttgacgaaggacggcctgagcaggcacttcttccaccggccatccaaggcttacactaccggcactcgcaagcgccgtaagatccagccgcccgtagccgatgcctcatcatcctccgccctgcccgcgcagcagcagcatcagcagcagcagcggagcgagacgcggtggcacaagaccggcaagacgcggccggtggtcgtcgccgggcggcagcgcgggtgcaagaagatcctggtgctctacacgaacttcggcaagaaccgcaagcccgacaagaccaactgggtgatgcaccagtaccacctcggcgacaaagaggaggagcgcgagggcgagctcgtcgtgtccaagatcttctaccagacgcagccgaggcagtgtggcgtcgcggcggagcctgccgccacagccgcctcctctgacacggtggaggaggctgctgacccgccggcgccggagggcttggtagtgccgccaccaccagatgtagccggtgccttccaaggcgccgctggcattgatgagttcagctttgcgcagttcaggagcagcttcgaggaggtggacgtcggagcatcagttcaggtttcgatgagggacgaggaggaaatgcatgcagcgcatctcaaccttcaccaggatcataatcttcaccgcaatcaatttggcaaccaagagcacaggcgccgcatggctgcaactgctgcagcattcccacatcaacacaccagtagagcctatcaccacgatgatcacctcctcgccggtggttcacggttctgccatacttcaacatccagagggcatatggccatggcagctcgacttattgtcatcatcagcaccagatggtag

SEQ ID NO: 82963 - DNA, 1392 bp, Zea Mays
aattacttccccataaccccccttctctccttcctcctcttctcttcctctcgatctcgtttctctccaggctcggacggcacagcgcgcggcggcgtggatcccgtctccctctcctcgatccagccctctgaaccacatgcatgtgatcatgcacgggctggtatggtaaagggcgcgccgtgctgctagactcgtatgggctcttggcagcaaggagagctgcagggagcagccatggatggtgcagcggcggcggcgactggaagcggcggcggccaccgcgtcgtgggctcgaggaacgaggagcacgggaagtacctgtcggagtcgagctgctgccccacggactggctggggctgccggcgggggtcaagttcgacccgacggatcaggagctgattgagcacctgcaggccaaggtccggcctgcctcggcagcggcgccgtcgcaccctctgatcgacgagttcatacccaccattgaaggggaggacggcatatgctacacccatcctgagaggctgccaggtttgacgaaggacggcctgagcaggcacttcttccaccggccatccaaggcttacactaccggcactcgcaagcgccgtaagatccagccgcccgtagccgatgcctcatcatcctccgccctgcccgcgcagcagcagcatcagcagcagcagcggagcgagacgcggtggcacaagaccggcaagacgcggccggtggtcgtcgccgggcggcagcgcgggtgcaagaagatcctggtgctctacacgaacttcggcaagaaccgcaagcccgacaagaccaactgggtgatgcaccagtaccacctcggcgacaaagaggaggagcgcgagggcgagctcgtcgtgtccaagatcttctaccagacgcagccgaggcagtgtggcgtcgcggcggagcctgccgccacagccgcctcctctgacacggtggaggaggctgctgacccgccggcgccggagggcttggtagtgccgccaccaccagatgtagccggtgccttccaaggcgccgctggcattgatgagttcagctttgcgcagttcaggagcagcttcgaggaggtggacgtcggagcatcagttcaggtttcgatgagggacgaggaggaaatgcatgcagcgcatctcaaccttcaccaggatcataatcttcaccgcaatcaatttggcaaccaagagcacaggcgccgcatggctgcaactgctgcagcattcccacatcaacacaccagtagagcctatcaccacgatgatcacctcctcgccggtggttcacggttctgccatacttcaacatccagagggcatatggccatggcagctcgacttattgtcatcatcagcaccagatggtag

SEQ ID NO: 82964 - DNA, 1082 bp, Zea Mays
atcacctcctcgccggtggttcacggttctgccatacttcaacatccagaggcatatggccatggcagctcgacttattgtcatcatcagcaccagatggaggaggatgagcagctacaccaacaacctcaaaattttgatgggcgacggtcgacttctgggctcgaagaggttattatgggatgtagttcgaggaggtccaaaagagcggaagcatctggcccaggtggaaacaaggagagcagaggatggcagtacccatccttctggccatctggcagccaacaggatcatcatgggtagaagagcagcaacacatccctgcctggcactgtatgtgccgcaccacctttgcatgaagccaaccttggagagggcaaccgaaagcagagagacacctgacatcatcattactagctaccatgataagatcatcatataaacctagctacactgtcgtacctaccatatctaggcttacaatactttagcgtgagtgcagtcgcttccaagaagcaaacaaaatcagggcaaagttatatcaaaacaaaaacaaaaaaatacaaacccagccttttgccgcccccgctctctctctctctctcgatacactctttggtccccagctcgtatacgcttctagctactttctcttcgaccaatgcgcgcgtatggatcggataacgtacggggatggaacgaagtttcatttgaagcgcgctcaaatttacatgctgcatgtctaaagagacaaagatggtattggaggctaggaggaaaagcaaaagggagagaagaatcatgaaaaagaaaagcaaggggagcgaggcgaggccgggggacatgaaacaaaggtgacgtcacatgagaacggtcagtagttaaccgtcggttgtgcacagtggtcgatgcaaaatcattaccacaatcatggttcatccttgccttttccttttttttcccctcccccttataaaatgctgctaccgtagtttagtatactaccactactatacaattatcccattgcattcttattattgtagtttgtttgcgttgatgcatgcattgttggatctgtt

SEQ ID NO: 82965 - DNA, 1756 bp, Zea Mays
atcactcacaagcacgacaactggactggctggggctgccggcgggggtcaagttcgacccgacggatcaggagctgattgagcacctgcaggccaaggtccggcctgcctcggcagcggcgccgtcgcaccctctgatcgacgagttcatacccaccattgaaggggaggacggcatatgctacacccatcctgagaggctgccaggtttgacgaaggacggcctgagcaggcacttcttccaccggccatccaaggcttacactaccggcactcgcaagcgccgtaagatccagccgcccgtagccgatgcctcatcatcctccgccctgcccgcgcagcagcagcatcagcagcagcagcggagcgagacgcggtggcacaagaccggcaagacgcggccggtggtcgtcgccgggcggcagcgcgggtgcaagaagatcctggtgctctacacgaacttcggcaagaaccgcaagcccgacaagaccaactgggtgatgcaccagtaccacctcggcgacaaagaggaggagcgcgagggcgagctcgtcgtgtccaagatcttctaccagacgcagccgaggcagtgtggcgtcgcggcggagcctgccgccacagccgcctcctctgacacggtggaggaggctgctgacccgccggcgccggagggcttggtagtgccgccaccaccagatgtagccggtgccttccaaggcgccgctggcattgatgagttcagctttgcgcagttcaggagcagcttcgaggaggaggaggatgagcagctacaccaacaacctcaaaattttgatgggcgacggtcgacttctgggctcgaagaggttattatgggatgtagttcgaggaggtccaaaagagcggaagcatctggcccaggtggaaacaaggagagcagaggatggcagtacccatccttctggccatctggcagccaacaggatcatcatgggtagaagagcagcaacacatccctgcctggcactgtatgtgccgcaccacctttgcatgaagccaaccttggagagggcaaccgaaagcagagagacacctgacatcatcattactagctaccatgataagatcatcatataaacctagctacactgtcgtacctaccatatctaggcttacaatactttagcgtgagtgcagtcgcttccaagaagcaaacaaaatcagggcaaagttatatcaaaacaaaaacaaaaaaatacaaacccagccttttgccgcccccgctctctctctctctctcgatacactctttggtccccagctcgtatacgcttctagctactttctcttcgaccaatgcgcgcgtatggatcggataacgtacggggatggaacgaagtttcatttgaagcgcgctcaaatttacatgctgcatgtctaaagagacaaagatggtattggaggctaggaggaaaagcaaaagggagagaagaatcatgaaaaagaaaagcaaggggagcgaggcgaggccgggggacatgaaacaaaggtgacgtcacatgagaacggtcagtagttaaccgtcggttgtgcacagtggtcgatgcaaaatcattaccacaatcatggttcatccttgccttttccttttttttcccctcccccttataaaatgctgctaccgtagtttagtatactaccactactatacaattatcccattgcattcttattattgtagtttgtttgcgttgatgcatgcattgttggatctgtt

SEQ ID NO: 82966 - DNA, 1170 bp, Zea Mays
caacttcaaagtaaaaacgacctgagattcagcttgatggagcacaagaactcaagcaagatcaatgactaaggtgttgtctgaacagaaaccggactcaggcatctgacagatgggagaattcatggatcggagtacagttttggagcacatgatcacccatcgagtggagtttttgaggtggaaccaaagagctgcccagggttcatatacagatgtacggttttcataggccacacaactctgaattccttggaatttcgagaattcattcagaggatggcctcagaataccatggagatacctaccacctcatttccaagaactgtaaccactttacagatgatcttagcaccagattaacaggaaaatcaattcctggttgggtcaatcgacttgcaaggctaggcgccttttgcaattgccttctaccagaaggcttgcggcttgagtcaactgaaacaaagcatcttggagactgtcgtttctcagatggttccaataccaccagcaacgataactctgacgaagatgaattggaagataaacacctgcttccgactacttctgttggtgaagacacaattgtaaaagaaattcacagatgaatttctggtgaagccttgcagtgatttctctatgtattctaaaatgtaatgggtttcaatactcattgtgcagcttgtcgttcattatgtatattgtcattgtattttaaaatgtcatgtgctctttctgttgtgctctgaaattttgtgtacatttggtgggtagtctgtatttatggttgagttcatttcacttgttgaatgattgaataggtggatgaatgagagaataaaaattcttatgtagaagcactcttgacttgattttcaaattttaacccaaagacatcaaaagctctaaaaggggtcaaatcaagaatacttcaatcaaatgtcgtttggttgttccaaacaaattcttggggagattatgatctatcaggccaaaataaacttgatttggactttggaaagtacgaggaaaaaacaaacgggaggcacaagagtagagcggtggcgccactcaaatgttttggcattgttgggacgcgacagatctccccatccaggtaccaagtaaggcttgagtattttctctataattctgatctctaaagtggg

SEQ ID NO: 82967 - DNA, 1191 bp, Zea Mays
ccatggactcactttgcagatacacacctatattctattgctattcggaccacattctcctgaccccaccgttcagtcaatgtaccgtgaacctctcccggaacacgctctcgatccgctcggttggtcgtcgtgtcgactgttcatggatcggagtacagttttggagcacatgatcacccatcgagtggagtttttgaggtggaaccaaagagctgcccagggttcatatacagatgtacggttttcataggccacacaactctgaattccttggaatttcgagaattcattcagaggatggcctcagaataccatggagatacctaccacctcatttccaagaactgtaaccactttacagatgatcttagcaccagattaacaggaaaatcaattcctggttgggtcaatcgacttgcaaggctaggcgccttttgcaattgccttctaccagaaggcttgcggcttgagtcaactgaaacaaagcatcttggagactgtcgtttctcagatggttccaataccaccagcaacgataactctgacgaagatgaattggaagataaacacctgcttccgactacttctgttggtgaagacacaattgtaaaagaaattcacagatgaatttctggtgaagccttgcagtgatttctctatgtattctaaaatgtaatgggtttcaatactcattgtgcagcttgtcgttcattatgtatattgtcattgtattttaaaatgtcatgtgctctttctgttgtgctctgaaattttgtgtacatttggtgggtagtctgtatttatggttgagttcatttcacttgttgaatgattgaataggtggatgaatgagagaataaaaattcttatgtagaagcactcttgacttgattttcaaattttaacccaaagacatcaaaagctctaaaaggggtcaaatcaagaatacttcaatcaaatgtcgtttggttgttccaaacaaattcttggggagattatgatctatcaggccaaaataaacttgatttggactttggaaagtacgaggaaaaaacaaacgggaggcacaagagtagagcggtggcgccactcaaatgttttggcattgttgggacgcgacagatctccccatccaggtaccaagtaaggcttgagtattttctctataattctgatctctaaagtggg

SEQ ID NO: 82968 - DNA, 930 bp, Zea Mays
cttctccttcaccatagcgagcgtgagcagaaccataaccgccagataagaaatgaacttcgtgcttcccggtaagaaaatcaaaccagactccgcagggctggcatggattctggtcctggcctcgttccttttttaccataaaactgggcatcgcaccacctggttctatcaaatcaccggcgtgaccgcgtgagttgaagtcagagaaagagagagagctgtaagcggctgccaccatcgccaaagacaacccctgctgcgccgccggttcgacctcggttatcggccctggtggtacaccaggagggcgggtgcctaagacgtcaagagcaacggcgtaccgcctcgctattgccgatcggagatggatggtcgtccgtcgtcgaaggcacccatttgtgttcggaaagtcgaagcgacctaggatgatcactggtgtgtagcgaatctgaaggctttttcctggagcacgaagatgtccggactcgagtagggtcgatcttagctagcggccgtggatccgcctccttccgtggaccggccccaccataacgctttcgctggtctccgtcatcgcgcatgggcgacgccatcactagcggccaggggtgggagacggcccctacgccgtcaaatcggggatgtgtggtcctgattaaaagctggataccctttcgtgcattcaatccgggccaatggatcagatcgagcggtttcgattggatcacacctcattaaatcgtgggcatggattgtggatcccgtggctataaaagtgtatcacttcataatctatctgtagccgtcaaatcgagatctaagggatctcttatgcctgtaccccttcgtcgtgtggtgtttgctaaagagtccccggcttatttacaaatcaacccgccatccccatatgtataaagaccattgaac

SEQ ID NO: 82969 - DNA, 2205 bp, Zea Mays
cgcaaagcaaagagccaccgcatccacacccacacctcaccccccaccacacgcacgcacgcacgcaccaacataggcaaaccattcgttctccctgctgccgttttattaggaaactctcccctttccgttttagcttagtgtccagctgcaaacttctccccccagcttctcttgctcagtgtgcatctctctttgtatttcactgtgctggcctgctttgttccttcgttctggttactattggttgctgcttccaagtgacgtaccagagtggtggttggcgtttcagtatgatttgataaggttacctttgcgtataggagtatttttctttggtggggaggtgcggtttcaggcccttctttttttaaaaaaaaatcggtatctagttatctacaacgtttgacacctcctcccggacctcaagatgaccggcaacgcgtcttatcagcatctgggactgggagtcgacgccacgatgcgcagctgcttcgccagcggcgacggcagtgttatcagcagcgccgacgcgcccttcttccacgtcccggagtacacactgcacggcggcggcggctttgggtttggcgaacccgcagcggacgtcgccgcctcgagcttcttggcggatggttcggtgctgctcgccggccagctgctccgtgccaccgcactgcagagcgtgtcgccggaggagaggcacggtgcctactacggcgtcacgggcgggtcgtcgtcgtacggcccgtcgccctgggatgtcaccgttgctcacgcgcccagcaggatgaccaagcagcctgtcgctggagagccggaaggcggctggatccacgagtcttcgtactactgcccggcgacgtggttctctggcgacggcttccgggacccgttcgccggggcggcggcgagcgagttgtcgctcaggctgcgcgctgggtcctccccgacggcaggtgcggcgagcgtgagcctgccggatcagtcctcggaggtgagctgctccggcttgacgcattggagtagcggcggcggccccggcatgttccagcttccttgcggcggcgccggacaggtggcggtggcggcacgtccgggccccatgcacttctcgcaggtcctgtcgcggtggtccgggtacgcggacgtcacgcagcaggtgttggacgagttcgtcatccgcctgctgcaagacgtggccgggttcgccggcggcggtgaggcgagctgcccgctgccatcgtcaagttattgctccaagacgacgtcatccaacccgaacccgtcggtgtttgttagctcggaagagcaccacaatgagctcaagaacgacttccagaaactgctacagataatggaccaacggtgcaagcaatgcctggacgagatccagaatgcggcgtcgaagtacggcagccttgtgcgcccgggcggcggcggcggcgccctctcgacgctgtttgcgcagcgcgcggtgtcagcgacgcaccggaggctcagggcgcggatcaccggcgagatcgcggcggccacgcggggaggtaatcagccgtcgtcgtcgtcgtcgctgtcgctggccgacagggagcgcagctgggagtcggccttcatccagaagcactgggcgctgcggcagctcaggcgcggcgaccagcaatcgtggcgcccgcagcgcggcctgccggagaagtccgtggccgtgctcaaagcctggatgttcgagaacttcctccgcccgtacccgagagacaaggagaaggagatgttagcagccaggagcggactgagcaggagccaggtacagtttcttcatgcttttcagcctgcctcagaccagatctcggcaactctaactggttcatcgctgcgtttgttccatgtgcattggcaggtctccaactggttcatcaacgcccgcgttcggctgtggaagccgatgatagaggagatgtacgaggatctcaagaaggcctccgcaggaataatggaggcctgaacaattaagtcagcagcagggatgcagtcatatctcagtgggtgctcaggtgatggaacggcattacagtttacagcaccacatgattgctggtaacagtgaaaaggtttgcccggaagtacacaagcatgccgctgttgctgattggatgtttgtgcattctactgctaaaccatgttgcagtcacgctttcccaagttgttcac

SEQ ID NO: 82970 - DNA, 1244 bp, Zea Mays
ccttttggcatattgatatgtttcataacatgttctttttccttaacagaaactgtacaggcgttatgttgtgaagaggaatcaacgcaaacgccagagagaggaagatctaaagaaagaagagaagaaatcctcagagaagcgatccaagaccatgcatgagactataattgaaagtgttgataacctaggaggcagcgttgaagtgacaaaagaggatgaagaaaagatgagcaaagatcaatcagcaaatgttcatgctgaactgccaaaagagggtcagataaaacttggcacagatcatccaattgttaaccatggcgaaccagcaaaagagggtgatgaaaatatgaacactgatcattcagaagctgttctcgataaacctgcagctgatgcaaatatggcagaggaagatcctgaatacgaggaagatcctgaagaaatagaaatatatgaagatgatgaggacatggatgatgctcatgctggagcacagaatggagaacagaatgagaacacaaatgacagagatgttaagccagaagtagcgacagcagatggtggaaataacagaagttcaacacaacctgaagtaggaaatattactaatacccatgaaagagctgcttcaatggaggacaaactgtctgtggcagagaaaggagattctgtggaaggtggagaaaaggtagttagtaaggaggttaagccagcaaaagatgaggtggtcgacaaggacctgttgcaggcctttaggtactttgacataaatagagcaggatatctcaagatggatgatttaaaatgtattcttcacaacttgggcaagtttttatcaagcagggacgtgaagttgctcttgttgagagcaattctgcaagggacactcgcataatctatcctaagcttgtgaagatagttgacctgtaatctggcactgcttggcccatgtgagccccttgaagttaactacgctatcatcgatgagtcagttatgaaaaactattttctttatttataaatggcttcactgtcattttttggttacctgttcgtactattatgttgtacggagctacttttgctttcttgttgaatatttttttattgtaattgtggagtcattaacttggcaaccaatgcttattgtaagcatcaaggattatcacatttcataaatgagggcacttgaaaaaggcgacgaacattgtattaaaaaccaaacatccaaaaaataaaaa

SEQ ID NO: 82971 - DNA, 1231 bp, Zea Mays
ctcaagtgaccttttcttcatgtcaattcctgccagtcatatgtttccgttgtttcagtcacttcttatggttggcggacttggtggcaaaggtccagcttcttcaagtcttcctagtttcccaactcgtccaacttctctccctgagtcgtccaacttctcatctgcacctgtggggtctggcctggcaaggccaaatgatgactatatggctgtgcgtggttatgcacagaagctagaccaatatagcactgattatccactagagagacgtatgtatggtgaacactcagccaatcttggtaggagagatggtctcagtgatttggatagaagatatactgatcagacagctactggtcatcaggttcatgatcatatggagcagagttcatcaatgcgccaccagcagctcctgaaaggtcagctgcagcccggatctgatacaaggtttttccatttcgcttcgtggatgatgagagggattatctgtgcttgacaaaacggtatcccagacttgcagttactccagaattttctaagattgtcttgaactgggctaaagaaaacttaaatcttcctctcgatacaccagtgagtttggagcatgatatccatgattcagatgataatgctgatgaaggagcaattatctccactgagaaaacaccaagcttcaatactccagccaccatttggaatgcaaaggtactattgatgagtggcatgagcaaaggtgcctttgctgacataacttcattgagaagtactgaggaacgagttgtgcacttgaacaatatattaaaatttgctttattcaagaaggatcgttctctatttgcaattggaggcccttggaatgcagcaatagatggtggtgacccctcagttgactgttcttgcttgattcaaactgccatcagatgtgttaaagaaatggttcaagttgatctatctagttgcacccactggaaccgttttgtcgaggtacattacaatagaataggcaaagatggactcttcagtcataaagaaattactgttctgtttgtgccaaacttgtctgaatgcttgccttcagtggatatatggaagaataactggattctgtacaaaaaatcaaaggcagaaagggaagaactcactgttaaaaaggaaaagagtcctggtgattcgaaagagcagatgcaagtttcaggggagctgaataagggtaaaagtttagatgctg

SEQ ID NO: 82972 - DNA, 2474 bp, Zea Mays
gcgcgcgagtgaccagtaatataacacacactaatcaaacaccacatatatcttgcgctctccaaatccctcgccgaaagcccgaaacccttccagtggtcttccgccgccaaccctcgccgctcttccgctgccaaccgttgcgccggcccgactctgtcctgaagccgtggcgtacgggggattcacttccattcgacgccatctggcctcctcttccatctcgcgggcgcttgttcgtgcgcgtggattgttttatcagggtctcgtgcccgtgccctaggtgggcgcgtccgctatgtttcctcccaaagggcccaatcactatggccagcagctgccttacggcgtgcagcagccgtacggccaaatccctagtagcactggatttgcagccccggcagcggcaggtggcactgatggtggtcggtttggtgcgcgtgcaggacaaggggctgctgcgcagtatggagggccttatgcatcagtatatggcacacaacaggttggcggacttggtggcaaaggtccagcttcttcaagtcttcctagtttcccaactcgtccaacttctctccctgagtcgtccaacttctcatctgcacctgtggggtctggcctggcaaggccaaatgatgactatatggctgtgcgtggttatgcacagaagctagaccaatatagcactgattatccactagagagacgtatgtatggtgaacactcagccaatcttggtaggagagatggtctcagtgatttggatagaagatatactgatcagacagctactggtcatcaggttcatgatcatatggagcagagttcatcaatgcgccaccagcagctcctgaaaggtcagctgcagcccggatctgatacaagacaagccgattactttgcaggaagatctgctccagcccatcaagcatcccaggaaattggtgtatatggaagagttgaagctgataatcgcaacatatccattcttgggaatgctccatatggaagacagcaatcagcctcattgttggaaggagctccaaggacaaacatcgacagcctctatggacaaggatcgtcaggcactggttttggtgcaggtcttcctcctggacgtgattatgcctcagtgaaaggcctgccccatccatcttcagaccctgatcaccgagatagcatcttaccccgtgtacatccagccgtctcaatggttgatgatcgtagagttgatcgaattggttatcgtcgtgaactggatctaagagatgaggaacgcagaagggacctaatactggaaagagagaaggaacttgaacgggaacgggaacgagaacgggaacgtgagttacgggactttcgagatcgtgaaagggaaagagaacgtgaaagggaaagggatcatgaaagactactaagagaacgtgaaagagaaagggaacgcgaacgcgaacgtgaaagagagcgcgaaagagaacgccttcgtgagcgccgggagaaggagagagagcgggataggaagcacagaactgatccaaggcgggagcacactccacctagaggccctggtgatcggcggcggtcttcttctgttagatctgagaagcctgtacggcgaatttcccctcgacgtgatgctgtgcataggcatcgttcacctgttaaagaaataaagagagaatatatttgcaaggtttttccatttcgcttcgtggatgatgagagggattatctgtgcttgacaaaacggtatcccagacttgcagttactccagaattttctaagattgtcttgaactgggctaaagaaaacttaaatcttcctctcgatacaccagtgagtttggagcatgatatccatgattcagatgataatgctgatgaaggagcaattatctccactgagaaaacaccaagcttcaatactccagccaccatttggaatgcaaaggtactattgatgagtggcatgagcaaaggtgcctttgctgacataacttcattgagaagtactgaggaacgagttgtgcacttgaacaatatattaaaatttgctttattcaagaaggatcgttctctatttgcaattggaggcccttggaatgcagcaatagatggtggtgacccctcagttgactgttcttgcttgattcaaactgccatcagatgtgttaaagaaatggttcaagttgatctatctagttgcacccactggaaccgttttgtcgaggtacattacaatagaataggcaaagatggactcttcagtcataaagaaattactgttctgtttgtgccaaacttgtctgaatgcttgccttcagtggatatatggaagaataactggattctgtacaaaaaatcaaaggcagaaagggaagaactcactgttaaaaaggaaaagagtcctggtgattcgaaagagcagatgcaagtttcaggggagctgaataagggtaaaagtttagatgctg

SEQ ID NO: 82973 - DNA, 1666 bp, Zea Mays
gcgcgcgagtgaccagtaatataacacacactaatcaaacaccacatatatcttgcgctctccaaatccctcgccgaaagcccgaaacccttccagtggtcttccgccgccaaccctcgccgctcttccgctgccaaccgttgcgccggcccgactctgtcctgaagccgtggcgtacgggggattcacttccattcgacgccatctggcctcctcttccatctcgcgggcgcttgttcgtgcgcgtggattgttttatcagggtctcgtgcccgtgccctaggtgggcgcgtccgctatgtttcctcccaaagggcccaatcactatggccagcagctgccttacggcgtgcagcagccgtacggccaaatccctagtagcactggatttgcagccccggcagcggcaggtggcactgatggtggtcggtttggtgcgcgtgcaggacaaggggctgctgcgcagtatggagggccttatgcatcagtatatggcacacaacaggttggcggacttggtggcaaaggtccagcttcttcaagtcttcctagtttcccaactcgtccaacttctctccctgagtcgtccaacttctcatctgcacctgtggggtctggcctggcaaggccaaatgatgactatatggctgtgcgtggttatgcacagaagctagaccaatatagcactgattatccactagagagacgtatgtatggtgaacactcagccaatcttggtaggagagatggtctcagtgatttggatagaagatatactgatcagacagctactggtcatcaggttcatgatcatatggagcagagttcatcaatgcgccaccagcagctcctgaaaggtcagctgcagcccggatctgatacaaggtttttccatttcgcttcgtggatgatgagagggattatctgtgcttgacaaaacggtatcccagacttgcagttactccagaattttctaagattgtcttgaactgggctaaagaaaacttaaatcttcctctcgatacaccagtgagtttggagcatgatatccatgattcagatgataatgctgatgaaggagcaattatctccactgagaaaacaccaagcttcaatactccagccaccatttggaatgcaaaggtactattgatgagtggcatgagcaaaggtgcctttgctgacataacttcattgagaagtactgaggaacgagttgtgcacttgaacaatatattaaaatttgctttattcaagaaggatcgttctctatttgcaattggaggcccttggaatgcagcaatagatggtggtgacccctcagttgactgttcttgcttgattcaaactgccatcagatgtgttaaagaaatggttcaagttgatctatctagttgcacccactggaaccgttttgtcgaggtacattacaatagaataggcaaagatggactcttcagtcataaagaaattactgttctgtttgtgccaaacttgtctgaatgcttgccttcagtggatatatggaagaataactggattctgtacaaaaaatcaaaggcagaaagggaagaactcactgttaaaaaggaaaagagtcctggtgattcgaaagagcagatgcaagtttcaggggagctgaataagggtaaaagtttagatgctg

SEQ ID NO: 82974 - DNA, 1059 bp, Zea Mays
caacccttgacatggtctagaaacacattaccatgacacaccatgttatagtgaagctgttatgcttttgtaaggaacatcatatacaaaccaaccatggatctgtatctgttgccatatatggtgaacatgataagcctgctcttattacctacccagatattgctttgaaccatatgtcttgcttccaagggctactcttctgtcctgaagcagcttcattgctgcttcataatttttgcatttaccatatcagccccccaggacatgagttaggagctgctccgattttgccgagcacacctgtggcatctcctgatgacttagcagatcaaatcgcagacatacttgatttttttggactggattcggttatgtgcttaggtgtcactgcgggcgcatacattcttactctgtttgcaacgaagtatagggagcgagtactaggacttattctcgtttcacctctatgtaaagctccctcatggtctgagtggttttataataaggtaatgtcaaatttactgtattattatggcatgtgtaatgtcgtgaaggatattttgttgcagcgctactttggaaagggagtacgtggaggctcagctgaacctgaatcagatattgtgcaggcttgcagaagttttctagatcaacggcagtgtgtgaacgtgtggcgatttatccaaactatcaacgagagaaaagacttgacagagaacctgaagcagctacagtgcaggacactaatttttgttggtgagaattcccagttccatgctgaagctgttcacatgactgcaaagcttgataggcgatatagcgctcttgtggagtacaaagcttgtggctcggttgtgacagaggagcaacctcatgcaatgctgataccaatggagtactttctcatgggatatggactgtacaggccaagccagataaactgtagccctcgtagccctctgaatccgttttgtatatcaccagagctccctctctcctgagagcatgggggtttaagctaagcccattcaagaacgcgaggctaaccttaatgca

SEQ ID NO: 82975 - DNA, 1118 bp, Zea Mays
tggaggtcaagaaagatattagctctaatctcctatctccctgtcttcactaagcctgcagccgaggatttacctcgccggagaagacgaccgacggctacgaactacatagctgcggtccagctacccgagggaacatcatatacaaaccaaccatggatctgtatctgttgccatatatggtgaacatgataagcctgctcttattacctacccagatattgctttgaaccatatgtcttgcttccaagggctactcttctgtcctgaagcagcttcattgctgcttcataatttttgcatttaccatatcagccccccaggacatgagttaggagctgctccgattttgccgagcacacctgtggcatctcctgatgacttagcagatcaaatcgcagacatacttgatttttttggactggattcggttatgtgcttaggtgtcactgcgggcgcatacattcttactctgtttgcaacgaagtatagggagcgagtactaggacttattctcgtttcacctctatgtaaagctccctcatggtctgagtggttttataataaggtaatgtcaaatttactgtattattatggcatgtgtaatgtcgtgaaggatattttgttgcagcgctactttggaaagggagtacgtggaggctcagctgaacctgaatcagatattgtgcaggcttgcagaagttttctagatcaacggcagtgtgtgaacgtgtggcgatttatccaaactatcaacgagagaaaagacttgacagagaacctgaagcagctacagtgcaggacactaatttttgttggtgagaattcccagttccatgctgaagctgttcacatgactgcaaagcttgataggcgatatagcgctcttgtggagtacaaagcttgtggctcggttgtgacagaggagcaacctcatgcaatgctgataccaatggagtactttctcatgggatatggactgtacaggccaagccagataaactgtagccctcgtagccctctgaatccgttttgtatatcaccagagctccctctctcctgagagcatgggggtttaagctaagcccattcaagaacgcgaggctaaccttaatgca

SEQ ID NO: 82976 - DNA, 1003 bp, Zea Mays
cctggttggataggtcaggaacatcatatacaaaccaaccatggatctgtatctgttgccatatatggtgaacatgataagcctgctcttattacctacccagatattgctttgaaccatatgtcttgcttccaagggctactcttctgtcctgaagcagcttcattgctgcttcataatttttgcatttaccatatcagccccccaggacatgagttaggagctgctccgattttgccgagcacacctgtggcatctcctgatgacttagcagatcaaatcgcagacatacttgatttttttggactggattcggttatgtgcttaggtgtcactgcgggcgcatacattcttactctgtttgcaacgaagtatagggagcgagtactaggacttattctcgtttcacctctatgtaaagctccctcatggtctgagtggttttataataaggtaatgtcaaatttactgtattattatggcatgtgtaatgtcgtgaaggatattttgttgcagcgctactttggaaagggagtacgtggaggctcagctgaacctgaatcagatattgtgcaggcttgcagaagttttctagatcaacggcagtgtgtgaacgtgtggcgatttatccaaactatcaacgagagaaaagacttgacagagaacctgaagcagctacagtgcaggacactaatttttgttggtgagaattcccagttccatgctgaagctgttcacatgactgcaaagcttgataggcgatatagcgctcttgtggagtacaaagcttgtggctcggttgtgacagaggagcaacctcatgcaatgctgataccaatggagtactttctcatgggatatggactgtacaggccaagccagataaactgtagccctcgtagccctctgaatccgttttgtatatcaccagagctccctctctcctgagagcatgggggtttaagctaagcccattcaagaacgcgaggctaaccttaatgca

SEQ ID NO: 82977 - DNA, 1375 bp, Zea Mays
gcgaaggccaaaaactccaagatgcgaaggtgggaaagcaagcaagcggcggccggagcatcttggagacaggaagaaggggtggtagtaggtgaaaccggaggcggcaggatagggagagggagcgagagtagaggccacgcctgcttgacagcaaggcccgtgcgctcggcggcggcggcggcggatatgggcgactctggcggctctgttgtgtcggtggacgtcgagcgcatctccttcggcggcaaggaatgttgtcatgtggggactcaagtatgcccggcgccgtacggctagggatgtatggcgggtggctgagcgtgcggcacaggtacaagccgagaaaagcaacacgctggaagcaaccggcctggttggataggtcaggaacatcatatacaaaccaaccatggatctgtatctgttgccatatatggtgaacatgataagcctgctcttattacctacccagatattgctttgaaccatatgtcttgcttccaagggctactcttctgtcctgaagcagcttcattgctgcttcataatttttgcatttaccatatcagccccccaggacatgagttaggagctgctccgattttgccgagcacacctgtggcatctcctgatgacttagcagatcaaatcgcagacatacttgatttttttggactggattcggttatgtgcttaggtgtcactgcgggcgcatacattcttactctgtttgcaacgaagtatagggagcgagtactaggacttattctcgtttcacctctatgtaaagctccctcatggtctgagtggttttataataaggtaatgtcaaatttactgtattattatggcatgtgtaatgtcgtgaaggatattttgttgcagcgctactttggaaagggagtacgtggaggctcagctgaacctgaatcagatattgtgcaggcttgcagaagttttctagatcaacggcagtgtgtgaacgtgtggcgatttatccaaactatcaacgagagaaaagacttgacagagaacctgaagcagctacagtgcaggacactaatttttgttggtgagaattcccagttccatgctgaagctgttcacatgactgcaaagcttgataggcgatatagcgctcttgtggagtacaaagcttgtggctcggttgtgacagaggagcaacctcatgcaatgctgataccaatggagtactttctcatgggatatggactgtacaggccaagccagataaactgtagccctcgtagccctctgaatccgttttgtatatcaccagagctccctctctcctgagagcatgggggtttaagctaagcccattcaagaacgcgaggctaaccttaatgca

SEQ ID NO: 82978 - DNA, 1442 bp, Zea Mays
atgatatttatttacagcatactcagagcctcaacggtcaaagtgtacagcggaaaatgtgctcttgaccggcggtagatatacgaggacgcttggcctgtcggtttcagcttcccccgttagctggactggatcgtaataatcggaaacttgtcagggctaaaacgcaggtagcgctgcgctgctgaagacgctcggtttataagcgaaggccaaaaactccaagatgcgaaggtgggaaagcaagcaagcggcggccggagcatcttggagacaggaagaaggggtggtagtaggtgaaaccggaggcggcaggatagggagagggagcgagagtagaggccacgcctgcttgacagcaaggcccgtgcgctcggcggcggcggcggcggatatgggcgactctggcggctctgttgtgtcggtggacgtcgagcgcatctccttcggcggcaaggaacatcatatacaaaccaaccatggatctgtatctgttgccatatatggtgaacatgataagcctgctcttattacctacccagatattgctttgaaccatatgtcttgcttccaagggctactcttctgtcctgaagcagcttcattgctgcttcataatttttgcatttaccatatcagccccccaggacatgagttaggagctgctccgattttgccgagcacacctgtggcatctcctgatgacttagcagatcaaatcgcagacatacttgatttttttggactggattcggttatgtgcttaggtgtcactgcgggcgcatacattcttactctgtttgcaacgaagtatagggagcgagtactaggacttattctcgtttcacctctatgtaaagctccctcatggtctgagtggttttataataaggtaatgtcaaatttactgtattattatggcatgtgtaatgtcgtgaaggatattttgttgcagcgctactttggaaagggagtacgtggaggctcagctgaacctgaatcagatattgtgcaggcttgcagaagttttctagatcaacggcagtgtgtgaacgtgtggcgatttatccaaactatcaacgagagaaaagacttgacagagaacctgaagcagctacagtgcaggacactaatttttgttggtgagaattcccagttccatgctgaagctgttcacatgactgcaaagcttgataggcgatatagcgctcttgtggagtacaaagcttgtggctcggttgtgacagaggagcaacctcatgcaatgctgataccaatggagtactttctcatgggatatggactgtacaggccaagccagataaactgtagccctcgtagccctctgaatccgttttgtatatcaccagagctccctctctcctgagagcatgggggtttaagctaagcccattcaagaacgcgaggctaaccttaatgca

SEQ ID NO: 82979 - DNA, 1498 bp, Zea Mays
cacattagatcattcagtttttttccctggtcgcccacttccctggtgctcgcccttgcacttccctggccggcgcccctccatggtcgagctcacccctgcagggagcccctcccatggcgcctagtcctcttcccatgtcgagctcacccaaccaatcgtctccatcgcaggtgttgtgttccccttccctttcctcaagtttggtccttggcgcccaagcttctatgtccctacagcacgcacgtcgttgcccctacccccatggtcggccgacctcgtcagtgagcccctggcgctaccctgcagctcgccctcaagcctagggtcttgctgttttcctttgccccacgcggatgttgtagccgggctatgtctctccctgtcgtagcaccccgcaaatgttttgttcatcgccggtgagagctgatgtttgttctcttttcaatttgtattgtcatccttttccgtattatgattatgtatgtttatgcatgtaaaatatgtggagtaaaaaccctaggtttgtcgtggaagaggaaagtccatttggcgcgctctaggtgtttggcaaaaagcttaaaccagaaatcgtcatcgcccttacacatatcgatttggtttatgacatgattggataggagctccgaacgcgagccatagacgggagttgatgccactgggcgatggatggtcgcatcctcaggacctcggcgtgcaacagtagcggctgtcatttttctcatcgcctacttcaatagcctacaatattagcagtaccttgctttttacttcacaagaaaaggttggccgaggtccctcctctagcgcaaggatttctactgcaacgattgcaacacacacagcaggttgtggaaactgagatcattgtaactcaaatgagagcttggcacttagcatatagacgcctctagaaccaatctagaattactgtgaggaaaaacggatatagagtgataaaaggcattaatgtaagtactacataaatgtactacttgtattttttttaataatcaatgcttcaaaagtctatatagatgctgacgggtgtcatggttttttcattattcgaattgtgtatgcaactactgtagcatatcagtgaccttccgagaagatacaatggtgttcttagtagtaacgctgcttgatttctatagttggagtcatcaaacagctaacatttacacttgaactatttggtgaaatgcttgggagaaagaggtcagcaagaatggagtcatggaacatcggcaggaggggtgcagcagtggcaactgatgtatcccttgaacaatctggttttgacaagatgcaaatcaatctagtgtacactgtattctacacttgcacaaattgtttgactaattacaagattatcttagtgttttggtttggatttaagagtacacttatgtatgaaatattgactggtactcatctatattatattaattatattattattaaatatata

SEQ ID NO: 82980 - DNA, 1425 bp, Zea Mays
ccgattttacccttactttaagataagatgtttagaggttctcctaagatagtagctttacctaaagctgctcaaaagaaggcttctcctaaagctgcaaaatcaaagaaatgtggcggtggtgttgagagagctgcatggaatgttgaattagagaagagtcttgttgacttgttgtttgaacacaatatgcctccacatagggctcaaaatggatggagtccagatgcttggaataaaatagtttctaaattccacaagaagcatgaatatgttacattcaacaagatccaaattcaagaaaaggagagagaattaaaaagggaatacaagatattgaaggaggcaagaaaacaaagtggagtttcttggaatgaaaaaagatgcatgatcattgctgaaccaacgatatgggacaacattatcactacatttcctagagctaagaagttccgcaataagtcttttccaatctttgatgccttgggtgaattatatgatggtcacattgcacaagggacttggaacattacatctactcaaccactacaaaattctgatgatggagagaaatttaaaaccatagaagtggaatatgaagatactaatgaaccacaagtagatgcgagaatagaacaagatgaagatatagtaattgttgaaagggttgaacataggttacctaaaaggtcaggtgcaccaactgtcaatcaagagaaggagacaaagagagtaaggaaagatgcactagaagggctgatagggaggtaccttgatgtgaaaacaaagcaagttgcagatgaggctacacaatcaacaaaagagaaggaagttgctcaagataatgatttttctatcaagaggtgtatttctgttcttaagactatggatatcacaagagatgagaagatcaaagcagcggaggtgtttaacacaccaaattacagagaaacatttatttgttttaatgatgatgagccagaagtcgctctcctttggccaagggggaagatggataaactctaaagggtccaaggataaagatattatcaacatctctagaggaagagaaagtcaagtcacatcttcagtctgtgcaggctgtttattcagtttcagtcaataaggcttagcttgtagtgtgtggtctaaatcttgcatgtgcatgtagagactgtttcttcggtctgtgcaggctgtgcagttttcagcttgtttcttcagtcgtttcagacagttttttcagttttctgtgcagacatgtgctcgtctctactttgtcaaaaaaaagatagaattattcagactgcagttttcagcttgtttgttgattgggtttattgagttttcagttttcagatagcgttattgagttttcagttttcagattgttccatatggaataaacgaataaatatttattgg

SEQ ID NO: 82981 - DNA, 1452 bp, Zea Mays
atcaacgctaactggagaggaaaagataagatgtttagaggttctcctaagatagtagctttacctaaagctgctcaaaagaaggcttctcctaaagctgcaaaatcaaagaaatgtggcggtggtgttgagagagctgcatggaatgttgaattagagaagagtcttgttgacttgttgtttgaacacaatatgcctccacatagggctcaaaatggatggagtccagatgcttggaataaaatagtttctaaattccacaagaagcatgaatatgttacattcaacaagatccaaattcaagaaaaggagagagaattaaaaagggaatacaagatattgaaggaggcaagaaaacaaagtggagtttcttggaatgaaaaaagatgcatgatcattgctgaaccaacgatatgggacaacattatcactgtaagaagcatatgctttacccagacatttcctagagctaagaagttccgcaataagtcttttccaatctttgatgccttgggtgaattatatgatggtcacattgcacaagggacttggaacattacatctactcaaccactacaaaattctgatgatggagagaaatttaaaaccatagaagtggaatatgaagatactaatgaaccacaagtagatgcgagaatagaacaagatgaagatatagtaattgttgaaagggttgaacataggttacctaaaaggtcaggtgcaccaactgtcaatcaagagaaggagacaaagagagtaaggaaagatgcactagaagggctgatagggaggtaccttgatgtgaaaacaaagcaagttgcagatgaggctacacaatcaacaaaagagaaggaagttgctcaagataatgatttttctatcaagaggtgtatttctgttcttaagactatggatatcacaagagatgagaagatcaaagcagcggaggtgtttaacacaccaaattacagagaaacatttatttgttttaatgatgatgagccagaagtcgctctcctttggccaagggggaagatggataaactctaaagggtccaaggataaagatattatcaacatctctagaggaagagaaagtcaagtcacatcttcagtctgtgcaggctgtttattcagtttcagtcaataaggcttagcttgtagtgtgtggtctaaatcttgcatgtgcatgtagagactgtttcttcggtctgtgcaggctgtgcagttttcagcttgtttcttcagtcgtttcagacagttttttcagttttctgtgcagacatgtgctcgtctctactttgtcaaaaaaaagatagaattattcagactgcagttttcagcttgtttgttgattgggtttattgagttttcagttttcagatagcgttattgagttttcagttttcagattgttccatatggaataaacgaataaatatttattgg

SEQ ID NO: 82982 - DNA, 1558 bp, Zea Mays
ctggaacaaatccacgtgccgcctcacgcggctgagcacgccgcccccgccgcctcgtccctgtctcgccgtcgccgcctcgttcccgtcctgccatcatcgtctcgtccctgcttctcgatcgtacgccgtgagcaataggagttccgtccggcgctggagctgagcctggagattgtccctactcttgtgagagtcgcgaggacaagctttccccctcttgagatccggtgtctaatccatttttcaaggtggtgttgagagagctgcatggaatgttgaattagagaagagtcttgttgacttgttgtttgaacacaatatgcctccacatagggctcaaaatggatggagtccagatgcttggaataaaatagtttctaaattccacaagaagcatgaatatgttacattcaacaagatccaaattcaagaaaaggagagagaattaaaaagggaatacaagatattgaaggaggcaagaaaacaaagtggagtttcttggaatgaaaaaagatgcatgatcattgctgaaccaacgatatgggacaacattatcactacatttcctagagctaagaagttccgcaataagtcttttccaatctttgatgccttgggtgaattatatgatggtcacattgcacaagggacttggaacattacatctactcaaccactacaaaattctgatgatggagagaaatttaaaaccatagaagtggaatatgaagatactaatgaaccacaagtagatgcgagaatagaacaagatgaagatatagtaattgttgaaagggttgaacataggttacctaaaaggtcaggtgcaccaactgtcaatcaagagaaggagacaaagagagtaaggaaagatgcactagaagggctgatagggaggtaccttgatgtgaaaacaaagcaagttgcagatgaggctacacaatcaacaaaagagaaggaagttgctcaagataatgatttttctatcaagaggtgtatttctgttcttaagactatggatatcacaagagatgagaagatcaaagcagcggaggtgtttaacacaccaaattacagagaaacatttatttgttttaatgatgatgagccagaagtcgctctcctttggccaagggggaagatggataaactctaaagggtccaaggataaagatattatcaacatctctagaggaagagaaagtcaagtcacatcttcagtctgtgcaggctgtttattcagtttcagtcaataaggcttagcttgtagtgtgtggtctaaatcttgcatgtgcatgtagagactgtttcttcggtctgtgcaggctgtgcagttttcagcttgtttcttcagtcgtttcagacagttttttcagttttctgtgcagacatgtgctcgtctctactttgtcaaaaaaaagatagaattattcagactgcagttttcagcttgtttgttgattgggtttattgagttttcagttttcagatagcgttattgagttttcagttttcagattgttccatatggaataaacgaataaatatttattgg

SEQ ID NO: 82983 - DNA, 1279 bp, Zea Mays
ctggaacaaatccacgtgccgcctcacgcggctgagcacgccgcccccgccgcctcgtccctgtctcgccgtcgccgcctcgttcccgtcctgccatcatcgtctcgtccctgcttctcgatcgtacgccgtgagcaataggagttccgtccggcgctggagctgagcctggagattgtccctactcttgtgagagtcgcgaggacaagctttccccctcttgagatccggtgtctaatccatttttcaagataagatgtttagaggttctcctaagatagtagctttacctaaagctgctcaaaagaaggcttctcctaaagctgcaaaatcaaagaaatgtggcggtggtgttgagagagctgcatggaatgttgaattagagaagagtcttgttgacttgttgtttgaacacaatatgcctccacatagggctcaaaatggatggagtccagatgcttggaataaaatagtttctaaattccacaagaagcatgaatatgttacattcaacaagatccaaattcaagaaaaggagagagaattaaaaagggaatacaagatattgaaggaggcaagaaaacaaagtggagtttcttggaatgaaaaaagatgcatgatcattgctgaaccaacgatatgggacaacattatcactacatttcctagagctaagaagttccgcaataagtcttttccaatctttgatgccttgggtgaattatatgatggtcacattgcacaagggacttggaacattacatctactcaaccactacaaaattctgatgatggagagaaatttaaaaccatagaagtggaatatgaagatactaatgaaccacaagtagatgcgagaatagaacaagatgaagatatagtaattgttgaaagggttgaacataggttacctaaaaggtcaggtgcaccaactgtcaatcaagagaaggagacaaagagagtaaggaaagatgcactagaagggctgatagggaggtaccttgatgtgaaaacaaagcaagttgcagatgaggctacacaatcaacaaaagagaaggaagttgctcaagataatgatttttctatcaagaggtgtatttctgttcttaagactatggatatcacaagagatgagaagatcaaagcagcggaggtgtttaacacaccaaattacagagaaacatttatttgttttaatgatgatgagccagaagtcgctctcctttggccaagggggaagatggataaactctaaagtttgcttggatttattgtgcat

SEQ ID NO: 82984 - DNA, 4905 bp, Zea Mays
gtgcgttgcggcagcgcacttatattagcctggtcagtacacccaccgtagcctcacacttcgctggggagacgaagctgctagccgatcaggggagaattcttttgtaatggagctgctgcgaccacgcggcgatggttgttgcccgcgcgtgctctcggtttctctgctgctcctcgccgccctgctgtggaagcacgtctctgcggcggcgattaccaggggtgatttcccggaggggttcgtcttcggcgccggcgcatcggcttaccagatcgaaggcgcatgggcagaggacgggaagaagcccagcatctgggacacatacacgcacagtggtcagcgagcgagctagatattcgattgaccgtgatactggagatgtggctgcggaccagtatcaccattacaaggttctcgattgcctggtcaaggcttattccaggtgctagctagtagagtcctagacacagaggagaggatctttttttccctctgtttatcagtgtacttagccatcctatcgtattgttttcgcatgtctgatgatatgccacgtgtttgtagatgggcgtggagctgtgaacccaaaggggttggagtactacaacagcctcatagatgagctcctcagatatggtcgtcatttggtacttcattaattgcaacgttaattaacggcgcctgattccgaatggttttatttccgcgcgtgtaattaacgtgtggcaggaatacagccgcacgtgaccatctatcacttcgaccttccccaggctctccaggatgaatacaacggcctgctcagtccgagaatcatcgatgattttaccgcttacgcagacgtgtgcttccggagcttcggcgacagggtgaagcactggatcacggtgaacgagcccaacatcgagcccatcggcggctacgaccaaggctacctcccgccgcgccgctgctcctacccgtttggactgggcgtcacctgcacccacggcaactccacgacggagccgtacgccgtcgcccaccacctcctgctcgcgcatgcgtcggctgtgtccctctacagacgcaagtaccagcgacgcagaagcccgaggatgtagaagcagctgccagagcaaatgacttctcgcttggatggttcatgcatcccctggtgtacggcgactatccgcccgtgatgaagaggaacgtgggggcaaggctgccgtcgctgacggcccgagactcggccatggtgcgcggctcgctcgatttcgttgggatcaaccagtacggcgcgatcctggtcgaagcagacctgggccagctcgatcgggacctcagagactactacggcgacatggctaccaacttcgtcacggtaccgtttgagagcacagtaacgaggaaccagcaggtgagtccacatgacaaaaccccactagctagctagctagaactcctctgcccagacgaacaatctcttgtggtgcacgtgcaaggtgcctcgacttgggctgcggaaccatgaggcgccgtgggctctgagcaaattgctggaacacctgcagacgcactacgggaaccctccggtgatgatccacgagaacggtgaggccggccaagcgcgcgcgctctctctctctcgtttcagctgccgcgcacatgcacggttcctttcatcccctgagctgatggttccaccaccaccaccaccaccaggagctgggcacgagcccgacccgtccggcgggttcctgtacgacgacgagttcagggcccatttcctgcgggtctacgtcgaggcggcgctcgcttccgtccggaacggctccgacctgcgcggctacttcgtctggtccttcatggacgtgttcgagtttctcttctcctacaggttccgcttcggtctctacggcgtggacttcgccgccgacaaccggacgagtgattggtattgtaactgtgggagaaaacggaaagaaagaaagaaaatatgaagaggaagaaaggacctatcgttgatttgaaagattttttgcaaagagctgctaacaaaaagaaaacccaagagcagactcagggcaatacggatcctatgtccacaaccaaagagagtcaaatgcagttggtggtctatgaaggtcggcctaaatatgcaagcggaagtggggctacttcagtaccacttgagccagagagtgagattggtgattttgcaatttcagattctgaatctaaatctagtgatgaaggaaatgatgagagcacatataacatagagcatgatccaggattgagatctcctatctcagggtatcatatcaatgaccacgattctgtgagaagggcttacattgcattgggaccatgtcgtcctaagatgaagaaagatgattttccacaacacaattgcggaggaatgcgtcgttttcaaccaaagtggtttggtgagttcaactggcttgagtatagtgtgcataaagatgctgcatattgttttgtttgctatttatttaaagatagtgatcatggaggtgatggttttattagcggggggtttcggaattggaacatgaaagacagatttcgtaagcatgctggtgctatcaatagtgctcattgtgaagctgaagagaaatataatttgtttatcaaacctaaaacatcaatccgtgagtcagttgcatcaaacactgttgaattcaaggctcaatatctggctcgtttgacatggtcacttaagtgcattagatttttgttgcatcaggggttggcttttcgtggtcatgatgagggaaaggattcacataataaagggaatttttgagaacttttggaatggcttgcgggaaactttgaagaagttaataaagtggttctaggaaatgcacccaagaattgtcagttgatagatcacaagattcagaaacaactcattacttgttgtgctgatgaaacaacccaatttattatagaggaacttggggatgagtgctttgcaattcttgctgatgaatctagtgatgcatatcagcaggaacaattagctatttgtttgcggtatgtcaatagaatgggagagccagttgaacgatttcttggtcttgtcaaagttgaagatactacatcattaacacttaaagaagcaattcagtctatgcttattaagtatcaattgccattatctaaggtacgtggtcaagggtatgatggagctagtaatatgaagggtcatgttaatggtttgaaaaaattaatcatggaagagtctccttctgcttattatgttcattgctttgcacatcaacttcaactcacccttgtggctgttggtaaggacaatattgattgctagtggttctttggacaacttgcttatttgttgaatgtgcttggaatgtcttgtaaaaagatctctatgcttcgtgttgctcaagctgaatatatgattgaagcattgaaattgggtgaaatagaaactgggcaaggtttgaatcaagagatgggtctagcaagaccaggagatacacgttggggatctcactatagaactgtgatgcatgttatggctttatatccttccatcaagaaagttctctccaagattgggaaagaacataaaggaggtgaatctttaggagctcaaactatgctacaagtatttcaatcatttgagtttgttttcatgatgcacttgatgaatgaaatatttggatacacaaatgacttatgcattgctttgcaaagaagagagcaagatattgtgaatgcaatggatcttcttgaattcactaaggtggaattgagtgttttgagagaagatgatggatggaatgaatttaatggaaaggtcaattctttttgtgagaaacacaaagttaaagtggttgatatggatgggaagtacaagcctatacaaagagataagaagttctataaaaatgccattaattaccaccggtttcatgctgatatgtttttgggtgtcattgataggaaacttatggaacttaatagcagatttgatgaggtaaacacagagttgcttagatgtatggcatgtttcaatcctatcaattcttttgctgcatttaatcaagagaagttggtaagacttgctgggttttatcctcatgactttgagtttgaagaaatgaaccaacttccttttcaattgaatcgatacattgaaaatatgaagagagatgacaatttcaaaaatttgagaagtctagcagagttgtctatgatgtttgtgaaaacacaaatgactcaacggtatgatattgtttacaagcttctgaagttggtattagttcttcctgttgcaactgctggtgttgagagggtcttttcttcaatgaaccacatcaaaagcaagctaagaaataagatgggacaagaattcttgaatggttgtttggttacatttattgaaagagaattcttcttgcaagccaaggataaagacatcatcgctcgttttcaaaatatgaaggatcgaaaacttgtcttataatgtaagcttccttatcatttagatatttattatcctttatatatttcaaatattggctcttatcactagcattgaagaattttattttttgatcaattttatgcccatctaaaacttgatttgtttgttagatattatatgtatgatataaacttgttggttgttcctatgtaatatattacggtattatatatatcgaatagttagactttatatggtattatatataccattttttttacttctatcaattttgaatacccatccttgaaatcctgggcccaccaagggaactttggcataacgacatgcctaagacgaagggttgcaccgatttaaagatgaaaagacagattgatctatgatagtttgtatcataaatgtaatcaattataaag

SEQ ID NO: 82985 - DNA, 4929 bp, Zea Mays
gtgcgttgcggcagcgcacttatattagcctggtcagtacacccaccgtagcctcacacttcgctggggagacgaagctgctagccgatcaggggagaattcttttgtaatggagctgctgcgaccacgcggcgatggttgttgcccgcgcgtgctctcggtttctctgctgctcctcgccgccctgctgtggaagcacgtctctgcggcggcgattaccaggggtgatttcccggaggggttcgtcttcggcgccggcgcatcggcttaccaggatattcgattgaccgtgatactggagatgtggctgcggaccagtatcaccattacaaggttctcgattgcctggtcaaggcttattccaggtgctagctagtagagtcctagacacagaggagaggatctttttttccctctgtttatcagtgtacttagccatcctatcgtattgttttcgcatgtctgatgatatgccacgtgtttgtagatgggcgtggagctgtgaacccaaaggggttggagtactacaacagcctcatagatgagctcctcagatatggtcgtcatttggtacttcattaattgcaacgttaattaacggcgcctgattccgaatggttttatttccgcgcgtgtaattaacgtgtggcaggaatacagccgcacgtgaccatctatcacttcgaccttccccaggctctccaggatgaatacaacggcctgctcagtccgagaatcatgtatgtagtgtagtgtacacacacatgcatgtgcagatggccatggcatgaatggatccccctgaccgccgtgcgtaccgtacgcagcgatgattttaccgcttacgcagacgtgtgcttccggagcttcggcgacagggtgaagcactggatcacggtgaacgagcccaacatcgagcccatcggcggctacgaccaaggctacctcccgccgcgccgctgctcctacccgtttggactgggcgtcacctgcacccacggcaactccacgacggagccgtacgccgtcgcccaccacctcctgctcgcgcatgcgtcggctgtgtccctctacagacgcaagtaccaggtcggtcggtcggtcgatcgatcgatcgatatccatgcactgcaactgcattacatcaactgtgtactagcagggcgagcaaggaggacggattggactgacgttgctggcctggtggtatgagccagcgacgcagaagcccgaggatgtagaagcagctgccagagcaaatgacttctcgcttggatggttcatgcatcccctggtgtacggcgactatccgcccgtgatgaagaggaacgtgggggcaaggctgccgtcgctgacggcccgagactcggccatggtgcgcggctcgctcgatttcgttgggatcaaccagtacggcgcgatcctggtcgaagcagacctgggccagctcgatcgggacctcagagactactacggcgacatggctaccaacttcgtcacggtaccgtttgagagcacagtaacgaggaaccagcaggtgagtccacatgacaaaaccccactagctagctagctagaactcctctgcccagacgaacaatctcttgtggtgcacgtgcaaggtgcctcgacttgggctgcggaaccatgaggcgccgtgggctctgagcaaattgctggaacacctgcagacgcactacgggaaccctccggtgatgatccacgagaacggagctgggcacgagcccgacccgtccggcgggttcctgtacgacgacgagttcagggcccatttcctgcgggtctacgtcgaggcggcgctcgcttccgtccggaacggctccgacctgcgcggctacttcgtctggtccttcatggacgtgttcgagtttctcttctcctacaggttccgcttcggtctctacggcgtggacttcgccgccgacaaccggacgagtgattggtattgtaactgtgggagaaaacggaaagaaagaaagaaaatatgaagaggaagaaaggacctatcgttgatttgaaagattttttgcaaagagctgctaacaaaaagaaaacccaagagcagactcagggcaatacggatcctatgtccacaaccaaagagagtcaaatgcagttggtggtctatgaaggtcggcctaaatatgcaagcggaagtggggctacttcagtaccacttgagccagagagtgagattggtgattttgcaatttcagattctgaatctaaatctagtgatgaaggaaatgatgagagcacatataacatagagcatgatccaggattgagatctcctatctcagggtatcatatcaatgaccacgattctgtgagaagggcttacattgcattgggaccatgtcgtcctaagatgaagaaagatgattttccacaacacaattgcggaggaatgcgtcgttttcaaccaaagtggtttggtgagttcaactggcttgagtatagtgtgcataaagatgctgcatattgttttgtttgctatttatttaaagatagtgatcatggaggtgatggttttattagcggggggtttcggaattggaacatgaaagacagatttcgtaagcatgctggtgctatcaatagtgctcattgtgaagctgaagagaaatataatttgtttatcaaacctaaaacatcaatccgtgagtcagttgcatcaaacactgttgaattcaaggctcaatatctggctcgtttgacatggtcacttaagtgcattagatttttgttgcatcaggggttggcttttcgtggtcatgatgagggaaaggattcacataataaagggaatttttgagaacttttggaatggcttgcgggaaactttgaagaagttaataaagtggttctaggaaatgcacccaagaattgtcagttgatagatcacaagattcagaaacaactcattacttgttgtgctgatgaaacaacccaatttattatagaggaacttggggatgagtgctttgcaattcttgctgatgaatctagtgatgcatatcagcaggaacaattagctatttgtttgcggtatgtcaatagaatgggagagccagttgaacgatttcttggtcttgtcaaagttgaagatactacatcattaacacttaaagaagcaattcagtctatgcttattaagtatcaattgccattatctaaggtacgtggtcaagggtatgatggagctagtaatatgaagggtcatgttaatggtttgaaaaaattaatcatggaagagtctccttctgcttattatgttcattgctttgcacatcaacttcaactcacccttgtggctgttggtaaggacaatattgattgctagtggttctttggacaacttgcttatttgttgaatgtgcttggaatgtcttgtaaaaagatctctatgcttcgtgttgctcaagctgaatatatgattgaagcattgaaattgggtgaaatagaaactgggcaaggtttgaatcaagagatgggtctagcaagaccaggagatacacgttggggatctcactatagaactgtgatgcatgttatggctttatatccttccatcaagaaagttctctccaagattgggaaagaacataaaggaggtgaatctttaggagctcaaactatgctacaagtatttcaatcatttgagtttgttttcatgatgcacttgatgaatgaaatatttggatacacaaatgacttatgcattgctttgcaaagaagagagcaagatattgtgaatgcaatggatcttcttgaattcactaaggtggaattgagtgttttgagagaagatgatggatggaatgaatttaatggaaaggtcaattctttttgtgagaaacacaaagttaaagtggttgatatggatgggaagtacaagcctatacaaagagataagaagttctataaaaatgccattaattaccaccggtttcatgctgatatgtttttgggtgtcattgataggaaacttatggaacttaatagcagatttgatgaggtaaacacagagttgcttagatgtatggcatgtttcaatcctatcaattcttttgctgcatttaatcaagagaagttggtaagacttgctgggttttatcctcatgactttgagtttgaagaaatgaaccaacttccttttcaattgaatcgatacattgaaaatatgaagagagatgacaatttcaaaaatttgagaagtctagcagagttgtctatgatgtttgtgaaaacacaaatgactcaacggtatgatattgtttacaagcttctgaagttggtattagttcttcctgttgcaactgctggtgttgagagggtcttttcttcaatgaaccacatcaaaagcaagctaagaaataagatgggacaagaattcttgaatggttgtttggttacatttattgaaagagaattcttcttgcaagccaaggataaagacatcatcgctcgttttcaaaatatgaaggatcgaaaacttgtcttataatgtaagcttccttatcatttagatatttattatcctttatatatttcaaatattggctcttatcactagcattgaagaattttattttttgatcaattttatgcccatctaaaacttgatttgtttgttagatattatatgtatgatataaacttgttggttgttcctatgtaatatattacggtattatatatatcgaatagttagactttatatggtattatatataccattttttttacttctatcaattttgaatacccatccttgaaatcctgggcccaccaagggaactttggcataacgacatgcctaagacgaagggttgcaccgatttaaagatgaaaagacagattgatctatgatagtttgtatcataaatgtaatcaattataaag

SEQ ID NO: 82986 - DNA, 1911 bp, Zea Mays
gtgcgttgcggcagcgcacttatattagcctggtcagtacacccaccgtagcctcacacttcgctggggagacgaagctgctagccgatcaggggagaattcttttgtaatggagctgctgcgaccacgcggcgatggttgttgcccgcgcgtgctctcggtttctctgctgctcctcgccgccctgctgtggaagcacgtctctgcggcggcgattaccaggggtgatttcccggaggggttcgtcttcggcgccggcgcatcggcttaccagatcgaaggcgcatgggcagaggacgggaagaagcccagcatctgggacacatacacgcacagtggatattcgattgaccgtgatactggagatgtggctgcggaccagtatcaccattacaaggaagatgtgaagctaatgcatgacatgggcttggacgcgtacaggttctcgattgcctggtcaaggcttattccagatgggcgtggagctgtgaacccaaaggggttggagtactacaacagcctcatagatgagctcctcagatatggtcgtcatttgccgcacgtgaccatctatcacttcgaccttccccaggctctccaggatgaatacaacggcctgctcagtccgagaatcatcgatgattttaccgcttacgcagacgtgtgcttccggagcttcggcgacagggtgaagcactggatcacggtgaacgagcccaacatcgagcccatcggcggctacgaccaaggctacctcccgccgcgccgctgctcctacccgtttggactgggcgtcacctgcacccacggcaactccacgacggagccgtacgccgtcgcccaccacctcctgctcgcgcatgcgtcggctgtgtccctctacagacgcaagtaccagggcgagcaaggaggacggattggactgacgttgctggcctggtggtatgagccagcgacgcagaagcccgaggatgtagaagcagctgccagagcaaatgacttctcgcttggatggttcatgcatcccctggtgtacggcgactatccgcccgtgatgaagaggaacgtgggggcaaggctgccgtcgctgacggcccgagactcggccatggtgcgcggctcgctcgatttcgttgggatcaaccagtacggcgcgatcctggtcgaagcagacctgggccagctcgatcgggacctcagagactactacggcgacatggctaccaacttcgtcacggtaccgtttgagagcacagtaacgaggaaccagcaggtgcctcgacttgggctgcggaaccatgaggcgccgtgggctctgagcaaattgctggaacacctgcagacgcactacgggaaccctccggtgatgatccacgagaacggagctgggcacgagcccgacccgtccggcgggttcctgtacgacgacgagttcagggcccatttcctgcgggtctacgtcgaggcggcgctcgcttccgtccggaacggctccgacctgcgcggctacttcgtctggtccttcatggacgtgttcgagtttctcttctcctacaggttccgcttcggtctctacggcgtggacttcgccgccgacaaccggacgaggtacgctcggcgctccgcgcgatggtacgccggcttcctccgcggcggcgcggcgacctcacgcccgcctctgtttcaacgcggacacacggctccacctattcggagtgaaaatcagccgcacgtgtctgtgttatagattcatcgcgagtgaacaagtacatgatggatgttcttcaccctcatccatgtctgtcgtatgcggcattttcccgtcagttgtgtatttgtttgcatttgaggaataaattcagttctgtagtaggctgtcggcagatcttggcgattaaaagtatctctaac

SEQ ID NO: 82987 - DNA, 1946 bp, Zea Mays
gtgcgttgcggcagcgcacttatattagcctggtcagtacacccaccgtagcctcacacttcgctggggagacgaagctgctagccgatcaggggagaattcttttgtaatggagctgctgcgaccacgcggcgatggttgttgcccgcgcgtgctctcggtttctctgctgctcctcgccgccctgctgtggaagcacgtctctgcggcggcgattaccaggggtgatttcccggaggggttcgtcttcggcgccggcgcatcggcttaccagatcgaaggcgcatgggcagaggacgggaagaagcccagcatctgggacacatacacgcacagtggatattcgattgaccgtgatactggagatgtggctgcggaccagtatcaccattacaaggaagatgtgaagctaatgcatgacatgggcttggacgcgtacaggttctcgattgcctggtcaaggcttattccagatgggcgtggagctgtgaacccaaaggggttggagtactacaacagcctcatagatgagctcctcagatatggtcgtcatttggtacttcattaattgcaacgttaattaacggcgcctgattccgaatggttttatttccgcgcgtgtaattaacgtgtggcaggaatacagccgcacgtgaccatctatcacttcgaccttccccaggctctccaggatgaatacaacggcctgctcagtccgagaatcatcgatgattttaccgcttacgcagacgtgtgcttccggagcttcggcgacagggtgaagcactggatcacggtgaacgagcccaacatcgagcccatcggcggctacgaccaaggctacctcccgccgcgccgctgctcctacccgtttggactgggcgtcacctgcacccacggcaactccacgacggagccgtacgccgtcgcccaccacctcctgctcgcgcatgcgtcggctgtgtccctctacagacgcaagtaccagcgacgcagaagcccgaggatgtagaagcagctgccagagcaaatgacttctcgcttggatggttcatgcatcccctggtgtacggcgactatccgcccgtgatgaagaggaacgtgggggcaaggctgccgtcgctgacggcccgagactcggccatggtgcgcggctcgctcgatttcgttgggatcaaccagtacggcgcgatcctggtcgaagcagacctgggccagctcgatcgggacctcagagactactacggcgacatggctaccaacttcgtcacggtaccgtttgagagcacagtaacgaggaaccagcaggtgcctcgacttgggctgcggaaccatgaggcgccgtgggctctgagcaaattgctggaacacctgcagacgcactacgggaaccctccggtgatgatccacgagaacggagctgggcacgagcccgacccgtccggcgggttcctgtacgacgacgagttcagggcccatttcctgcgggtctacgtcgaggcggcgctcgcttccgtccggaacggctccgacctgcgcggctacttcgtctggtccttcatggacgtgttcgagtttctcttctcctacaggttccgcttcggtctctacggcgtggacttcgccgccgacaaccggacgaggtacgctcggcgctccgcgcgatggtacgccggcttcctccgcggcggcgcggcgacctcacgcccgcctctgtttcaacgcggacacacggctccacctattcggagtgaaaatcagccgcacgtgtctgtgttatagattcatcgcgagtgaacaagtacatgatggatgttcttcaccctcatccatgtctgtcgtatgcggcattttcccgtcagttgtgtatttgtttgcatttgaggaataaattcagttctgtagtaggctgtcggcagatcttggcgattaaaagtatctctaac

SEQ ID NO: 82988 - DNA, 1864 bp, Zea Mays
gtgcgttgcggcagcgcacttatattagcctggtcagtacacccaccgtagcctcacacttcgctggggagacgaagctgctagccgatcaggggagaattcttttgtaatggagctgctgcgaccacgcggcgatggttgttgcccgcgcgtgctctcggtttctctgctgctcctcgccgccctgctgtggaagcacgtctctgcggcggcgattaccaggggtgatttcccggaggggttcgtcttcggcgccggcgcatcggcttaccagatcgaaggcgcatgggcagaggacgggaagaagcccagcatctgggacacatacacgcacagtggatattcgattgaccgtgatactggagatgtggctgcggaccagtatcaccattacaaggaagatgtgaagctaatgcatgacatgggcttggacgcgtacaggttctcgattgcctggtcaaggcttattccagatgggcgtggagctgtgaacccaaaggggttggagtactacaacagcctcatagatgagctcctcagatatggctctccaggatgaatacaacggcctgctcagtccgagaatcatcgatgattttaccgcttacgcagacgtgtgcttccggagcttcggcgacagggtgaagcactggatcacggtgaacgagcccaacatcgagcccatcggcggctacgaccaaggctacctcccgccgcgccgctgctcctacccgtttggactgggcgtcacctgcacccacggcaactccacgacggagccgtacgccgtcgcccaccacctcctgctcgcgcatgcgtcggctgtgtccctctacagacgcaagtaccagggcgagcaaggaggacggattggactgacgttgctggcctggtggtatgagccagcgacgcagaagcccgaggatgtagaagcagctgccagagcaaatgacttctcgcttggatggttcatgcatcccctggtgtacggcgactatccgcccgtgatgaagaggaacgtgggggcaaggctgccgtcgctgacggcccgagactcggccatggtgcgcggctcgctcgatttcgttgggatcaaccagtacggcgcgatcctggtcgaagcagacctgggccagctcgatcgggacctcagagactactacggcgacatggctaccaacttcgtcacggtaccgtttgagagcacagtaacgaggaaccagcaggtgcctcgacttgggctgcggaaccatgaggcgccgtgggctctgagcaaattgctggaacacctgcagacgcactacgggaaccctccggtgatgatccacgagaacggagctgggcacgagcccgacccgtccggcgggttcctgtacgacgacgagttcagggcccatttcctgcgggtctacgtcgaggcggcgctcgcttccgtccggaacggctccgacctgcgcggctacttcgtctggtccttcatggacgtgttcgagtttctcttctcctacaggttccgcttcggtctctacggcgtggacttcgccgccgacaaccggacgaggtacgctcggcgctccgcgcgatggtacgccggcttcctccgcggcggcgcggcgacctcacgcccgcctctgtttcaacgcggacacacggctccacctattcggagtgaaaatcagccgcacgtgtctgtgttatagattcatcgcgagtgaacaagtacatgatggatgttcttcaccctcatccatgtctgtcgtatgcggcattttcccgtcagttgtgtatttgtttgcatttgaggaataaattcagttctgtagtaggctgtcggcagatcttggcgattaaaagtatctctaac

SEQ ID NO: 82989 - DNA, 1800 bp, Zea Mays
gtgcgttgcggcagcgcacttatattagcctggtcagtacacccaccgtagcctcacacttcgctggggagacgaagctgctagccgatcaggggagaattcttttgtaatggagctgctgcgaccacgcggcgatggttgttgcccgcgcgtgctctcggtttctctgctgctcctcgccgccctgctgtggaagcacgtctctgcggcggcgattaccaggggtgatttcccggaggggttcgtcttcggcgccggcgcatcggcttaccaggatattcgattgaccgtgatactggagatgtggctgcggaccagtatcaccattacaaggttctcgattgcctggtcaaggcttattccagatgggcgtggagctgtgaacccaaaggggttggagtactacaacagcctcatagatgagctcctcagatatggaatacagccgcacgtgaccatctatcacttcgaccttccccaggctctccaggatgaatacaacggcctgctcagtccgagaatcatcgatgattttaccgcttacgcagacgtgtgcttccggagcttcggcgacagggtgaagcactggatcacggtgaacgagcccaacatcgagcccatcggcggctacgaccaaggctacctcccgccgcgccgctgctcctacccgtttggactgggcgtcacctgcacccacggcaactccacgacggagccgtacgccgtcgcccaccacctcctgctcgcgcatgcgtcggctgtgtccctctacagacgcaagtaccagggcgagcaaggaggacggattggactgacgttgctggcctggtggtatgagccagcgacgcagaagcccgaggatgtagaagcagctgccagagcaaatgacttctcgcttggatggttcatgcatcccctggtgtacggcgactatccgcccgtgatgaagaggaacgtgggggcaaggctgccgtcgctgacggcccgagactcggccatggtgcgcggctcgctcgatttcgttgggatcaaccagtacggcgcgatcctggtcgaagcagacctgggccagctcgatcgggacctcagagactactacggcgacatggctaccaacttcgtcacggtaccgtttgagagcacagtaacgaggaaccagcaggtgcctcgacttgggctgcggaaccatgaggcgccgtgggctctgagcaaattgctggaacacctgcagacgcactacgggaaccctccggtgatgatccacgagaacggagctgggcacgagcccgacccgtccggcgggttcctgtacgacgacgagttcagggcccatttcctgcgggtctacgtcgaggcggcgctcgcttccgtccggaacggctccgacctgcgcggctacttcgtctggtccttcatggacgtgttcgagtttctcttctcctacaggttccgcttcggtctctacggcgtggacttcgccgccgacaaccggacgaggtacgctcggcgctccgcgcgatggtacgccggcttcctccgcggcggcgcggcgacctcacgcccgcctctgtttcaacgcggacacacggctccacctattcggagtgaaaatcagccgcacgtgtctgtgttatagattcatcgcgagtgaacaagtacatgatggatgttcttcaccctcatccatgtctgtcgtatgcggcattttcccgtcagttgtgtatttgtttgcatttgaggaataaattcagttctgtagtaggctgtcggcagatcttggcgattaaaagtatctctaac

SEQ ID NO: 82990 - DNA, 1820 bp, Zea Mays
gtgcgttgcggcagcgcacttatattagcctggtcagtacacccaccgtagcctcacacttcgctggggagacgaagctgctagccgatcaggggagaattcttttgtaatggagctgctgcgaccacgcggcgatggttgttgcccgcgcgtgctctcggtttctctgctgctcctcgccgccctgctgtggaagcacgtctctgcggcggcgattaccaggggtgatttcccggaggggttcgtcttcggcgccggcgcatcggcttaccagatcgaaggcgcatgggcagaggacgggaagaagcccagcatctgggacacatacacgcacagtggatattcgattgaccgtgatactggagatgtggctgcggaccagtatcaccattacaaggttctcgattgcctggtcaaggcttattccagatgggcgtggagctgtgaacccaaaggggttggagtactacaacagcctcatagatgagctcctcagatatggctctccaggatgaatacaacggcctgctcagtccgagaatcatcgatgattttaccgcttacgcagacgtgtgcttccggagcttcggcgacagggtgaagcactggatcacggtgaacgagcccaacatcgagcccatcggcggctacgaccaaggctacctcccgccgcgccgctgctcctacccgtttggactgggcgtcacctgcacccacggcaactccacgacggagccgtacgccgtcgcccaccacctcctgctcgcgcatgcgtcggctgtgtccctctacagacgcaagtaccagggcgagcaaggaggacggattggactgacgttgctggcctggtggtatgagccagcgacgcagaagcccgaggatgtagaagcagctgccagagcaaatgacttctcgcttggatggttcatgcatcccctggtgtacggcgactatccgcccgtgatgaagaggaacgtgggggcaaggctgccgtcgctgacggcccgagactcggccatggtgcgcggctcgctcgatttcgttgggatcaaccagtacggcgcgatcctggtcgaagcagacctgggccagctcgatcgggacctcagagactactacggcgacatggctaccaacttcgtcacggtaccgtttgagagcacagtaacgaggaaccagcaggtgcctcgacttgggctgcggaaccatgaggcgccgtgggctctgagcaaattgctggaacacctgcagacgcactacgggaaccctccggtgatgatccacgagaacggagctgggcacgagcccgacccgtccggcgggttcctgtacgacgacgagttcagggcccatttcctgcgggtctacgtcgaggcggcgctcgcttccgtccggaacggctccgacctgcgcggctacttcgtctggtccttcatggacgtgttcgagtttctcttctcctacaggttccgcttcggtctctacggcgtggacttcgccgccgacaaccggacgaggtacgctcggcgctccgcgcgatggtacgccggcttcctccgcggcggcgcggcgacctcacgcccgcctctgtttcaacgcggacacacggctccacctattcggagtgaaaatcagccgcacgtgtctgtgttatagattcatcgcgagtgaacaagtacatgatggatgttcttcaccctcatccatgtctgtcgtatgcggcattttcccgtcagttgtgtatttgtttgcatttgaggaataaattcagttctgtagtaggctgtcggcagatcttggcgattaaaagtatctctaac

SEQ ID NO: 82991 - DNA, 1924 bp, Zea Mays
gtgcgttgcggcagcgcacttatattagcctggtcagtacacccaccgtagcctcacacttcgctggggagacgaagctgctagccgatcaggggagaattcttttgtaatggagctgctgcgaccacgcggcgatggttgttgcccgcgcgtgctctcggtttctctgctgctcctcgccgccctgctgtggaagcacgtctctgcggcggcgattaccaggggtgatttcccggaggggttcgtcttcggcgccggcgcatcggcttaccagatcgaaggcgcatgggcagaggacgggaagaagcccagcatctgggacacatacacgcacagtggtcagcgagcgagctagatattcgattgaccgtgatactggagatgtggctgcggaccagtatcaccattacaaggaagatgtgaagctaatgcatgacatgggcttggacgcgtacaggttctcgattgcctggtcaaggcttattccagatgggcgtggagctgtgaacccaaaggggttggagtactacaacagcctcatagatgagctcctcagatatggaatacagccgcacgtgaccatctatcacttcgaccttccccaggctctccaggatgaatacaacggcctgctcagtccgagaatcatcgatgattttaccgcttacgcagacgtgtgcttccggagcttcggcgacagggtgaagcactggatcacggtgaacgagcccaacatcgagcccatcggcggctacgaccaaggctacctcccgccgcgccgctgctcctacccgtttggactgggcgtcacctgcacccacggcaactccacgacggagccgtacgccgtcgcccaccacctcctgctcgcgcatgcgtcggctgtgtccctctacagacgcaagtaccagggcgagcaaggaggacggattggactgacgttgctggcctggtggtatgagccagcgacgcagaagcccgaggatgtagaagcagctgccagagcaaatgacttctcgcttggatggttcatgcatcccctggtgtacggcgactatccgcccgtgatgaagaggaacgtgggggcaaggctgccgtcgctgacggcccgagactcggccatggtgcgcggctcgctcgatttcgttgggatcaaccagtacggcgcgatcctggtcgaagcagacctgggccagctcgatcgggacctcagagactactacggcgacatggctaccaacttcgtcacggtaccgtttgagagcacagtaacgaggaaccagcaggtgcctcgacttgggctgcggaaccatgaggcgccgtgggctctgagcaaattgctggaacacctgcagacgcactacgggaaccctccggtgatgatccacgagaacggagctgggcacgagcccgacccgtccggcgggttcctgtacgacgacgagttcagggcccatttcctgcgggtctacgtcgaggcggcgctcgcttccgtccggaacggctccgacctgcgcggctacttcgtctggtccttcatggacgtgttcgagtttctcttctcctacaggttccgcttcggtctctacggcgtggacttcgccgccgacaaccggacgaggtacgctcggcgctccgcgcgatggtacgccggcttcctccgcggcggcgcggcgacctcacgcccgcctctgtttcaacgcggacacacggctccacctattcggagtgaaaatcagccgcacgtgtctgtgttatagattcatcgcgagtgaacaagtacatgatggatgttcttcaccctcatccatgtctgtcgtatgcggcattttcccgtcagttgtgtatttgtttgcatttgaggaataaattcagttctgtagtaggctgtcggcagatcttggcgattaaaagtatctctaac

SEQ ID NO: 82992 - DNA, 1844 bp, Zea Mays
gtgcgttgcggcagcgcacttatattagcctggtcagtacacccaccgtagcctcacacttcgctggggagacgaagctgctagccgatcaggggagaattcttttgtaatggagctgctgcgaccacgcggcgatggttgttgcccgcgcgtgctctcggtttctctgctgctcctcgccgccctgctgtggaagcacgtctctgcggcggcgattaccaggggtgatttcccggaggggttcgtcttcggcgccggcgcatcggcttaccaggatattcgattgaccgtgatactggagatgtggctgcggaccagtatcaccattacaaggaagatgtgaagctaatgcatgacatgggcttggacgcgtacaggttctcgattgcctggtcaaggcttattccagatgggcgtggagctgtgaacccaaaggggttggagtactacaacagcctcatagatgagctcctcagatatggaatacagccgcacgtgaccatctatcacttcgaccttccccaggctctccaggatgaatacaacggcctgctcagtccgagaatcatcgatgattttaccgcttacgcagacgtgtgcttccggagcttcggcgacagggtgaagcactggatcacggtgaacgagcccaacatcgagcccatcggcggctacgaccaaggctacctcccgccgcgccgctgctcctacccgtttggactgggcgtcacctgcacccacggcaactccacgacggagccgtacgccgtcgcccaccacctcctgctcgcgcatgcgtcggctgtgtccctctacagacgcaagtaccagggcgagcaaggaggacggattggactgacgttgctggcctggtggtatgagccagcgacgcagaagcccgaggatgtagaagcagctgccagagcaaatgacttctcgcttggatggttcatgcatcccctggtgtacggcgactatccgcccgtgatgaagaggaacgtgggggcaaggctgccgtcgctgacggcccgagactcggccatggtgcgcggctcgctcgatttcgttgggatcaaccagtacggcgcgatcctggtcgaagcagacctgggccagctcgatcgggacctcagagactactacggcgacatggctaccaacttcgtcacggtaccgtttgagagcacagtaacgaggaaccagcaggtgcctcgacttgggctgcggaaccatgaggcgccgtgggctctgagcaaattgctggaacacctgcagacgcactacgggaaccctccggtgatgatccacgagaacggagctgggcacgagcccgacccgtccggcgggttcctgtacgacgacgagttcagggcccatttcctgcgggtctacgtcgaggcggcgctcgcttccgtccggaacggctccgacctgcgcggctacttcgtctggtccttcatggacgtgttcgagtttctcttctcctacaggttccgcttcggtctctacggcgtggacttcgccgccgacaaccggacgaggtacgctcggcgctccgcgcgatggtacgccggcttcctccgcggcggcgcggcgacctcacgcccgcctctgtttcaacgcggacacacggctccacctattcggagtgaaaatcagccgcacgtgtctgtgttatagattcatcgcgagtgaacaagtacatgatggatgttcttcaccctcatccatgtctgtcgtatgcggcattttcccgtcagttgtgtatttgtttgcatttgaggaataaattcagttctgtagtaggctgtcggcagatcttggcgattaaaagtatctctaac

SEQ ID NO: 82993 - DNA, 1836 bp, Zea Mays
gtgcgttgcggcagcgcacttatattagcctggtcagtacacccaccgtagcctcacacttcgctggggagacgaagctgctagccgatcaggggagaattcttttgtaatggagctgctgcgaccacgcggcgatggttgttgcccgcgcgtgctctcggtttctctgctgctcctcgccgccctgctgtggaagcacgtctctgcggcggcgattaccaggggtgatttcccggaggggttcgtcttcggcgccggcgcatcggcttaccaggatattcgattgaccgtgatactggagatgtggctgcggaccagtatcaccattacaaggaagatgtgaagctaatgcatgacatgggcttggacgcgtacaggttctcgattgcctggtcaaggcttattccagatgggcgtggagctgtgaacccaaaggggttggagtactacaacagcctcatagatgagctcctcagatatgccgcacgtgaccatctatcacttcgaccttccccaggctctccaggatgaatacaacggcctgctcagtccgagaatcatcgatgattttaccgcttacgcagacgtgtgcttccggagcttcggcgacagggtgaagcactggatcacggtgaacgagcccaacatcgagcccatcggcggctacgaccaaggctacctcccgccgcgccgctgctcctacccgtttggactgggcgtcacctgcacccacggcaactccacgacggagccgtacgccgtcgcccaccacctcctgctcgcgcatgcgtcggctgtgtccctctacagacgcaagtaccagggcgagcaaggaggacggattggactgacgttgctggcctggtggtatgagccagcgacgcagaagcccgaggatgtagaagcagctgccagagcaaatgacttctcgcttggatggttcatgcatcccctggtgtacggcgactatccgcccgtgatgaagaggaacgtgggggcaaggctgccgtcgctgacggcccgagactcggccatggtgcgcggctcgctcgatttcgttgggatcaaccagtacggcgcgatcctggtcgaagcagacctgggccagctcgatcgggacctcagagactactacggcgacatggctaccaacttcgtcacggtaccgtttgagagcacagtaacgaggaaccagcaggtgcctcgacttgggctgcggaaccatgaggcgccgtgggctctgagcaaattgctggaacacctgcagacgcactacgggaaccctccggtgatgatccacgagaacggagctgggcacgagcccgacccgtccggcgggttcctgtacgacgacgagttcagggcccatttcctgcgggtctacgtcgaggcggcgctcgcttccgtccggaacggctccgacctgcgcggctacttcgtctggtccttcatggacgtgttcgagtttctcttctcctacaggttccgcttcggtctctacggcgtggacttcgccgccgacaaccggacgaggtacgctcggcgctccgcgcgatggtacgccggcttcctccgcggcggcgcggcgacctcacgcccgcctctgtttcaacgcggacacacggctccacctattcggagtgaaaatcagccgcacgtgtctgtgttatagattcatcgcgagtgaacaagtacatgatggatgttcttcaccctcatccatgtctgtcgtatgcggcattttcccgtcagttgtgtatttgtttgcatttgaggaataaattcagttctgtagtaggctgtcggcagatcttggcgattaaaagtatctctaac

SEQ ID NO: 82994 - DNA, 2162 bp, Zea Mays
gtgcgttgcggcagcgcacttatattagcctggtcagtacacccaccgtagcctcacacttcgctggggagacgaagctgctagccgatcaggggagaattcttttgtaatggagctgctgcgaccacgcggcgatggttgttgcccgcgcgtgctctcggtttctctgctgctcctcgccgccctgctgtggaagcacgtctctgcggcggcgattaccaggggtgatttcccggaggggttcgtcttcggcgccggcgcatcggcttaccaggtaggataggagcagtgtgggctacgggcagtgagtggcgcgcgaggcagagaggcaggtaggtggtgttgagatgaatcgtctggtttgtgcagatcgaaggcgcatgggcagaggacgggaagaagcccagcatctgggacacatacacgcacagtggatattcgattgaccgtgatactggagatgtggctgcggaccagtatcaccattacaaggttctcgattgcctggtcaaggcttattccaggtgctagctagtagagtcctagacacagaggagaggatctttttttccctctgtttatcagtgtacttagccatcctatcgtattgttttcgcatgtctgatgatatgccacgtgtttgtagatgggcgtggagctgtgaacccaaaggggttggagtactacaacagcctcatagatgagctcctcagatatggtcgtcatttggtacttcattaattgcaacgttaattaacggcgcctgattccgaatggttttatttccgcgcgtgtaattaacgtgtggcaggaatacagccgcacgtgaccatctatcacttcgaccttccccaggctctccaggatgaatacaacggcctgctcagtccgagaatcatcgatgattttaccgcttacgcagacgtgtgcttccggagcttcggcgacagggtgaagcactggatcacggtgaacgagcccaacatcgagcccatcggcggctacgaccaaggctacctcccgccgcgccgctgctcctacccgtttggactgggcgtcacctgcacccacggcaactccacgacggagccgtacgccgtcgcccaccacctcctgctcgcgcatgcgtcggctgtgtccctctacagacgcaagtaccagggcgagcaaggaggacggattggactgacgttgctggcctggtggtatgagccagcgacgcagaagcccgaggatgtagaagcagctgccagagcaaatgacttctcgcttggatggttcatgcatcccctggtgtacggcgactatccgcccgtgatgaagaggaacgtgggggcaaggctgccgtcgctgacggcccgagactcggccatggtgcgcggctcgctcgatttcgttgggatcaaccagtacggcgcgatcctggtcgaagcagacctgggccagctcgatcgggacctcagagactactacggcgacatggctaccaacttcacgaacaatctcttgtggtgcacgtgcaaggtgcctcgacttgggctgcggaaccatgaggcgccgtgggctctgagcaaattgctggaacacctgcagacgcactacgggaaccctccggtgatgatccacgagaacggagctgggcacgagcccgacccgtccggcgggttcctgtacgacgacgagttcagggcccatttcctgcgggtctacgtcgaggcggcgctcgcttccgtccggaacggctccgacctgcgcggctacttcgtctggtccttcatggacgtgttcgagtttctcttctcctacaggttccgcttcggtctctacggcgtggacttcgccgccgacaaccggacgaggtacgctcggcgctccgcgcgatggtacgccggcttcctccgcggcggcgcggcgacctcacgcccgcctctgtttcaacgcggacacacggctccacctattcggagtgaaaatcagccgcacgtgtctgtgttatagattcatcgcgagtgaacaagtacatgatggatgttcttcaccctcatccatgtctgtcgtatgcggcattttcccgtcagttgtgtatttgtttgcatttgaggaataaattcagttctgtagtaggctgtcggcagatcttggcgattaaaagtatctctaac

SEQ ID NO: 82995 - DNA, 1867 bp, Zea Mays
gtgcgttgcggcagcgcacttatattagcctggtcagtacacccaccgtagcctcacacttcgctggggagacgaagctgctagccgatcaggggagaattcttttgtaatggagctgctgcgaccacgcggcgatggttgttgcccgcgcgtgctctcggtttctctgctgctcctcgccgccctgctgtggaagcacgtctctgcggcggcgattaccaggggtgatttcccggaggggttcgtcttcggcgccggcgcatcggcttaccagatcgaaggcgcatgggcagaggacgggaagaagcccagcatctgggacacatacacgcacagtggatattcgattgaccgtgatactggagatgtggctgcggaccagtatcaccattacaaggttctcgattgcctggtcaaggcttattccagatgggcgtggagctgtgaacccaaaggggttggagtactacaacagcctcatagatgagctcctcagatatggtcgtcatttgccgcacgtgaccatctatcacttcgaccttccccaggctctccaggatgaatacaacggcctgctcagtccgagaatcatcgatgattttaccgcttacgcagacgtgtgcttccggagcttcggcgacagggtgaagcactggatcacggtgaacgagcccaacatcgagcccatcggcggctacgaccaaggctacctcccgccgcgccgctgctcctacccgtttggactgggcgtcacctgcacccacggcaactccacgacggagccgtacgccgtcgcccaccacctcctgctcgcgcatgcgtcggctgtgtccctctacagacgcaagtaccagggcgagcaaggaggacggattggactgacgttgctggcctggtggtatgagccagcgacgcagaagcccgaggatgtagaagcagctgccagagcaaatgacttctcgcttggatggttcatgcatcccctggtgtacggcgactatccgcccgtgatgaagaggaacgtgggggcaaggctgccgtcgctgacggcccgagactcggccatggtgcgcggctcgctcgatttcgttgggatcaaccagtacggcgcgatcctggtcgaagcagacctgggccagctcgatcgggacctcagagactactacggcgacatggctaccaacttcgtcacggtaccgtttgagagcacagtaacgaggaaccagcaggtgcctcgacttgggctgcggaaccatgaggcgccgtgggctctgagcaaattgctggaacacctgcagacgcactacgggaaccctccggtgatgatccacgagaacggagctgggcacgagcccgacccgtccggcgggttcctgtacgacgacgagttcagggcccatttcctgcgggtctacgtcgaggcggcgctcgcttccgtccggaacggctccgacctgcgcggctacttcgtctggtccttcatggacgtgttcgagtttctcttctcctacaggttccgcttcggtctctacggcgtggacttcgccgccgacaaccggacgaggtacgctcggcgctccgcgcgatggtacgccggcttcctccgcggcggcgcggcgacctcacgcccgcctctgtttcaacgcggacacacggctccacctattcggagtgaaaatcagccgcacgtgtctgtgttatagattcatcgcgagtgaacaagtacatgatggatgttcttcaccctcatccatgtctgtcgtatgcggcattttcccgtcagttgtgtatttgtttgcatttgaggaataaattcagttctgtagtaggctgtcggcagatcttggcgattaaaagtatctctaac

SEQ ID NO: 82996 - DNA, 1864 bp, Zea Mays
gtgcgttgcggcagcgcacttatattagcctggtcagtacacccaccgtagcctcacacttcgctggggagacgaagctgctagccgatcaggggagaattcttttgtaatggagctgctgcgaccacgcggcgatggttgttgcccgcgcgtgctctcggtttctctgctgctcctcgccgccctgctgtggaagcacgtctctgcggcggcgattaccaggggtgatttcccggaggggttcgtcttcggcgccggcgcatcggcttaccagatcgaaggcgcatgggcagaggacgggaagaagcccagcatctgggacacatacacgcacagtggatattcgattgaccgtgatactggagatgtggctgcggaccagtatcaccattacaaggttctcgattgcctggtcaaggcttattccagatgggcgtggagctgtgaacccaaaggggttggagtactacaacagcctcatagatgagctcctcagatatggaatacagccgcacgtgaccatctatcacttcgaccttccccaggctctccaggatgaatacaacggcctgctcagtccgagaatcatcgatgattttaccgcttacgcagacgtgtgcttccggagcttcggcgacagggtgaagcactggatcacggtgaacgagcccaacatcgagcccatcggcggctacgaccaaggctacctcccgccgcgccgctgctcctacccgtttggactgggcgtcacctgcacccacggcaactccacgacggagccgtacgccgtcgcccaccacctcctgctcgcgcatgcgtcggctgtgtccctctacagacgcaagtaccagggcgagcaaggaggacggattggactgacgttgctggcctggtggtatgagccagcgacgcagaagcccgaggatgtagaagcagctgccagagcaaatgacttctcgcttggatggttcatgcatcccctggtgtacggcgactatccgcccgtgatgaagaggaacgtgggggcaaggctgccgtcgctgacggcccgagactcggccatggtgcgcggctcgctcgatttcgttgggatcaaccagtacggcgcgatcctggtcgaagcagacctgggccagctcgatcgggacctcagagactactacggcgacatggctaccaacttcgtcacggtaccgtttgagagcacagtaacgaggaaccagcaggtgcctcgacttgggctgcggaaccatgaggcgccgtgggctctgagcaaattgctggaacacctgcagacgcactacgggaaccctccggtgatgatccacgagaacggagctgggcacgagcccgacccgtccggcgggttcctgtacgacgacgagttcagggcccatttcctgcgggtctacgtcgaggcggcgctcgcttccgtccggaacggctccgacctgcgcggctacttcgtctggtccttcatggacgtgttcgagtttctcttctcctacaggttccgcttcggtctctacggcgtggacttcgccgccgacaaccggacgaggtacgctcggcgctccgcgcgatggtacgccggcttcctccgcggcggcgcggcgacctcacgcccgcctctgtttcaacgcggacacacggctccacctattcggagtgaaaatcagccgcacgtgtctgtgttatagattcatcgcgagtgaacaagtacatgatggatgttcttcaccctcatccatgtctgtcgtatgcggcattttcccgtcagttgtgtatttgtttgcatttgaggaataaattcagttctgtagtaggctgtcggcagatcttggcgattaaaagtatctctaac

SEQ ID NO: 82997 - DNA, 1800 bp, Zea Mays
gtgcgttgcggcagcgcacttatattagcctggtcagtacacccaccgtagcctcacacttcgctggggagacgaagctgctagccgatcaggggagaattcttttgtaatggagctgctgcgaccacgcggcgatggttgttgcccgcgcgtgctctcggtttctctgctgctcctcgccgccctgctgtggaagcacgtctctgcggcggcgattaccaggggtgatttcccggaggggttcgtcttcggcgccggcgcatcggcttaccaggatattcgattgaccgtgatactggagatgtggctgcggaccagtatcaccattacaaggaagatgtgaagctaatgcatgacatgggcttggacgcgtacaggttctcgattgcctggtcaaggcttattccagatgggcgtggagctgtgaacccaaaggggttggagtactacaacagcctcatagatgagctcctcagatatggctctccaggatgaatacaacggcctgctcagtccgagaatcatcgatgattttaccgcttacgcagacgtgtgcttccggagcttcggcgacagggtgaagcactggatcacggtgaacgagcccaacatcgagcccatcggcggctacgaccaaggctacctcccgccgcgccgctgctcctacccgtttggactgggcgtcacctgcacccacggcaactccacgacggagccgtacgccgtcgcccaccacctcctgctcgcgcatgcgtcggctgtgtccctctacagacgcaagtaccagggcgagcaaggaggacggattggactgacgttgctggcctggtggtatgagccagcgacgcagaagcccgaggatgtagaagcagctgccagagcaaatgacttctcgcttggatggttcatgcatcccctggtgtacggcgactatccgcccgtgatgaagaggaacgtgggggcaaggctgccgtcgctgacggcccgagactcggccatggtgcgcggctcgctcgatttcgttgggatcaaccagtacggcgcgatcctggtcgaagcagacctgggccagctcgatcgggacctcagagactactacggcgacatggctaccaacttcgtcacggtaccgtttgagagcacagtaacgaggaaccagcaggtgcctcgacttgggctgcggaaccatgaggcgccgtgggctctgagcaaattgctggaacacctgcagacgcactacgggaaccctccggtgatgatccacgagaacggagctgggcacgagcccgacccgtccggcgggttcctgtacgacgacgagttcagggcccatttcctgcgggtctacgtcgaggcggcgctcgcttccgtccggaacggctccgacctgcgcggctacttcgtctggtccttcatggacgtgttcgagtttctcttctcctacaggttccgcttcggtctctacggcgtggacttcgccgccgacaaccggacgaggtacgctcggcgctccgcgcgatggtacgccggcttcctccgcggcggcgcggcgacctcacgcccgcctctgtttcaacgcggacacacggctccacctattcggagtgaaaatcagccgcacgtgtctgtgttatagattcatcgcgagtgaacaagtacatgatggatgttcttcaccctcatccatgtctgtcgtatgcggcattttcccgtcagttgtgtatttgtttgcatttgaggaataaattcagttctgtagtaggctgtcggcagatcttggcgattaaaagtatctctaac

SEQ ID NO: 82998 - DNA, 1909 bp, Zea Mays
cgtgcgttgcggcagcgcacttatattagcctggtcagtacacccaccgtagcctcacacttcgctggggagacgaagctgctagccgatcaggggagaattcttttgtaatggagctgctgcgaccacgcggcgatggttgttgcccgcgcgtgctctcggtttctctgctgctcctcgccgccctgctgtggaagcacgtctctgcggcggcgattaccaggggtgatttcccggaggggttcgtcttcggcgccggcgcatcggcttaccagatcgaaggcgcatgggcagaggacgggaagaagcccagcatctgggacacatacacgcacagtggatattcgattgaccgtgatactggagatgtggctgcggaccagtatcaccattacaaggaagatgtgaagctaatgcatgacatgggcttggacgcgtacaggttctcgattgcctggtcaaggcttattccagatgggcgtggagctgtgaacccaaaggggttggagtactacaacagcctcatagatgagctcctcagatatggaatacagccgcacgtgaccatctatcacttcgaccttccccaggctctccaggatgaatacaacggcctgctcagtccgagaatcatcgatgattttaccgcttacgcagacgtgtgcttccggagcttcggcgacagggtgaagcactggatcacggtgaacgagcccaacatcgagcccatcggcggctacgaccaaggctacctcccgccgcgccgctgctcctacccgtttggactgggcgtcacctgcacccacggcaactccacgacggagccgtacgccgtcgcccaccacctcctgctcgcgcatgcgtcggctgtgtccctctacagacgcaagtaccagggcgagcaaggaggacggattggactgacgttgctggcctggtggtatgagccagcgacgcagaagcccgaggatgtagaagcagctgccagagcaaatgacttctcgcttggatggttcatgcatcccctggtgtacggcgactatccgcccgtgatgaagaggaacgtgggggcaaggctgccgtcgctgacggcccgagactcggccatggtgcgcggctcgctcgatttcgttgggatcaaccagtacggcgcgatcctggtcgaagcagacctgggccagctcgatcgggacctcagagactactacggcgacatggctaccaacttcgtcacggtaccgtttgagagcacagtaacgaggaaccagcaggtgcctcgacttgggctgcggaaccatgaggcgccgtgggctctgagcaaattgctggaacacctgcagacgcactacgggaaccctccggtgatgatccacgagaacggagctgggcacgagcccgacccgtccggcgggttcctgtacgacgacgagttcagggcccatttcctgcgggtctacgtcgaggcggcgctcgcttccgtccggaacggctccgacctgcgcggctacttcgtctggtccttcatggacgtgttcgagtttctcttctcctacaggttccgcttcggtctctacggcgtggacttcgccgccgacaaccggacgaggtacgctcggcgctccgcgcgatggtacgccggcttcctccgcggcggcgcggcgacctcacgcccgcctctgtttcaacgcggacacacggctccacctattcggagtgaaaatcagccgcacgtgtctgtgttatagattcatcgcgagtgaacaagtacatgatggatgttcttcaccctcatccatgtctgtcgtatgcggcattttcccgtcagttgtgtatttgtttgcatttgaggaataaattcagttctgtagtaggctgtcggcagatcttggcgattaaaagtatctctaac

SEQ ID NO: 82999 - DNA, 1866 bp, Zea Mays
gtgacgtgcgttgcggcagcgcacttatattagcctggtcagtacacccaccgtagcctcacacttcgctggggagacgaagctgctagccgatcaggggagaattcttttgtaatggagctgctgcgaccacgcggcgatggttgttgcccgcgcgtgctctcggtttctctgctgctcctcgccgccctgctgtggaagcacgtctctgcggcggcgattaccaggggtgatttcccggaggggttcgtcttcggcgccggcgcatcggcttaccagatcgaaggcgcatgggcagaggacgggaagaagcccagcatctgggacacatacacgcacagtggatattcgattgaccgtgatactggagatgtggctgcggaccagtatcaccattacaaggaagatgtgaagctaatgcatgacatgggcttggacgcgtacaggttctcgattgcctggtcaaggcttattccagatgggcgtggagctgtgaacccaaaggggttggagtactacaacagcctcatagatgagctcctcagatatggaatacagccgcacgtgaccatctatcacttcgaccttccccaggctctccaggatgaatacaacggcctgctcagtccgagaatcatcgatgattttaccgcttacgcagacgtgtgcttccggagcttcggcgacagggtgaagcactggatcacggtgaacgagcccaacatcgagcccatcggcggctacgaccaaggctacctcccgccgcgccgctgctcctacccgtttggactgggcgtcacctgcacccacggcaactccacgacggagccgtacgccgtcgcccaccacctcctgctcgcgcatgcgtcggctgtgtccctctacagacgcaagtaccagggcgagcaaggaggacggattggactgacgttgctggcctggtggtatgagccagcgacgcagaagcccgaggatgtagaagcagctgccagagcaaatgacttctcgcttggatggttcatgcatcccctggtgtacggcgactatccgcccgtgatgaagaggaacgtgggggcaaggctgccgtcgctgacggcccgagactcggccatggtgcgcggctcgctcgatttcgttgggatcaaccagtacggcgcgatcctggtcgaagcagacctgggccagctcgatcgggacctcagagactactacggcgacatggctaccaacttcacgaacaatctcttgtggtgcacgtgcaaggtgcctcgacttgggctgcggaaccatgaggcgccgtgggctctgagcaaattgctggaacacctgcagacgcactacgggaaccctccggtgatgatccacgagaacggagctgggcacgagcccgacccgtccggcgggttcctgtacgacgacgagttcagggcccatttcctgcgggtctacgtcgaggcggcgctcgcttccgtccggaacggctccgacctgcgcggctacttcgtctggtccttcatggacgtgttcgagtttctcttctcctacaggttccgcttcggtctctacggcgtggacttcgccgccgacaaccggacgaggtacgctcggcgctccgcgcgatggtacgccggctctgtttcaacgcggacacacggctccacctattcggagtgaaaatcagccgcacgtgtctgtgttatagattcatcgcgagtgaacaagtacatgatggatgttcttcaccctcatccatgtctgtcgtatgcggcattttcccgtcagttgtgtatttgtttgcatttgaggaataaattcagttctgtagtaggctgtcggcagatcttggcgattaaaagtatctctaac

SEQ ID NO: 83000 - DNA, 554 bp, Zea Mays
cgaggagaggctccgcgagctagaggagcaagggaggtaggaagatgagcagcgcggtcggccgagaggaacaggcgcgcgccaccatgggagcttgacgacgaccgggctgggcgagccccggcgaactgcagatggccggctgggagaaggcgcgcaggaactgtgcgcgcaggtaaggagaatacagagggagcaggggtggaagccggccaccatggctgggagcctgggacatgtacaaacggctcacaagcaagtagaagaccggagaagggcctgtacgtgatattatcccaggagaagaagccgagtgcgagccagcagatggaagaacgagcgcttgtaagataaatccgatcaccggatgagactgagaagagagagataagaacacggaacaaaaatctcacgcagcagataaaaaaaaatcccaggaggataagcagaggcgtggctgggatttttttctccagagacagagcggtgtgtgctggagagaagctcggcttgggcatgagcattcgacactgaggagataagaacggtggaaa

SEQ ID NO: 83001 - DNA, 2340 bp, Zea Mays
atgggcctcaactttgtgcagcccatgtcacttttgtatagttatcgctggatcaacggtgaagggtgcagattagctgactgctctctgacgttgtctagtctgaatcccacgaccccaccccacgcccgtcttcctcgcctcaacgccgccacccaatccaaccgcctggacgccacaaccccgccccacctcggcgccgccgctccatccaactacctcgacgccgccatccatccaaccgcctcggtgtctgctcctcaatacctggccgtgttcaacatgccccctggaaggatggatggggcaaggacatgcagagaccttggtgaggtgccaattactgagtatgaaaaggagagggctttaaatgtgatgaggaacaacaaaatgttgagtagccttggtataactggattaacatcacttattcgatcaagtagtacaaggaagaactctatcgctcgtgaagactttgatccattgtatgaacctgatcatagtgaggacaatgatcatcatgtggctaatcaggatgatcctttctacattgaaagaaggaacaccaacatgtctactggttttggaggaacaaaaggatccaagagagtggtagcacctaatgtagaagaccaagttggtagagtaactaggcagaagacaaaggaactatccttagttgagaaagatatacatggtttgactgcaaatacagatgagcacacattgatttctgccaattttcctgcacaccatgatgacgagattcagatgtgtgatgaagggaatagacgtcctgaggttcctatgcaagctgcaatgcttgcatcagaaggaggaattgtaattaggcaacatatgccaatcctaacacactggaaggaatacaagaatgacaaatcctatttggaagacttcgtcggtagaattggtgtaagtaaatagtctttcttcctaaacatcaaatgaatagggtggtagggcctatgtcctatattgccaatttattagtatatagttagtaggtgcactttgtcccataaatagctaaaataactatggcagaaagaactgcatatgtttctctattccaaatgacaccttaccttagaaattgttctatccaatttcattagacactatgaatctctctattctaatatgcatgttttttactagggtcaatttgccatagacaccaaaaacaaagatgtcaaatatgcatgtgctgatttgatgaggtgtaatcagcgacaaatgagatataagctcaagaaggcttactttaatggtgtggcagctgacaaagtgagaacaacatcaccgttgagtactatgacagatgagcaatggatgcaactagtcaatatgtggtctaccccaaagcacaaggaaaaatgtgtgaacaacaaagtgatccgtggaaaagttcggttccagcaaaagacaggatctcggagttacattgcacatatgcatgccgtgaagcaagccaaatatggagatgcaccaccaagtgcgattgatctttttaaagagtgccattgtagtaggaagactggttttgctgagcctgtaaaggaagcaattgacacaatggaagcacttgtggctgagcctggagtagaagggaaagaatctaagacccctacagaagcagttgctcaagtgttgtcttcatcaaaatttctttataatattggtcttgtacctgccacaaagaaaagctgcaatggtggtgatcctacacgcgtggcagaacttgaggctgaacttgaatcagagaagcaaaactcattagaagttagagctcagttagatgccctaaagaagaaggtagaagaatcagaagaagcaagggctaaggagttagaaaagattaatgatctgcaaaaaggagcagatgagaccaatgctctccttcgtcgtctctttagcctcaataagtagttggtcgattgtgccctgattttgctgtcctatttgtactttgctttgcactctacttgatgctggtgacaaaacatgatgatagttttaattttgatatgtccttttggtactgtccttagcacactactagatgctggtgtgatgaaacatggtgacaattttgaaaaatttgaaggatttggttgttgataaatgatatctatgataatatgttgctaagtatatgtgttgattgtttattggtgtttaattacaatggattttgcttatggtacattgtgaaacaaaatgtttgggttctactggaacccggcgcttctagcagctatgtttctacgctgtgttctgtgctcttgactgcaggtttaaaaataaaaaagcaaaaaa

SEQ ID NO: 83002 - DNA, 2196 bp, Zea Mays
atgggcctcaactttgtgcagcccatgtcacttttgtatagttatcgctggatcaacggtgaagggtgcagattagctgactgctctctgacgttgtctagtctgaatcccacgaccccaccccacgcccgtcttcctcgcctcaacgccgccacccaatccaaccgcctggacgccacaaccccgccccacctcggcgccgccgctccatccaactacctcgacgccgccatccatccaaccgcctcggtgtctgctcctcaatacctggccgtgttcaacatgccccctggaaggatggatggggcaaggacatgcagagaccttggtgaggtgccaattactgagtatgaaaaggagagggctttaaatgtgatgaggaacaacaaaatgttgagtagccttggtataactggattaacatcacttattcgatcaagtagtacaaggaagaactctatcgctcgtgaagactttgatccattgtatgaacctgatcatagtgaggacaatgatcatcatgtggctaatcaggatgatcctttctacattgaaagaaggaacaccaacatgtctactggttttggaggaacaaaaggatccaagagagtggtagcacctaatgtagaagaccaagttggtagagtaactaggcagaagacaaaggaactatccttagttgagaaagatatacatggtttgactgcaaatacagatgagcacacattgatttctgccaattttcctgcacaccatgatgacgagattcagatgtgtgatgaagatgtcatgacagataaatggataaggggaaaaagtatgggtagacaattggaaaggataagtcgaggcctaaacactaagatcccattggtcatcactgaagggaatagacgtcctgaggttcctatgcaagctgcaatgcttgcatcagaaggaggaattgtaattaggcaacatatgccaatcctaacacactggaaggaatacaagaatgacaaatcctatttggaagacttcgtcggtagaattggtggtcaatttgccatagacaccaaaaacaaagatgtcaaatatgcatgtgctgatttgatgaggtgtaatcagcgacaaatgagatataagctcaagaaggcttactttaatggtgtggcagctgacaaagtgagaacaacatcaccgttgagtactatgacagatgagcaatggatgcaactagtcaatatgtggtctaccccaaagcacaaggaaaaatgtgtgaacaacaaagtgatccgtggaaaagttcggttccagcaaaagacaggatctcggagttacattgcacatatgcatgccgtgaagcaagccaaatatggagatgcaccaccaagtgcgattgatctttttaaagagtgccattgtagtaggaagactggttttgctgagcctgtaaaggaagcaattgacacaatggaagcacttgtggctgagcctggagtagaagggaaagaatctaagacccctacagaagcagttgctcaagtgttgtcttcatcaaaatttctttataatattggtcttgtacctgccacaaagaaaagctgcaatggtggtgatcctacacgcgtggcagaacttgaggctgaacttgaatcagagaagcaaaactcattagaagttagagctcagttagatgccctaaagaagaaggtagaagaatcagaagaagcaagggctaaggagttagaaaagattaatgatctgcaaaaaggagcagatgagaccaatgctctccttcgtcgtctctttagcctcaataagtagttggtcgattgtgccctgattttgctgtcctatttgtactttgctttgcactctacttgatgctggtgacaaaacatgatgatagttttaattttgatatgtccttttggtactgtccttagcacactactagatgctggtgtgatgaaacatggtgacaattttgaaaaatttgaaggatttggttgttgataaatgatatctatgataatatgttgctaagtatatgtgttgattgtttattggtgtttaattacaatggattttgcttatggtacattgtgaaacaaaatgtttgggttctactggaacccggcgcttctagcagctatgtttctacgctgtgttctgtgctcttgactgcaggtttaaaaataaaaaagcaaaaaa

SEQ ID NO: 83003 - DNA, 2220 bp, Zea Mays
atgggcgacagtgcagctctcctcgatgggatacagacggcgcggtggcgctcgagcagaaatagcagaggtgttttctgtgtccatggaaagctctcggcatgacctgtgccgctgtgcgctatgatgggcctcaactttgtgcagcccatgtcacttttgtatagttatcgctggatcaacggtgaagggtgcagattagctgactgctctctgacgttgtctagtctgaatcccacgaccccaccccacgcccgtcttcctcgcctcaacgccgccacccaatccaaccgcctggacgccacaaccccgccccacctcggcgccgccgctccatccaactacctcgacgccgccatccatccaaccgcctcggtgtctgctcctcaatacctggccgtgttcaacatgccccctggaaggatggatggggcaaggacatgcagagaccttggtgaggtgccaattactgagtatgaaaaggagagggctttaaatgtgatgaggaacaacaaaatgttgagtagccttggtataactggattaacatcacttattcgatcaagtagtacaaggaagaactctatcgctcgtgaagactttgatccattgtatgaacctgatcatagtgaggacaatgatcatcatgtggctaatcaggatgatcctttctacattgaaagaaggaacaccaacatgtctactggttttggaggaacaaaaggatccaagagagtggtagcacctaatgtagaagaccaagttggtagagtaactaggcagaagacaaaggaactatccttagttgagaaagatatacatggtttgactgcaaatacagatgagcacacattgatttctgccaattttcctgcacaccatgatgacgagattcagatgtgtgatgaagggaatagacgtcctgaggttcctatgcaagctgcaatgcttgcatcagaaggaggaattgtaattaggcaacatatgccaatcctaacacactggaaggaatacaagaatgacaaatcctatttggaagacttcgtcggtagaattggtggtcaatttgccatagacaccaaaaacaaagatgtcaaatatgcatgtgctgatttgatgaggtgtaatcagcgacaaatgagatataagctcaagaaggcttactttaatggtgtggcagctgacaaagtgagaacaacatcaccgttgagtactatgacagatgagcaatggatgcaactagtcaatatgtggtctaccccaaagcacaaggaaaaatgtgtgaacaacaaagtgatccgtggaaaagttcggttccagcaaaagacaggatctcggagttacattgcacatatgcatgccgtgaagcaagccaaatatggagatgcaccaccaagtgcgattgatctttttaaagagtgccattgtagtaggaagactggttttgctgagcctgtaaaggaagcaattgacacaatggaagcacttgtggctgagcctggagtagaagggaaagaatctaagacccctacagaagcagttgctcaagtgttgtcttcatcaaaatttctttataatattggtcttgtacctgccacaaagaaaagctgcaatggtggtgatcctacacgcgtggcagaacttgaggctgaacttgaatcagagaagcaaaactcattagaagttagagctcagttagatgccctaaagaagaaggtagaagaatcagaagaagcaagggctaaggagttagaaaagattaatgatctgcaaaaaggagcagatgagaccaatgctctccttcgtcgtctctttagcctcaataagtagttggtcgattgtgccctgattttgctgtcctatttgtactttgctttgcactctacttgatgctggtgacaaaacatgatgatagttttaattttgatatgtccttttggtactgtccttagcacactactagatgctggtgtgatgaaacatggtgacaattttgaaaaatttgaaggatttggttgttgataaatgatatctatgataatatgttgctaagtatatgtgttgattgtttattggtgtttaattacaatggattttgcttatggtacattgtgaaacaaaatgtttgggttctactggaacccggcgcttctagcagctatgtttctacgctgtgttctgtgctcttgactgcaggtttaaaaataaaaaagcaaaaaa

SEQ ID NO: 83004 - DNA, 2566 bp, Zea Mays
gacgcttagcatgggcgacagtgcagctctcctcgatgggatacagacggcgcggtggcgctcgagcagaaatagcagaggtgttttctgtgtccatggaaagctctcggcatgacctgtgccgctgtgcgctatgatgggcctcaactttgtgcagcccatgtcacttttgtatagttatcgctggatcaacggtgaagggtgcagattagctgactgctctctgacgttgtctagtctgaatcccacgaccccaccccacgcccgtcttcctcgcctcaacgccgccacccaatccaaccgcctggacgccacaaccccgccccacctcggcgccgccgctccatccaactacctcgacgccgccatccatccaaccgcctcggtgtctgctcctcaatacctggccgtgttcaacatgccccctggaaggatggatggggcaaggacatgcagagaccttggtgaggtgccaattactgagtatgaaaaggagagggctttaaatgtgatgaggaacaacaaaatgttgagtagccttggtataactggattaacatcacttattcgatcaagtagtacaaggaagaactctatcgctcgtgaagactttgatccattgtatgaacctgatcatagtgaggacaatgatcatcatgtggctaatcaggatgatcctttctacattgaaagaaggaacaccaacatgtctactggttttggaggaacaaaaggatccaagagagtggtagcacctaatgtagaagaccaagttggtagagtaactaggcagaagacaaaggaactatccttagttgagaaagatatacatggtttgactgcaaatacagatgagcacacattgatttctgccaattttcctgcacaccatgatgacgagattcagatgtgtgatgaagataaatggataaggggaaaaagtatgggtagacaattggaaaggataagtcgaggcctaaacactaagatcccattggtcatcactgaagggaatagacgtcctgaggttcctatgcaagctgcaatgcttgcatcagaaggaggaattgtaattaggcaacatatgccaatcctaacacactggaaggaatacaagaatgacaaatcctatttggaagacttcgtcggtagaattggtgtaagtaaatagtctttcttcctaaacatcaaatgaatagggtggtagggcctatgtcctatattgccaatttattagtatatagttagtaggtgcactttgtcccataaatagctaaaataactatggcagaaagaactgcatatgtttctctattccaaatgacaccttaccttagaaattgttctatccaatttcattagacactatgaatctctctattctaatatgcatgttttttactagggtcaatttgccatagacaccaaaaacaaagatgtcaaatatgcatgtgctgatttgatgaggtgtaatcagcgacaaatgagatataagctcaagaaggcttactttaatggtgtggcagctgacaaagtgagaacaacatcaccgttgagtactatgacagatgagcaatggatgcaactagtcaatatgtggtctaccccaaagcacaaggaaaaatgtgtgaacaacaaagtgatccgtggaaaagttcggttccagcaaaagacaggatctcggagttacattgcacatatgcatgccgtgaagcaagccaaatatggagatgcaccaccaagtgcgattgatctttttaaagagtgccattgtagtaggaagactggttttgctgagcctgtaaaggaagcaattgacacaatggaagcacttgtggctgagcctggagtagaagggaaagaatctaagacccctacagaagcagttgctcaagtgttgtcttcatcaaaatttctttataatattggtcttgtacctgccacaaagaaaagctgcaatggtggtgatcctacacgcgtggcagaacttgaggctgaacttgaatcagagaagcaaaactcattagaagttagagctcagttagatgccctaaagaagaaggtagaagaatcagaagaagcaagggctaaggagttagaaaagattaatgatctgcaaaaaggagcagatgagaccaatgctctccttcgtcgtctctttagcctcaataagtagttggtcgattgtgccctgattttgctgtcctatttgtactttgctttgcactctacttgatgctggtgacaaaacatgatgatagttttaattttgatatgtccttttggtactgtccttagcacactactagatgctggtgtgatgaaacatggtgacaattttgaaaaatttgaaggatttggttgttgataaatgatatctatgataatatgttgctaagtatatgtgttgattgtttattggtgtttaattacaatggattttgcttatggtacattgtgaaacaaaatgtttgggttctactggaacccggcgcttctagcagctatgtttctacgctgtgttctgtgctcttgactgcaggtttaaaaataaaaaagcaaaaaa

SEQ ID NO: 83005 - DNA, 2221 bp, Zea Mays
agaatgtactctgcaagtctgagcttatttgacacttccattcagacttcaaaaattggcacactgtggctaggtggatacactacaggtcggtagcattcaggatggtgatggcgcccgacgagggatgacgatggcgtgacgcttagcatgggcgacagtgcagctctcctcgatgggatacagacggcgcggtggcgctcgagcagaaatagcagaggtgttttctgtgtccatggaaagctctcggcatgacctgtgccgctgtgcgctatgatgggcctcaactttgtgcagcccatgtcacttttgtatagttatcgctggatcaacggtgaagggtgcagattagctgactgctctctgacgttgtctagtctgaatcccacgaccccaccccacgcccgtcttcctcgcctcaacgccgccacccaatccaaccgcctggacgccacaaccccgccccacctcggcgccgccgctccatccaactacctcgacgccgccatccatccaaccgcctcggtgtctgctcctcaatacctggccgtgttcaacatgccccctggaaggatggatggggcaaggacatgcagagaccttggtgaggtgccaattactgagtatgaaaaggagagggctttaaatgtgatgaggaacaacaaaatgttgagtagccttggtataactggattaacatcacttattcgatcaagtagtacaaggaagaactctatcgctcgtgaagactttgatccattgtatgaacctgatcatagtgaggacaatgatcatcatgtggctaatcaggatgatcctttctacattgaaagaaggaacaccaacatgtctactggttttggaggaacaaaaggatccaagagagtggtagcacctaatgtagaagaccaagttggtagagtaactaggcagaagacaaaggaactatccttagttgagaaagatatacatggtttgactgcaaatacagatgagcacacattgatttctgccaattttcctgcacaccatgatgacgagattcagatgtgtgatgaagggtcaatttgccatagacaccaaaaacaaagatgtcaaatatgcatgtgctgatttgatgaggtgtaatcagcgacaaatgagatataagctcaagaaggcttactttaatggtgtggcagctgacaaagtgagaacaacatcaccgttgagtactatgacagatgagcaatggatgcaactagtcaatatgtggtctaccccaaagcacaaggaaaaatgtgtgaacaacaaagtgatccgtggaaaagttcggttccagcaaaagacaggatctcggagttacattgcacatatgcatgccgtgaagcaagccaaatatggagatgcaccaccaagtgcgattgatctttttaaagagtgccattgtagtaggaagactggttttgctgagcctgtaaaggaagcaattgacacaatggaagcacttgtggctgagcctggagtagaagggaaagaatctaagacccctacagaagcagttgctcaagtgttgtcttcatcaaaatttctttataatattggtcttgtacctgccacaaagaaaagctgcaatggtggtgatcctacacgcgtggcagaacttgaggctgaacttgaatcagagaagcaaaactcattagaagttagagctcagttagatgccctaaagaagaaggtagaagaatcagaagaagcaagggctaaggagttagaaaagattaatgatctgcaaaaaggagcagatgagaccaatgctctccttcgtcgtctctttagcctcaataagtagttggtcgattgtgccctgattttgctgtcctatttgtactttgctttgcactctacttgatgctggtgacaaaacatgatgatagttttaattttgatatgtccttttggtactgtccttagcacactactagatgctggtgtgatgaaacatggtgacaattttgaaaaatttgaaggatttggttgttgataaatgatatctatgataatatgttgctaagtatatgtgttgattgtttattggtgtttaattacaatggattttgcttatggtacattgtgaaacaaaatgtttgggttctactggaacccggcgcttctagcagctatgtttctacgctgtgttctgtgctcttgactgcaggtttaaaaataaaaaagcaaaaaa

SEQ ID NO: 83006 - DNA, 2461 bp, Zea Mays
tgggaatgtatggaacaatccaacttcattatgggcctactcattcctggcccagaatgcccaggaaaggattttgatgtctttatggaacaactcattgaagagttattggagctttggaaaggtgtcactacttgggatgcattgagtggaaacaattttgaactacatgctgcagttatatggtgcattcacgactatccagctttgagcacattgtcaggtcgggtcacaaaaggctattacgcttgtgtgcattgtgacaaaaatccttgctccaaaagaataaggaacaagatatgctatgtttatcatcgacgtttccttccaaaagatcatctatggaggagaaataaaacttttgatggtcatagtgaacaacgtgagaagccagaggaatttaccatagatgagttgatgcaacaattggagagggtaaaagatgtaagaccaggaaaacatactaaaagcaaaaagagaaagagggaagtagaaggtcaatgttggaaacgaagatcatgtctatgggatttgccatattggtcaagtttgaagttgcgccacaatcttgatgtaatgcacattgaaaaaaatatatgtgagtactttcttggtacatttcttggcattgttggaaagacaaaggacaccattaatgctaggcttgatttggaggacatgggcataaggagacatttacacttaaagcataatggtgactcatacaattttcctcatgcaccatacacaatgaataaaacacagaaggttgctttttgtgactttttgagaagtgtgaaattccccgatggctatgtttctaacttagcaacatgttttagtactgatggatgcaacctccaagcattgaaaactcatgattgtcatttccttcttcaaagaattttacctgctgctattagaggaatcatgagtaaggacatatatgaagcacttgctgaattaggtattttctttcagcacatatgtgctaagacattgaagttggatgttttacaaagaatgaaagttgaaatcccaatcattttgtgcaagcttgagaaaatatttcctcctttctttgatgtgatgctgcacttggctattcatttacctgacgaggcaatcctaagaggaccagtgcaatatgggtggatgtatccaattgaaagaaggttgtatacattgaaacgttttgtaagaaatatggctagacctgaaggatccattgcagaagcatatgttgctaatgagtgcttgacagcttgctcgaggtacttcgatgatgttgacacacgacacaatcgagagggtaggaacaaagagcgtgttgatttgagcagaggcaaattttatgtttttcagcatggagttgaacttcttggagtgccaagaattacatacctctaagattattatgataagatggtttggtatgtcctaaacaattgttcggaggtcgagccatatataaagaagagttagagaatgaagggattgttaatgtggaaaaaactattgagaagcacttttcctcctggtttaagaagcatattgcaagtttgcgttttgtcgatggagaagacattgatgatgacctatatgcattggcatgcgaacctgatttgcgagttcgaattttttctgcatgtcttgttgatggtgtccggtaccacaccattgaccgtgagagaaatagaagaacccaaaatagtggagtcatggttgaaggcactcataataatgaatgcattgatttttatggctgcttaaagaaatatcgagttgcagtataactcagatttgatggagcatcggacaattgttcttttccggtgtgattggtttgacactcatagcaagaaacagcacaagcaactaaggtattttatttgcaagacatcaagaattctggaaactggaagattgttcaaaaatttacacataggcacttgtggagtgtggctgaaaatgacattgatgaaagacctagttcctcaggactatcataccaagatgatacatgtgttggttctgaagtgcaagttaatgaaggagatatggagatacctggacatcaggatgctgacgaatctgttaatgtcaatgcaagtgtggttgatgaatttcgggtgcaacgagaagaggaagtggaagagtatgagacaagcgacaatgaagatgaaactggatggcaatatgctagtgacaacgaagaatcaataactattgtcaatgacgatgatgatttcagtgataacgagtagcatgttttttgtttgatctgagagaagtgaactctatgctgtattttgtttgatttttaagaagtgaactagctactgttatttgagaaaagtgaactgtatgctgtaatttgtttgatttttaagaagtgaactcgctacggttatttgagaggagtgaactttatgcaataatttgttcgagctttgagaag

SEQ ID NO: 83007 - DNA, 2333 bp, Zea Mays
ggcaaatatttattataccatacaactttcctccatgggaatgtatggaacaatccaacttcattatgggcctactcattcctggcccagaatgcccaggaaaggattttgatgtctttatggaacaactcattgaagagttattggagctttggaaaggtgtcactacttgggatgcattgagtggaaacaattttgaactacatgctgcagttatatggtgcattcacgactatccagctttgagcacattgtcaggtcgggtcacaaaaggctattacgcttgtgtgcattgtgacaaaaatccttgctccaaaagaataaggaacaagatatgctatgtttatcatcgacgtttccttccaaaagatcatctatggaggagaaataaaacttttgatggtcatagtgaacaacgtgagaagccagaggaatttaccatagatgagttgatgcaacaattggagagggtaaaagatgtaagaccaggaaaacatactaaaagcaaaaagagaaagagggaagtagaaggtcaatgttggaaacgaagatcatgtctatgggatttgccatattggtcaagtttgaagttgcgccacaatcttgatgtaatgcacattgaaaaaaatatatgtgagtactttcttggtacatttcttggcattgttggaaagacaaaggacaccattaatgctaggcttgatttggaggacatgggcataaggagacatttacacttaaagcataatggtgactcatacaattttcctcatgcaccatacacaatgaataaaacacagaaggttgctttttgtgactttttgagaagtgtgaaattccccgatggctatgtttctaacttagcaacatgttttagtactgatggatgcaacctccaagcattgaaaactcatgattgtcatttccttcttcaaagaattttacctgctgctattagaggaatcatgagtaaggacatatatgaagcacttgctgaattaggtattttctttcagcacatatgtgctaagacattgaagttggatgttttacaaagaatgaaagttgaaatcccaatcattttgtgcaagcttgagaaaatatttcctcctttctttgatgtgatgctgcacttggctattcatttacctgacgaggcaatcctaagaggaccagtgcaatatgggtggatgtatccaattgaaagaaggttgtatacattgaaacgttttgtaagaaatatggctagacctgaaggatccattgcagaagcatatgttgctaatgagtgcttgacagcttgctcgaggtacttcgatgatgttgacacacgacacaatcgagaggattgcaagtttgcgttttgtcgatggagaagacattgatgatgacctatatgcattggcatgcgaacctgatttgcgagttcgaattttttctgcatgtcttgttgatggtgtccggtaccacaccattgaccgtgagagaaatagaagaacccaaaatagtggagtcatggttgaaggcactcataataatgaatgcattgatttttatggctgcttaaagaaatatcgagttgcagtataactcagatttgatggagcatcggacaattgttcttttccggtgtgattggtttgacactcatagcaagaaagttagtatgaaatatgatggatatttagaagtataaaccatagtagttgttggtacaaaaatgatacttttattttagcagcacaagcaactaaggtattttatttgcaagacatcaagaattctggaaactggaagattgttcaaaaatttacacataggcacttgtggagtgtggctgaaaatgacattgatgaaagacctagttcctcaggactatcataccaagatgatacatgtgttggttctgaagtgcaagttaatgaaggagatatggagatacctggacatcaggatgctgacgaatctgttaatgtcaatgcaagtgtggttgatgaatttcgggtgcaacgagaagaggaagtggaagagtatgagacaagcgacaatgaagatgaaactggatggcaatatgctagtgacaacgaagaatcaataactattgtcaatgacgatgatgatttcagtgataacgagtagcatgttttttgtttgatctgagagaagtgaactctatgctgtattttgtttgatttttaagaagtgaactagctactgttatttgagaaaagtgaactgtatgctgtaatttgtttgatttttaagaagtgaactcgctacggttatttgagaggagtgaactttatgcaataatttgttcgagctttgagaag

SEQ ID NO: 83008 - DNA, 2501 bp, Zea Mays
catgtggcaaatatttattataccatacaactttcctccatgggaatgtatggaacaatccaacttcattatgggcctactcattcctggcccagaatgcccaggaaaggattttgatgtctttatggaacaactcattgaagagttattggagctttggaaaggtgtcactacttgggatgcattgagtggaaacaattttgaactacatgctgcagttatatggtgcattcacgactatccagctttgagcacattgtcaggtcgggtcacaaaaggctattacgcttgtgtgcattgtgacaaaaatccttgctccaaaagaataaggaacaagatatgctatgtttatcatcgacgtttccttccaaaagatcatctatggaggagaaataaaacttttgatggtcatagtgaacaacgtgagaagccagaggaatttaccatagatgagttgatgcaacaattggagagggtaaaagatgtaagaccaggaaaacatactaaaagcaaaaagagaaagagggaagtagaaggtcaatgttggaaacgaagatcatgtctatgggatttgccatattggtcaagtttgaagttgcgccacaatcttgatgtaatgcacattgaaaaaaatatatgtgagtactttcttggtacatttcttggcattgttggaaagacaaaggacaccattaatgctaggcttgatttggaggacatgggcataaggagacatttacacttaaagcataatggtgactcatacaattttcctcatgcaccatacacaatgaataaaacacagaaggttgctttttgtgactttttgagaagtgtgaaattccccgatggctatgtttctaacttagcaacatgttttagtactgatggatgcaacctccaagcattgaaaactcatgattgtcatttccttcttcaaagaattttacctgctgctattagaggaatcatgagtaaggacatatatgaagcacttgctgaattaggtattttctttcagcacatatgtgctaagacattgaagttggatgttttacaaagaatgaaagttgaaatcccaatcattttgtgcaagcttgagaaaatatttcctcctttctttgatgtgatgctgcacttggctattcatttacctgacgaggcaatcctaagaggaccagtgcaatatgggtggatgtatccaattgaaagaaggttgtatacattgaaacgttttgtaagaaatatggctagacctgaaggatccattgcagaagcatatgttgctaatgagtgcttgacagcttgctcgaggtacttcgatgatgttgacacacgacacaatcgagagggtaggaacaaagagcgtgttgatttgagcagaggcaaattttatgtttttcagcatggagttgaacttcttggagtgccaagaattacatacctctaagattattatgataagatggtttggtatgtcctaaacaattgttcggaggtcgagccatatataaaattgcaagtttgcgttttgtcgatggagaagacattgatgatgacctatatgcattggcatgcgaacctgatttgcgagttcgaattttttctgcatgtcttgttgatggtgtccggtaccacaccattgaccgtgagagaaatagaagaacccaaaatagtggagtcatggttgaaggcactcataataatgaatgcattgatttttatggctgcttaaagaaatatcgagttgcagtataactcagatttgatggagcatcggacaattgttcttttccggtgtgattggtttgacactcatagcaagaaagttagtatgaaatatgatggatatttagaagtataaaccatagtagttgttggtacaaaaatgatacttttattttagcagcacaagcaactaaggtattttatttgcaagacatcaagaattctggaaactggaagattgttcaaaaatttacacataggcacttgtggagtgtggctgaaaatgacattgatgaaagacctagttcctcaggactatcataccaagatgatacatgtgttggttctgaagtgcaagttaatgaaggagatatggagatacctggacatcaggatgctgacgaatctgttaatgtcaatgcaagtgtggttgatgaatttcgggtgcaacgagaagaggaagtggaagagtatgagacaagcgacaatgaagatgaaactggatggcaatatgctagtgacaacgaagaatcaataactattgtcaatgacgatgatgatttcagtgataacgagtagcatgttttttgtttgatctgagagaagtgaactctatgctgtattttgtttgatttttaagaagtgaactagctactgttatttgagaaaagtgaactgtatgctgtaatttgtttgatttttaagaagtgaactcgctacggttatttgagaggagtgaactttatgcaataatttgttcgagctttgagaag

SEQ ID NO: 83009 - DNA, 2497 bp, Zea Mays
catgtggcaaatatttattataccatacaactttcctccatgggaatgtatggaacaatccaacttcattatgggcctactcattcctggcccagaatgcccaggaaaggattttgatgtctttatggaacaactcattgaagagttattggagctttggaaaggtgtcactacttgggatgcattgagtggaaacaattttgaactacatgctgcagttatatggtgcattcacgactatccagctttgagcacattgtcaggtcgggtcacaaaaggctattacgcttgtgtgcattgtgacaaaaatccttgctccaaaagaataaggaacaagatatgctatgtttatcatcgacgtttccttccaaaagatcatctatggaggagaaataaaacttttgatggtcatagtgaacaacgtgagaagccagaggaatttaccatagatgagttgatgcaacaattggagagggtaaaagatgtaagaccaggaaaacatactaaaagcaaaaagagaaagagggaagtagaaggtcaatgttggaaacgaagatcatgtctatgggatttgccatattggtcaagtttgaagttgcgccacaatcttgatgtaatgcacattgaaaaaaatatatgtgagtactttcttggtacatttcttggcattgttggaaagacaaaggacaccattaatgctaggcttgatttggaggacatgggcataaggagacatttacacttaaagcataatggtgactcatacaattttcctcatgcaccatacacaatgaataaaacacagaaggttgctttttgtgactttttgagaagtgtgaaattccccgatggctatgtttctaacttagcaacatgttttagtactgatggatgcaacctccaagcattgaaaactcatgattgtcatttccttcttcaaagaattttacctgctgctattagaggaatcatgagtaaggacatatatgaagcacttgctgaattaggtattttctttcagcacatatgtgctaagacattgaagttggatgttttacaaagaatgaaagttgaaatcccaatcattttgtgcaagcttgagaaaatatttcctcctttctttgatgtgatgctgcacttggctattcatttacctgacgaggcaatcctaagaggaccagtgcaatatgggtggatgtatccaattgaaagaaggttgtatacattgaaacgttttgtaagaaatatggctagacctgaaggatccattgcagaagcatatgttgctaatgagtgcttgacagcttgctcgaggtacttcgatgatgttgacacacgacacaatcgagagggtaggaacaaagagcgtgttgatttgagcagaggcaaattttatgtttttcagcatggagttgaacttcttggagtgccaagaattacatacctctaagattattatgataagatggtttggtatgtcctaaacaattgttcggaggtcgagccatatataaaagttagagaatgaagggattgttaatgtggaaaaaactattgagaagcacttttcctcctggtttaagaagcatattgcaagtttgcgttttgtcgatggagaagacattgatgatgacctatatgcattggcatgcgaacctgatttgcgagttcgaattttttctgcatgtcttgttgatggtgtccggtaccacaccattgaccgtgagagaaatagaagaacccaaaatagtggagtcatggttgaaggcactcataataatgaatgcattgatttttatggctgcttaaagaaatatcgagttgcagtataactcagatttgatggagcatcggacaattgttcttttccggtgtgattggtttgacactcatagcaagaaacagcacaagcaactaaggtattttatttgcaagacatcaagaattctggaaactggaagattgttcaaaaatttacacataggcacttgtggagtgtggctgaaaatgacattgatgaaagacctagttcctcaggactatcataccaagatgatacatgtgttggttctgaagtgcaagttaatgaaggagatatggagatacctggacatcaggatgctgacgaatctgttaatgtcaatgcaagtgtggttgatgaatttcgggtgcaacgagaagaggaagtggaagagtatgagacaagcgacaatgaagatgaaactggatggcaatatgctagtgacaacgaagaatcaataactattgtcaatgacgatgatgatttcagtgataacgagtagcatgttttttgtttgatctgagagaagtgaactctatgctgtattttgtttgatttttaagaagtgaactagctactgttatttgagaaaagtgaactgtatgctgtaatttgtttgatttttaagaagtgaactcgctacggttatttgagaggagtgaactttatgcaataatttgttcgagctttgagaag

SEQ ID NO: 83010 - DNA, 987 bp, Zea Mays
acgcacatcaccaatttgctgcgcctgttgttgtattatgggtactccgtagatagaaaagacagataatttgatagtgattgcaagtttgcgttttgtcgatggagaagacattgatgatgacctatatgcattggcatgcgaacctgatttgcgagttcgaattttttctgcatgtcttgttgatggtgtccggtaccacaccattgaccgtgagagaaatagaagaacccaaaatagtggagtcatggttgaaggcactcataataatgaatgcattgatttttatggctgcttaaagaaatatcgagttgcagtataactcagatttgatggagcatcggacaattgttcttttccggtgtgattggtttgacactcatagcaagaaacagcacaagcaactaaggtattttatttgcaagacatcaagaattctggaaactggaagattgttcaaaaatttacacataggcacttgtggagtgtggctgaaaatgacattgatgaaagacctagttcctcaggactatcataccaagatgatacatgtgttggttctgaagtgcaagttaatgaaggagatatggagatacctggacatcaggatgctgacgaatctgttaatgtcaatgcaagtgtggttgatgaatttcgggtgcaacgagaagaggaagtggaagagtatgagacaagcgacaatgaagatgaaactggatggcaatatgctagtgacaacgaagaatcaataactattgtcaatgacgatgatgatttcagtgataacgagtagcatgttttttgtttgatctgagagaagtgaactctatgctgtattttgtttgatttttaagaagtgaactagctactgttatttgagaaaagtgaactgtatgctgtaatttgtttgatttttaagaagtgaactcgctacggttatttgagaggagtgaactttatgcaataatttgttcgagctttgagaag

SEQ ID NO: 83011 - DNA, 734 bp, Zea Mays
gggacgaggactccataggcgatctgcggggacgacaagaattgttccgctttgcacgtgctgccagtctgcctgtgctaccagatttcaacctcgacatcgacgcacatcaccaatttgctgcgcctgttgttgtattatgggtactccgtagatagaaaagacagataatttgatagtgatggacaaatcttggatcaatgcaacactatttagcaagccacacctagaaggagttagtgagttcatgaagcttgtaatagagcgatttaatgcgaatgaagagatactttgtccatgccgcaagtgtttgaatcggcttagtggacatagaggacaggtggaggaccacttatatcttcatgggatagctagtacatacactaggtggatatatcatggagaagccatggatgacataattaatgaaaatggtgattacgaggatgaacatgtgagtttcaatgatgatgctggtatgaatcaagatgaagaagatcctgatgataggattaatggtatggtagaggagttatacacagccgaagatcaaggtaaaaggaaatctatgtttggagatatactagaggagatgaaacaagaactttatcctggtgcaacttatacaagattttcgtttgtggtgaagttgcttcatattaagtcgttttatcgtatcagcaatgttggcttcactgcaatactgaagttgttgaaatcgggatttcctaatt

SEQ ID NO: 83012 - DNA, 569 bp, Zea Mays
atagaaaatagatgctaaaactcgacagctaaatacatcagatgagggcaacagatgagatctccaatcggaacgagcgggcaggtcaatacaccctaccaataaactcagcagacacgaggcatgtgcgggtaaacacatcagatcagggcaccaggcaagtgaatgactcgtctgccaaatccgcaaggtacagtaacagatgacggacgaacaggactcacatgaagaaggaggcggtgaacatgaggcctacggataccatgacgacggccagcgtcgggtaccactccaccggcacggggctcgagattgccttcgccgcctgcgacacgaatcccctgggtcagcacagcgggctcccaagcagaaccctggatctacgcaagagaaggcagtggagagttcaccattccgtgagatctgctgccgctgtagtcgccgcccgctccgcctgcctcgtcgcccccttgtcgccgccgcgatgcacaaacaactttgtgacgaccagagccaaatggatccgtccgggacgatcgcaagttttagtgggcttcggatccgaataa

SEQ ID NO: 83013 - DNA, 412 bp, Zea Mays
gaagaagcctcgagttgtcaaaaagttcatcagcgttgcttgaatcccacgaaatggccgctggttcttctcatttcttggcatatatagtcacaattggtccaaccgtccaagcaatgtccaatgtgagagcgtggaattccatggaccaaagcaaattagcaaggaatcataaaagcatatggagggactatgtatagactacaaagaagcaaaagaaacattttatgctagtttagacataatgcatcattctctaatagatgcttaggcttaccttttagcataatgtacactaaacaagtgcctttatgatgatcgtgacttctgcatttttaaatgaattttacgacactttttgttgtgttgtacgctacaattatctcaaatcacttcttcttgtgttttacgc

SEQ ID NO: 83014 - DNA, 910 bp, Zea Mays
tcctccgtctgctcccggtcctcgcgcagccgcaacctccctcattgaccctcaccacctgcatcccaagcgtcgtgcagatcgaaaccaagggggcaggcagcgacggtggtttagagtccgccgtcgatggccctgcgaggaacagatagattcgcttggtgtccgggcggctccgcgttgccgaatccgatagcatcgtggatttggcggtaggaaaagggcttggtagtagaggtggaggacaatggcgttcatggtcctagaactaagcgtgatggtctcctcaggcattggcttcgtgggtcacaattggtccaaccgtccaagcaatgtccaatgtgagagcgtggaattccatggaccaaagcaaattagcaaggaaaagggcttggtagtagaggtggaggacaatggcgttcatggtcctagaactaagcgtgatggtctcctcaggcattggcttcgtgggtggctggttcttcccgtcatagatcagaagaagcctcgagttgtcaaaaagttcatcagcgttgcttgaatcccacgaaatggccgctggttcttctcatttcttggcatatatagtcacaattggtccaaccgtccaagcaatgtccaatgtgagagcgtggaattccatggaccaaagcaaattagcaaggaatcataaaagcatatggagggactatgtatagactacaaagaagcaaaagaaacattttatgctagtttagacataatgcatcattctctaatagatgcttaggcttaccttttagcataatgtacactaaacaagtgcctttatgatgatcgtgacttctgcatttttaaatgaattttacgacactttttgttgtgttgtacgctacaattatctcaaatcacttcttcttgtgttttacgc

SEQ ID NO: 83015 - DNA, 1136 bp, Zea Mays
tcacaaaatcctgagaaattggttctactcggttagttgtcaacaaattaatgatgcacgaagaactattacttgagatggttcgtggcgccttaacattgcctcatggcactggcaagactgttagggtagcagtatttgctgaaggtcctggagcagacgaagctagagctgccggagcagatgttgttggtggtgatgagttgattgaggagatccgcacaggaggaggcaaactaagctttgacaagtgcatagcaaccccaatgttcatgccccgattgtcaaaggttgctaggatattgggtccacgtggtttgatgcctaatcctaagctaggatctgtgacgaatgatgtttctggtgcggtcaaagcggcaaaatcaggacgtgttgatttcaaaatagataaaactgctatagtgcatgttggccttgggaaggtaaactttactgaggagagtttacgtgaaaatattggtgcttttgtgcatgcacttttacttgctaagccagtgggcttaaagaaaacttcaaaatatgtcggatatgtgaagaagttcacactgagtagcacaatgggacccggacttcctgttaccataccatcactatctgtggccgccgatcactataacaaggttcaagtcagctaagtcaatacagtagaacatcgaatgtagctttctttctccaatagccgtggcctgcagatggcggtggagcttaaccagtcagcaaggttgagatttgggtggcttgctgttttgttattggggataataccttttgtggacaaggatcattcaacaaacatcataacctataactttattttatccttgtcactgcaattttgagattgcgttgctggtctacctgtgttatccagagtcttgtcatttgttgcacgaaatgtaatatcgaaatacggtagttttagggcattacttttgataataagaaatgaagtattgaaccatgattcgattcagaatccggagcgtacactcacaatcgagaataagctagctggcacgatgtctggagttattgatcagtttcttttaacttcttttcgagttatatttgatagggctggaaatggatgtctggagattcgaattattcgtatt

SEQ ID NO: 83016 - DNA, 1816 bp, Zea Mays
acacagcccacttgcttaacgcgagaaaccctcctcctccccccatttcctacatcttccagactaaaaccccaggcctcgcgagtcgccgccgaccgccgcaaccacgcgctacgcccccgatggctcacctccggctcctcttctcatacttgcggcggaacccgcagcgccaccgcctgctctcactcttccacttctcctccgacgccaagtccagctccgcctcgccgccgcctcctcccatcaagcccgtctcctacgctccgaagccgcagcagcaggccccgcccgaggagtctgccgccccgacaaccccagacgttgcccctagggaccaatccccactgccacgacggcctcagcagccgatgccgccgcgggagtggacgcggcaggatatgcggtacgtgaaggacgcggcgcccgcgatctcgcccgtctcgtacccgtccagggtcgcgccgctgccggaggaccgtccggtcggcggcgaggtggaggaggtgcaggacggggggctgcagggggagtcggagcggatccagatgaacgcggcgcgtcccaccaggagcgtctttgggatgcacgaggaggataggctgccgtacccgacggtcatacccgtcgtcaagcggccgcagaaggtcgccattgatttaatcgacgccatccgcctagttaagactagtgcaaacgagaagaagcggaattttgttgaaactgttgaagctcatgtgatattaggtgttgatcctcgtcgtggtgaccagatggttcgtggcgccttaacattgcctcatggcactggcaagtatttgctgaaggtcctggagcagacgaagctagagctgccggagcagatgttgttggtggtgatgagttgattgaggagatccgcacaggaggaggcaaactaagctttgacaagtgcatagcaaccccaatgttcatgccccgattgtcaaaggttgctaggatattgggtccacgtggtttgatgcctaatcctaagctaggatctgtgacgaatgatgtttctggtgcggtcaaagcggcaaaatcaggacgtgttgatttcaaaatagataaaactgctatagtgcatgttggccttgggaaggtaaactttactgaggagagtttacgtgaaaatattggtgcttttgtgcatgcacttttacttgctaagccagtgggcttaaagaaaacttcaaaatatgtcggatatgtgaagaagttcacactgagtagcacaatgggacccggacttcctgttaccataccatcactatctgtggccgccgatcactataacaaggttcaagtcagctaagtcaatacagtagaacatcgaatgtagctttctttctccaatagccgtggcctgcagatggcggtggagcttaaccagtcagcaaggttgagatttgggtggcttgctgttttgttattggggataataccttttgtggacaaggatcattcaacaaacatcataacctataactttattttatccttgtcactgcaattttgagattgcgttgctggtctacctgtgttatccagagtcttgtcatttgttgcacgaaatgtaatatcgaaatacggtagttttagggcattacttttgataataagaaatgaagtattgaaccatgattcgattcagaatccggagcgtacactcacaatcgagaataagctagctggcacgatgtctggagttattgatcagtttcttttaacttcttttcgagttatatttgatagggctggaaatggatgtctggagattcgaattattcgtatt

SEQ ID NO: 83017 - DNA, 1804 bp, Zea Mays
acacagcccacttgcttaacgcgagaaaccctcctcctccccccatttcctacatcttccagactaaaaccccaggcctcgcgagtcgccgccgaccgccgcaaccacgcgctacgcccccgatggctcacctccggctcctcttctcatacttgcggcggaacccgcagcgccaccgcctgctctcactcttccacttctcctccgacgccaagtccagctccgcctcgccgccgcctcctcccatcaagcccgtctcctacgctccgaagccgcagcagcaggccccgcccgaggagtctgccgccccgacaaccccagacgttgcccctagggaccaatccccactgccacgacggcctcagcagccgatgccgccgcgggagtggacgcggcaggatatgcggtacgtgaaggacgcggcgcccgcgatctcgcccgtctcgtacccgtccagggtcgcgccgctgccggaggaccgtccggtcggcggcgaggtggaggaggtgcaggacggggggctgcagggggagtcggagcggatccagatgaacgcggcgcgtcccaccaggagcgtctttgggatgcacgaggaggataggctgccgtacccgacggtcatacccgtcgtcaagcggccgcagaaggtcgccattgatttaatcgacgccatccgcctagttaagactagtgcaaacgagaagaagcggaattttgttgaaactgttgaagctcatgtgatattaggtgttgatcctcgtcgtggtgaccagatggttcgtggcgccttaacattgcctcatggcactggcaaggtcctggagcagacgaagctagagctgccggagcagatgttgttggtggtgatgagttgattgaggagatccgcacaggaggaggcaaactaagctttgacaagtgcatagcaaccccaatgttcatgccccgattgtcaaaggttgctaggatattgggtccacgtggtttgatgcctaatcctaagctaggatctgtgacgaatgatgtttctggtgcggtcaaagcggcaaaatcaggacgtgttgatttcaaaatagataaaactgctatagtgcatgttggccttgggaaggtaaactttactgaggagagtttacgtgaaaatattggtgcttttgtgcatgcacttttacttgctaagccagtgggcttaaagaaaacttcaaaatatgtcggatatgtgaagaagttcacactgagtagcacaatgggacccggacttcctgttaccataccatcactatctgtggccgccgatcactataacaaggttcaagtcagctaagtcaatacagtagaacatcgaatgtagctttctttctccaatagccgtggcctgcagatggcggtggagcttaaccagtcagcaaggttgagatttgggtggcttgctgttttgttattggggataataccttttgtggacaaggatcattcaacaaacatcataacctataactttattttatccttgtcactgcaattttgagattgcgttgctggtctacctgtgttatccagagtcttgtcatttgttgcacgaaatgtaatatcgaaatacggtagttttagggcattacttttgataataagaaatgaagtattgaaccatgattcgattcagaatccggagcgtacactcacaatcgagaataagctagctggcacgatgtctggagttattgatcagtttcttttaacttcttttcgagttatatttgatagggctggaaatggatgtctggagattcgaattattcgtatt

SEQ ID NO: 83018 - DNA, 1824 bp, Zea Mays
acacagcccacttgcttaacgcgagaaaccctcctcctccccccatttcctacatcttccagactaaaaccccaggcctcgcgagtcgccgccgaccgccgcaaccacgcgctacgcccccgatggctcacctccggctcctcttctcatacttgcggcggaacccgcagcgccaccgcctgctctcactcttccacttctcctccgacgccaagtccagctccgcctcgccgccgcctcctcccatcaagcccgtctcctacgctccgaagccgcagcagcaggccccgcccgaggagtctgccgccccgacaaccccagacgttgcccctagggaccaatccccactgccacgacggcctcagcagccgatgccgccgcgggagtggacgcggcaggatatgcggtacgtgaaggacgcggcgcccgcgatctcgcccgtctcgtacccgtccagggtcgcgccgctgccggaggaccgtccggtcggcggcgaggtggaggaggtgcaggacggggggctgcagggggagtcggagcggatccagatgaacgcggcgcgtcccaccaggagcgtctttgggatgcacgaggaggataggctgccgtacccgacggtcatacccgtcgtcaagcggccgcagaaggtcgccattgatttaatcgacgccatccgcctagttaagactagtgcaaacgagaagaagcggaattttgttgaaactgttgaagctcatgtgatattaggtgttgatcctcgtcgtggtgaccagatggttcgtggcgccttaacattgcctcatggcactggcaagggtagcagtatttgctgaaggtcctggagcagacgaagctagagctgccggagcagatgttgttggtggtgatgagttgattgaggagatccgcacaggaggaggcaaactaagctttgacaagtgcatagcaaccccaatgttcatgccccgattgtcaaaggttgctaggatattgggtccacgtggtttgatgcctaatcctaagctaggatctgtgacgaatgatgtttctggtgcggtcaaagcggcaaaatcaggacgtgttgatttcaaaatagataaaactgctatagtgcatgttggccttgggaaggtaaactttactgaggagagtttacgtgaaaatattggtgcttttgtgcatgcacttttacttgctaagccagtgggcttaaagaaaacttcaaaatatgtcggatatgtgaagaagttcacactgagtagcacaatgggacccggacttcctgttaccataccatcactatctgtggccgccgatcactataacaaggttcaagtcagctaagtcaatacagtagaacatcgaatgtagctttctttctccaatagccgtggcctgcagatggcggtggagcttaaccagtcagcaaggttgagatttgggtggcttgctgttttgttattggggataataccttttgtggacaaggatcattcaacaaacatcataacctataactttattttatccttgtcactgcaattttgagattgcgttgctggtctacctgtgttatccagagtcttgtcatttgttgcacgaaatgtaatatcgaaatacggtagttttagggcattacttttgataataagaaatgaagtattgaaccatgattcgattcagaatccggagcgtacactcacaatcgagaataagctagctggcacgatgtctggagttattgatcagtttcttttaacttcttttcgagttatatttgatagggctggaaatggatgtctggagattcgaattattcgtatt

SEQ ID NO: 83019 - DNA, 1860 bp, Zea Mays
cccaccatgataggaactacccaacaaagtagacacagcccacttgcttaacgcgagaaaccctcctcctccccccatttcctacatcttccagactaaaaccccaggcctcgcgagtcgccgccgaccgccgcaaccacgcgctacgcccccgatggctcacctccggctcctcttctcatacttgcggcggaacccgcagcgccaccgcctgctctcactcttccacttctcctccgacgccaagtccagctccgcctcgccgccgcctcctcccatcaagcccgtctcctacgctccgaagccgcagcagcaggccccgcccgaggagtctgccgccccgacaaccccagacgttgcccctagggaccaatccccactgccacgacggcctcagcagccgatgccgccgcgggagtggacgcggcaggatatgcggtacgtgaaggacgcggcgcccgcgatctcgcccgtctcgtacccgtccagggtcgcgccgctgccggaggaccgtccggtcggcggcgaggtggaggaggtgcaggacggggggctgcagggggagtcggagcggatccagatgaacgcggcgcgtcccaccaggagcgtctttgggatgcacgaggaggataggctgccgtacccgacggtcatacccgtcgtcaagcggccgcagaaggtcgccattgatttaatcgacgccatccgcctagttaagactagtgcaaacgagaagaagcggaattttgttgaaactgttgaagctcatgtgatattaggtgttgatcctcgtcgtggtgaccagatggttcgtggcgccttaacattgcctcatggcactggcaagactgttagggtagcagtatttgctgaaggtcctggagcagacgaagctagagctgccggagcagatgttgttggtggtgatgagttgattgaggagatccgcacaggaggaggcaaactaagctttgacaagtgcatagcaaccccaatgttcatgccccgattgtcaaaggttgctaggatattgggtccacgtggtttgatgcctaatcctaaggatctgtgacgaatgatgtttctggtgcggtcaaagcggcaaaatcaggacgtgttgatttcaaaatagataaaactgctatagtgcatgttggccttgggaaggtaaactttactgaggagagtttacgtgaaaatattggtgcttttgtgcatgcacttttacttgctaagccagtgggcttaaagaaaacttcaaaatatgtcggatatgtgaagaagttcacactgagtagcacaatgggacccggacttcctgttaccataccatcactatctgtggccgccgatcactataacaaggttcaagtcagctaagtcaatacagtagaacatcgaatgtagctttctttctccaatagccgtggcctgcagatggcggtggagcttaaccagtcagcaaggttgagatttgggtggcttgctgttttgttattggggataataccttttgtggacaaggatcattcaacaaacatcataacctataactttattttatccttgtcactgcaattttgagattgcgttgctggtctacctgtgttatccagagtcttgtcatttgttgcacgaaatgtaatatcgaaatacggtagttttagggcattacttttgataataagaaatgaagtattgaaccatgattcgattcagaatccggagcgtacactcacaatcgagaataagctagctggcacgatgtctggagttattgatcagtttcttttaacttcttttcgagttatatttgatagggctggaaatggatgtctggagattcgaattattcgtatt

SEQ ID NO: 83020 - DNA, 2237 bp, Zea Mays
ctagaatgggaaaccagcaactcctcactctactttcactagcttgtattaattcttccttccttcctagtgtagctgcaccattccatttcccctccgcccttgttctattccgtccgtagtgccccagcttcccctgtgtccattcagttccttcattcaatgcaaccccagctcgaatctcctccgtgacgtgcagctctccacacgtcctgcttctccgatgccactccaggtccaccccctcctcctgctcctcttggtcagctcgcttccctcctgcgccatctcctccggttcctcctcttgcgccggccgcgacgacgcggccatcgtcgccgccgcgttccggcacgtgcgcaacttccgggccccgaggacgaaagcatgccagccggtcagagcgctccgcctcccgtcgcggaacctcaccggcgcggtgtcgtgggcggcgctggcaaacctgtccgcgctcgccgcggttgacctctcgggcaacgcgctccagggcgccatcccgggcgggttctggcgcgcgccatcgctccgcgcggttgacgtctcccgcaaccagctcggtggcgcgctccgggtggagcccaacccgcagctccagtcgctcaacgtatccggcaaccgcttcaccggcgtcgacggggtggaagggctctcggggctcgtcgcgcttgacgtgtcaacgaacaggatccgggcggtgccgcggggtctgcggcgtctgacacggttgaagcggctcgacctgtcctcgaacgggatgcgggggtggttccccggcgacttgccgccgctcggtggggtgcgttcgttgaacgtctcgtacaacaagttctccggcgtggtggacacgggcgccgtcacgaagttcggccactcggcgttcgttcacgccggcaatgcgtcgctggtgttctcgggccactcgacagagccacggcggccacggccatcacctcctcatggaaaaagcaaaaagaacggtggttcggccgggacgtcgacggagagcaaggcgacgaggagtagcaagaagaggaagcatctgagcaccgggctcggcgaggacgacaacccggcggccgctgccaccgcattccgggagctcgcgcgcctccgccaccccaacattcttccgctccttggctactgcattgcaggcaaagagaagctgctactgtacgagtacatggagaagggcgatctgcaccggtggctgcacgagctgccagcgggtcggccggacatggacgacacgggcagcggcgacatttgggaggcggcggaggtcaagcggtccatctccgactggccgacccggcaccgcatcgcgctgggggtcgcccggggcctggcgttcctgcaccagggatgggccggcgggtcggggcgcgcggcggtcgtgcacggccacctggtgccgaccaacgttctgctgtgcgacgacctggagccccggatctcagacttcgggcacaacaacgacccgccgtcggcggcgacgcccgagggcgacgtgtacgggttcggcgtgctggtgctggagctgatgacggggcaggccgggtgggacgaggcgtccgtgagctgggcgcggggcatcatccgcgacggcaaagggctggacatcgtggaccctagggtgcgggacgaggccgccggggcggaggcggaagcggagcgagagatggtggagtgcctgcgggtggggtacctctgcacggcgcacgcgccggacaagcggccgacaatgcagcaggtagtgggggtgctcaaggacatccggccggcgcctcccacacccggtccgggcagctgagccaagtgccaccagccacgccgggggggtcggactcggacggacacatgctcggggtcggggtcgctggcttgcacgaagcggcggcgtggccagtggccgttccctcccaatcgaggagaagcgtccgtccgttgttttgccttatgccttgcggttgcgggttatccatgatccaccaatggatcgggagcagcttttgctgttgcacggggtcctggtggcctgatgtagtgtggaccagaacgagacctcgttgtttgtactttgctgagatgtgaatgtaacagttttctttgccacttttcattgatgagatgcctgatttctatcttctcttttaaaaaaataatgtatccatccatttgtttaatttttttcctgtaataaaattgatctcaac

SEQ ID NO: 83021 - DNA, 2543 bp, Zea Mays
ctagaatgggaaaccagcaactcctcactctactttcactagcttgtattaattcttccttccttcctagtgtagctgcaccattccatttcccctccgcccttgttctattccgtccgtagtgccccagcttcccctgtgtccattcagttccttcattcaatgcaaccccagctcgaatctcctccgtgacgtgcagctctccacacgtcctgcttctccgatgccactccaggtccaccccctcctcctgctcctcttggtcagctcgcttccctcctgcgccatctcctccggttcctcctcttgcgccggccgcgacgacgcggccatcgtcgccgccgcgttccggcacgtgcgcaacttccgggccccgaggacgaaagcatgccagccggtcagagcgctccgcctcccgtcgcggaacctcaccggcgcggtgtcgtgggcggcgctggcaaacctgtccgcgctcgccgcggttgacctctcgggcaacgcgctccagggcgccatcccgggcgggttctggcgcgcgccatcgctccgcgcggttgacgtctcccgcaaccagctcggtggcgcgctccgggtggagcccaacccgcagctccagtcgctcaacgtatccggcaaccgcttcaccggcgtcgacggggtggaagggctctcggggctcgtcgcgcttgacgtgtcaacgaacaggatccgggcggtgccgcggggtctgcggcgtctgacacggttgaagcggctcgacctgtcctcgaacgggatgcgggggtggttccccggcgacttgccgccgctcggtggggtgcgttcgttgaacgtctcgtacaacaagttctccggcgtggtggacacgggcgccgtcacgaagttcggccactcggcgttcgttcacgccggcaatgcgtcgctggtgttctcgggccactcgacagagccacggcggccacggccatcacctcctcatggaaaaagcaaaaagaacggtggttcggccgggacgtcgacggagagcaaggcgacgaggagtagcaagaagaggaagcatctgagcatcgtggcggtggcggtgatctgcggggtggtgtccctggccatgctgctctgcctggtcgggtgcgtggcgtgcggcgtgctgaagtccaggcagaagggaggaaaagacgacgacgagaagaagccacaatggggcgagaagggcgaggaggagaaggaggaggacgtggtggtcgcggcggccaggggtgcatcggcagcgcccgtggtgctgttcgagcggccgctgatgcagctcacgctggccaacctggccgcggccacgtcgggcttcggccgcgagtcgcagctcgcggagcgcggcggccgcagcggcgcagcgtacagggccgtgctccccggcgaccagcacgtcgtcgtgcgcgtcgtggagggcgccatggccgggctcggcgaggacgacaacccggcggccgctgccaccgcattccgggagctcgcgcgcctccgccaccccaacattcttccgctccttggctactgcattgcaggcaaagagaagctgctactgtacgagtacatggagaagggcgatctgcaccggtggctgcacgagctgccagcgggtcggccggacatggacgacacgggcagcggcgacatttgggaggcggcggaggtcaagcggtccatctccgactggccgacccggcaccgcatcgcgctgggggtcgcccggggcctggcgttcctgcaccagggatgggccggcgggtcggggcgcgcggcggtcgtgcacggccacctggtgccgaccaacgttctgctgtgcgacgacctggagccccggatctcagacttcgggcacaacaacgacccgccgtcggcggcgacgcccgagggcgacgtgtacgggttcggcgtgctggtgctggagctgatgacggggcaggccgggtgggacgaggccgccggggcggaggcggaagcggagcgagagatggtggagtgcctgcgggtggggtacctctgcacggcgcacgcgccggacaagcggccgacaatgcagcaggtagtgggggtgctcaaggacatccggccggcgcctcccacacccggtccgggcagctgagccaagtgccaccagccacgccgggggggtcggactcggacggacacatgctcggggtcggggtcgctggcttgcacgaagcggcggcgtggccagtggccgttccctcccaatcgaggagaagcgtccgtccgttgttttgccttatgccttgcggttgcgggttatccatgatccaccaatggatcgggagcagcttttgctgttgcacggggtcctggtggcctgatgtagtgtggaccagaacgagacctcgttgtttgtactttgctgagatgtgaatgtaacagttttctttgccacttttcattgatgagatgcctgatttctatcttctcttttaaaaaaataatgtatccatccatttgtttaatttttttcctgtaataaaattgatctcaac

SEQ ID NO: 83022 - DNA, 1862 bp, Zea Mays
cagaaaatgtttagcacaactaagagagggtggctgaagtaacaccatggtaaacaagtccatccaatgggctgggatattaattaattattacaaaacagcatgcagattgtacgatgtttattattacaatatgtataatatgccaagattttccacttggacttgacaacaagagtgaatataaagaggcaggaaattacatatgcatagggaaaacagacgctgccagttcggcatttccatccaaaactgacaaaacgccaccatccggaagctgattattgcggtgcactctgcaggtgagtgaagagaagccgcctagccagtgttctgcatgccggcggcgatgcccttcatggtgaggatgagcgtgtcttccaggccgggcgggtactcgctcgccgggttcagcttgaccagtccggcgggcttgttctcgtcggcgaactccttggacagcggcggctggggcgtcaccttgaagttggggtcccttatccgcttcagcgtgtaggcctggaacacgttcagggtggtgatgtaggggttgcgcagcaccagcccctgcttcaggaatggatcgccttcaagaatatccttgtgcccagcgatctgcacaaagagaagctgctgtgtctccacgtatttgtccctgagctgcttcccaaagggcttgagttcttccgccacaagcagctcgtcatacaagccggcaatgccggggtctcccttggcgaaaaccatctccagcaggtccagggtgaccctgaagaatggccactcgttgtacatctctttgaggacctggaagttcctgacgtccttgtcgatggcgaacttgaatgcggcgccgactcccagccacacggggaggtggaacctggtctgggtccacgagaagatccaggggatggcgcgcagggtcgtgatgccgccgccgggcctcctcttggctggccggctgccgatgttcatcctcccgtactcggtctccggtcataccgatctgaagtactcgacgaagcgcgcctccttgacgacgacggagcggtactcctccgtggccacgaccgccatctcgtccatgagcttgcgccactcgggcttgggagagaccggcgggtgcatgccgtgctccagcgtggcggccgtgaagcgctgcagagtctggaagcacaggtgctcctccccgaagcagaactcgatgacctcgccctgcaccgtcacacggatggacccgttgatggtgtccggcggctgggacaggatggcaaggtgcgtgggcccgccacccctgcccacggtgcctccgcggccgtggaacaaggtgagcttgacgccgtagcgcttggccacctgcgccatctcctcctgcgccctgtacagctgccacgccgcggacaggcggccggcgtccttgccggagtcggagtagccgaccatgacctgctgcttgcccttgatccggtccatgtaccagtccaccgagaagaggcgctccacggacgcgggcgccgactgcaggtcggccagcctctcgaacagcggcaccacgggcagcggctggcgcacgccgcactcgcgctgcaggagctccacggcgagcacgtccgagggggccgtcgccatggagatgatgtaggggccgaagctgtcgggcgggagctccgcgaggacgtggaacgcgccgatgacgtcggcgatctcgtcggtctggggaaggtccgggggcagcagcgggcgcttgcctcgcagctccgacagcagccactcctgcctcttgtcctcgggccactcgcggtacgacccgatgccgagctcgcccagcttcgtcgtgtctcctttgccctcgtagtcgg

SEQ ID NO: 83023 - DNA, 1954 bp, Zea Mays
actgaaaatagcaatttaggttaggtaggctggaatagttccagaacgcgcccttggggaagctcggaaaagcgtcacctactcacctgactcgacacctaccgcgctctccgggtggtgcgagtgcgagtgccacgagccccacgaaagcaaaggaacagacgcacgcggaccgtagcgctgtcacgttgcgtcacgcggcactatctcagccagccgtccagcacagcggaccggtccatcgatcaccgatggcctcctcgctccgccatttcgcgggcctcggctgtttctccgccgcggcgtctagctctgcctccaccagcttcctgcccggctacgcccccgacttctgcgtattcgtggcgctccgtccgatcaagccgcccgccaccgccgtagcgaaccctcccgcctctccatctccgctggaggaggagcaccggcagcaggccgccgttccatggcacagcgacgacccgccagcaccatccgttcctgcgccgctgcgggtggggatcgtcgggttcggcaactttggacagttcatcgcgggcggcgtgcagcggcagggccacaccgtgctcgcggcctccagaaccgactactctgcctactgcgcccagcatggaattcgcttcttcaggagcgtcgacgcgctgtgcgaggagcagccggacgtgctgctcatctgcagctccatcctgtccacggagagcgtcgtccgagccatccccttccacaagctccgccccgacaccatcgtcgccgacgtgctctccgtcaaggagttcccccgcaatctcctcctcgaggactaagttttagctctacgtatccaacacccacacccttacgcctactctgtggtccagaatccgtcacttgatttcctctgaatttcctggtgatgacgaagacgtacgcttatgctggaccggccaactgcactgcactgcacttacaagggaatggtgcattgccgtgtctggaatccggaacgaggatcgttgatacactgatgaacacatcgccaatctgtcaggttctcccaccaggattcgggatcatctgcacacacccgatgttcgggccggagagtggcaaacacggctggggcaagcttcccttcgtcttcgacaaggtccgtgtcgcggacgacggggatcaggcggcaacgtgcgaccggttcttgagcatatttgagcaggagggttgtaggatggtggagatgtcgtgtgccgagcatgatcgctacgccgcggggagccagttcatcacgcacacaattgggagggttctgtcacagctgaacctcagttcaaccccaatcaacaccaagggctacgagaccctgctgcaacttacccagaacaccgtaagcgacagtttcgacctgtactacgggctcttcatgtacaatatcaatgccacagagcagctcgacaggctggaaatggcatttgagaaggtgagacagatgttgtctggcaggctccacgacttcataagaaagcagattgtggagagggcggacccttcaggaaaattggcaaatggcagatgcgaggtgacgatgaacttgaagtccaacctttgggtcaacatctgaactacaaggttatctcaagtataaggtaagttgtgcccttgatcactcttatttatctaataatgttcctgttaatcactgtgacatgctcaggttaatttgatgggacctaataggttaccctagttttgtttaccccacacctttcaaacaaatgaattattgggtagattggctatgctctacctggtttttgggaagtaatgctatatgacatatgatcatgctttatcattgttactagattatttattgttcatgacaagaatatggtgttaattggaacattgagcttaacttgagataacagtgctaccacaaggtaggaatgggacgcccttg

SEQ ID NO: 83024 - DNA, 1894 bp, Zea Mays
actgaaaatagcaatttaggttaggtaggctggaatagttccagaacgcgcccttggggaagctcggaaaagcgtcacctactcacctgactcgacacctaccgcgctctccgggtggtgcgagtgcgagtgccacgagccccacgaaagcaaaggaacagacgcacgcggaccgtagcgctgtcacgttgcgtcacgcggcactatctcagccagccgtccagcacagcggaccggtccatcgatcaccgatggcctcctcgctccgccatttcgcgggcctcggctgtttctccgccgcggcgtctagctctgcctccaccagcttcctgcccggctacgcccccgacttctgcgtattcgtggcgctccgtccgatcaagccgcccgccaccgccgtagcgaaccctcccgcctctccatctccgctggaggaggagcaccggcagcaggccgccgttccatggcacagcgacgacccgccagcaccatccgttcctgcgccgctgcgggtggggatcgtcgggttcggcaactttggacagttcatcgcgggcggcgtgcagcggcagggccacaccgtgctcgcggcctccagaaccgactactctgcctactgcgcccagcatggaattcgcttcttcaggagcgtcgacgcgctgtgcgaggagcagccggacgtgctgctcatctgcagctccatcctgtccacggagagcgtcgtccgagccatccccttccacaagctccgccccgacaccatcgtcgccgacgtgctctccgtcaaggagttcccccgcaatctcctcctcgagaatccgtcacttgatttcctctgaatttcctggtgatgacgaagacgtacgcttatgctggaccggccaactgcactgcactgcacttacaagggaatggtgcattgccgtgtctggaatccggaacgaggatcgttgatacactgatgaacacatcgccaatctgtcaggttctcccaccaggattcgggatcatctgcacacacccgatgttcgggccggagagtggcaaacacggctggggcaagcttcccttcgtcttcgacaaggtccgtgtcgcggacgacggggatcaggcggcaacgtgcgaccggttcttgagcatatttgagcaggagggttgtaggatggtggagatgtcgtgtgccgagcatgatcgctacgccgcggggagccagttcatcacgcacacaattgggagggttctgtcacagctgaacctcagttcaaccccaatcaacaccaagggctacgagaccctgctgcaacttacccagaacaccgtaagcgacagtttcgacctgtactacgggctcttcatgtacaatatcaatgccacagagcagctcgacaggctggaaatggcatttgagaaggtgagacagatgttgtctggcaggctccacgacttcataagaaagcagattgtggagagggcggacccttcaggaaaattggcaaatggcagatgcgaggtgacgatgaacttgaagtccaacctttgggtcaacatctgaactacaaggttatctcaagtataaggtaagttgtgcccttgatcactcttatttatctaataatgttcctgttaatcactgtgacatgctcaggttaatttgatgggacctaataggttaccctagttttgtttaccccacacctttcaaacaaatgaattattgggtagattggctatgctctacctggtttttgggaagtaatgctatatgacatatgatcatgctttatcattgttactagattatttattgttcatgacaagaatatggtgttaattggaacattgagcttaacttgagataacagtgctaccacaaggtaggaatgggacgcccttg

SEQ ID NO: 83025 - DNA, 1511 bp, Zea Mays
actgaaaatagcaatttaggttaggtaggctggaatagttccagaacgcgcccttggggaagctcggaaaagcgtcacctactcacctgactcgacacctaccgcgctctccgggtggtgcgagtgcgagtgccacgagccccacgaaagcaaaggaacagacgcacgcggaccgtagcgctgtcacgttgcgtcacgcggcactatctcagccagccgtccagcacagcggaccggtccatcgatcaccgatggcctcctcgctccgccatttcgcgggcctcggctgtttctccgccgcggcgtctagctctgcctccaccagcttcctgcccggctacgcccccgacttctgcgtattcgtggcgctccgtccgatcaagccgcccgccaccgccgtagcgaaccctcccgcctctccatctccgctggaggaggagcaccggcagcaggccgccgttccatggcacagcgacgacccgccagcaccatccgttcctgcgccgctgcgggtggggatcgtcgggttcggcaactttggacagttcatcgcgggcggcgtgcagcggcagggccacaccgtgctcgcggcctccagaaccgactactctgcctactgcgcccagcatggaattcgcttcttcaggagcgtcgacgcgctgtgcgaggagcagccggacgtgctgctcatctgcagctccatcctgtccacggagagcgtcgtccgagccatccccttccacaagctccgccccgacaccatcgtcgccgacgtgctctccgtcaaggagttcccccgcaatctcctcctcgaggttctcccaccaggattcgggatcatctgcacacacccgatgttcgggccggagagtggcaaacacggctggggcaagcttcccttcgtcttcgacaaggtccgtgtcgcggacgacggggatcaggcggcaacgtgcgaccggttcttgagcatatttgagcaggagacaattcttgtagggttgtaggatggtggagatgtcgtgtgccgagcatgatcgctacgccgcggggagccagttcatcacgcacacaattgggagggttctgtcacagctgaacctcagttcaaccccaatcaacaccaagggctacgagaccctgctgcaacttacccagaacaccgtaagcgacagtttcgacctgtactacgggctcttcatgtacaatatcaatgccacagagcagctcgacaggctggaaatggcatttgagaaggtgagacagatgttgtctggcaggctccacgacttcataagaaagcagattgtggagagggcggacccttcaggaaaattggcaaatggcaggtccagttctcctgcagcgcaccacttatcgacattaacagaagaaaataagacacgtgtatcccccgctcttactctagcctctcctacgctttagttaaacttgtataaatttgaccatgttttgttaataaaaaaatattgatatatacagatctaaatgaa

SEQ ID NO: 83026 - DNA, 1490 bp, Zea Mays
actgaaaatagcaatttaggttaggtaggctggaatagttccagaacgcgcccttggggaagctcggaaaagcgtcacctactcacctgactcgacacctaccgcgctctccgggtggtgcgagtgcgagtgccacgagccccacgaaagcaaaggaacagacgcacgcggaccgtagcgctgtcacgttgcgtcacgcggcactatctcagccagccgtccagcacagcggaccggtccatcgatcaccgatggcctcctcgctccgccatttcgcgggcctcggctgtttctccgccgcggcgtctagctctgcctccaccagcttcctgcccggctacgcccccgacttctgcgtattcgtggcgctccgtccgatcaagccgcccgccaccgccgtagcgaaccctcccgcctctccatctccgctggaggaggagcaccggcagcaggccgccgttccatggcacagcgacgacccgccagcaccatccgttcctgcgccgctgcgggtggggatcgtcgggttcggcaactttggacagttcatcgcgggcggcgtgcagcggcagggccacaccgtgctcgcggcctccagaaccgactactctgcctactgcgcccagcatggaattcgcttcttcaggagcgtcgacgcgctgtgcgaggagcagccggacgtgctgctcatctgcagctccatcctgtccacggagagcgtcgtccgagccatccccttccacaagctccgccccgacaccatcgtcgccgacgtgctctccgtcaaggagttcccccgcaatctcctcctcgaggttctcccaccaggattcgggatcatctgcacacacccgatgttcgggccggagagtggcaaacacggctggggcaagcttcccttcgtcttcgacaaggtccgtgtcgcggacgacggggatcaggcggcaacgtgcgaccggttcttgagcatatttgagcaggaggatggtggagatgtcgtgtgccgagcatgatcgctacgccgcggggagccagttcatcacgcacacaattgggagggttctgtcacagctgaacctcagttcaaccccaatcaacaccaagggctacgagaccctgctgcaacttacccagaacaccgtaagcgacagtttcgacctgtactacgggctcttcatgtacaatatcaatgccacagagcagctcgacaggctggaaatggcatttgagaaggtgagacagatgttgtctggcaggctccacgacttcataagaaagcagattgtggagagggcggacccttcaggaaaattggcaaatggcaggtccagttctcctgcagcgcaccacttatcgacattaacagaagaaaataagacacgtgtatcccccgctcttactctagcctctcctacgctttagttaaacttgtataaatttgaccatgttttgttaataaaaaaatattgatatatacagatctaaatgaa

SEQ ID NO: 83027 - DNA, 493 bp, Zea Mays
attttctgcatgtgctcggaagttctgatcatgggtgagcccatcaaagacaccagtccgctcgcgatcgccccgtgtgacgtcatactgaattcggctcatctgaagccgtcgtccagggcagcaaatttctgggcaacaaagccctagtcgtgtggccttagagactgccgcatcgcggataagtaattgtcgttgagcagagttctcgttggttaaagtccagtctagtaggaggcgcagagacccgtctgtatggtcgctgggagatctatcttgacctcctttttctgttctttttggtcttagttatcgtggttggattctatagcagccttgacaggcattcgaacaacaatgtttatggttatcctatccgctttggactcttaagcatgttttcccagtctttaaatattaagagatagtttggtaactatattttttcgagggattcatattttttcaaaggaaaataaactaatttctattg

SEQ ID NO: 83028 - DNA, 646 bp, Zea Mays
cacaggtctaaggcctggttgtaattgttctcacatggccaccagatcgcgggttcgagacagcatccccatatttgcaggggaaggcttctaccctgaggtgcataagcacaacactagtcaggcagatagtgctattctcgctctgaactgcagtggcattgttcttggaacgcttcctgttagggtgagcccatcaaagacaccagtccgctcgcgatcgccccgtgtgacgtcatactgaattcggctcatctgaagccgtcgtccagggcagcaaatttctgggcaacaaagccctagtcgtgtggccttagagactgccgcatcgcggataagtaattgtcgttgagcagagttctcgttggttaaagtccagtctagtaggaggcgcagagacccgtctgtatggtcgctgggagatctatcttgacctcctttttctgttctttttggtcttagttatcgtggttggattctatagcagccttgacaggcattcgaacaacaatgtttatggttatcctatccgctttggactcttaagcatgttttcccagtctttaaatattaagagatagtttggtaactatattttttcgagggattcatattttttcaaaggaaaataaactaatttctattg

SEQ ID NO: 83029 - DNA, 974 bp, Zea Mays
tgagggacatcagacttcctaggtggtagattgccgtatctgtggtgatcctaactcagtgcttcgttttgcttttatcgagtttgctgatgacgttgctgcacaagcagcactagcacttggtggaaccgtgcttggcttttatcctgtcaaggttctgccatcaaagacagcaattttacctgtgaaccctaaatttcttcctcacactgatgatgagaaagaaatggtatccaggactgtgtattgtactaacattgacaagaagatcgcagaagatgaagtgaagcaattctttgagggaacatgtggtgaagtttctcgtctgaggctacttggtgattatgtgcactccacatgcatcgcttttgttgagtttgtccaaggatatagatggtcattctacgttgattttttccgtggaaatagcacattcttggtttaagtggaaggcagatagtgctattctcgctctgaactgcagtggcattgttcttggaacgcttcctgttagggtgagcccatcaaagacaccagtccgctcgcgatcgccccgtgtgacgtcatactgaattcggctcatctgaagccgtcgtccagggcagcaaatttctgggcaacaaagccctagtcgtgtggccttagagactgccgcatcgcggataagtaattgtcgttgagcagagttctcgttggttaaagtccagtctagtaggaggcgcagagacccgtctgtatggtcgctgggagatctatcttgacctcctttttctgttctttttggtcttagttatcgtggttggattctatagcagccttgacaggcattcgaacaacaatgtttatggttatcctatccgctttggactcttaagcatgttttcccagtctttaaatattaagagatagtttggtaactatattttttcgagggattcatattttttcaaaggaaaataaactaatttctattg

SEQ ID NO: 83030 - DNA, 934 bp, Zea Mays
caaaagtacgccaccacaagcttgtgttgagggacatcagacttcctaggtggtagattgccgtatctgtggtgatcctaactcagtgcttcgttttgcttttatcgagtttgctgatgacgttgctgcacaagcagcactagcacttggtggaaccgtgcttggcttttatcctgtcaaggttctgccatcaaagacagcaattttacctgtgaaccctaaatttcttcctcacactgatgatgagaaagaaatggtatccaggactgtgtattgtactaacattgacaagaagatcgcagaagatgaagtgaagcaattctttgagggaacatgtggtgaagtttctcgtctgaggctacttggtgattatgtgcactccacatgcatcgcttttgttgagtttgtccaagcagatagtgctattctcgctctgaactgcagtggcattgttcttggaacgcttcctgttagggtgagcccatcaaagacaccagtccgctcgcgatcgccccgtgtgacgtcatactgaattcggctcatctgaagccgtcgtccagggcagcaaatttctgggcaacaaagccctagtcgtgtggccttagagactgccgcatcgcggataagtaattgtcgttgagcagagttctcgttggttaaagtccagtctagtaggaggcgcagagacccgtctgtatggtcgctgggagatctatcttgacctcctttttctgttctttttggtcttagttatcgtggttggattctatagcagccttgacaggcattcgaacaacaatgtttatggttatcctatccgctttggactcttaagcatgttttcccagtctttaaatattaagagatagtttggtaactatattttttcgagggattcatattttttcaaaggaaaataaactaatttctattg

SEQ ID NO: 83031 - DNA, 900 bp, Zea Mays
aaacccacaagaaacaagggtggtagattgccgtatctgtggtgatcctaactcagtgcttcgttttgcttttatcgagtttgctgatgacgttgctgcacaagcagcactagcacttggtggaaccgtgcttggcttttatcctgtcaaggttctgccatcaaagacagcaattttacctgtgaaccctaaatttcttcctcacactgatgatgagaaagaaatggtatccaggactgtgtattgtactaacattgacaagaagatcgcagaagatgaagtgaagcaattctttgagggaacatgtggtgaagtttctcgtctgaggctacttggtgattatgtgcactccacatgcatcgcttttgttgagtttgtccaaatagtgctattctcgctctgaactgcagtggcattgttcttggaacgcttcctgttagggtgagcccatcaaagacaccagtccgctcgcgatcgccccgtgtgacgtcatactgaattcggctcatctgaagccgtcgtccagggcagcaaatttctgggcaacaaagccctagtcgtgtggccttagagactgccgcatcgcggataagtaattgtcgttgagcagagttctcgttggttaaagtccagtctagtaggaggcgcagagacccgtctgtatggtcgctgggagatctatcttgacctcctttttctgttctttttggtcttagttatcgtggttggattctatagcagccttgacaggcattcgaacaacaatgtttatggttatcctatccgctttggactcttaagcatgttttcccagtctttaaatattaagagatagtttggtaactatattttttcgagggattcatattttttcaaaggaaaataaactaatttctattg

SEQ ID NO: 83032 - DNA, 1748 bp, Zea Mays
ctcggctcatctcatttttctatttcggcccctctactgttccaataataataaaaagattctcgattcgatttactcgccaattttcagtgagcggcggcgatcggcttcggatcggcgcagcgcggcggagcggagatggttgccgtggcggtggatggcctgatccgcggtgcggacgccgtgccggcggcggagagggaagcggtgagggcggcagctgcggaggcggcggccaagggcggtgagggggaatcggggaaggaggaggtgagggagtatgagagcgacatgaggaagctggaggagctgctttctaagctgaacccctcggcggaggagttcgtgccgcagtcccgccgccgcgtggacggcggcgctccccgcctttcggccgacgcgcccgtgttcgtgtcgccggcgatcgactactacgcgcgccaccaccagctcccgccgccgccgcttctgcagcagcagcagccgatgcacgtgctgcagtttgtgggtggcgtcggcggggttggcatgggtggcggcggggggatggactccagcagcgacggatccgccaatggtcagccgaatcgacggagaaggaacggtttcatccaggggaggagaaggatgatgggtgcccggcctcgtcgagctgacagggaggatagtgtgcggcggacagtctatgtctctgacgttgatcagcatgtaactgaacagaaacttgctgaagttttttcaacctgtggacagatttgtgcttctggtatacttttgtcaagaatgcaggcaacaacaacaacatagccttttgtcccaatcaagttggagtaggctagagatgaaacccacaagaaacaagggtggtagattgccgtatctgtggtgatcctaactcagtgcttcgttttgcttttatcgagtttgctgatgacgttgctgcacaagcagcactagcacttggtggaaccgtgcttggcttttatcctgtcaaggttctgccatcaaagacagcaattttacctgtgaaccctaaatttcttcctcacactgatgatgagaaagaaatggtatccaggactgtgtattgtactaacattgacaagaagatcgcagaagatgaagtgaagcaattctttgagggaacatgtggtgaagtttctcgtctgaggctacttggtgattatgtgcactccacatgcatcgcttttgttgagtttgtccaagcagatagtgctattctcgctctgaactgcagtggcattgttcttggaacgcttcctgttagggtgagcccatcaaagacaccagtccgctcgcgatcgccccgtgtgacgtcatactgaattcggctcatctgaagccgtcgtccagggcagcaaatttctgggcaacaaagccctagtcgtgtggccttagagactgccgcatcgcggataagtaattgtcgttgagcagagttctcgttggttaaagtccagtctagtaggaggcgcagagacccgtctgtatggtcgctgggagatctatcttgacctcctttttctgttctttttggtcttagttatcgtggttggattctatagcagccttgacaggcattcgaacaacaatgtttatggttatcctatccgctttggactcttaagcatgttttcccagtctttaaatattaagagatagtttggtaactatattttttcgagggattcatattttttcaaaggaaaataaactaatttctattg

SEQ ID NO: 83033 - DNA, 1791 bp, Zea Mays
ctcggctcatctcatttttctatttcggcccctctactgttccaataataataaaaagattctcgattcgatttactcgccaattttcagtgagcggcggcgatcggcttcggatcggcgcagcgcggcggagcggagatggttgccgtggcggtggatggcctgatccgcggtgcggacgccgtgccggcggcggagagggaagcggtgagggcggcagctgcggaggcggcggccaagggcggtgagggggaatcggggaaggaggaggtgagggagtatgagagcgacatgaggaagctggaggagctgctttctaagctgaacccctcggcggaggagttcgtgccgcagtcccgccgccgcgtggacggcggcgctccccgcctttcggccgacgcgcccgtgttcgtgtcgccggcgatcgactactacgcgcgccaccaccagctcccgccgccgccgcttctgcagcagcagcagccgatgcacgtgctgcagtttgtgggtggcgtcggcggggttggcatgggtggcggcggggggatggactccagcagcgacggatccgccaatggtcagccgaatcgacggagaaggaacggtttcatccaggggaggagaaggatgatgggtgcccggcctcgtcgagctgacagggaggatagtgtgcggcggacagtctatgtctctgacgttgatcagcatgtaactgaacagaaacttgctgaagttttttcaacctgtggacaggtttggcttcttttcatgtttccttgtatagacactagccaagatttgtgcttctggtatacttttgtcaagaatgcaggcaacaacaacaacatagccttttgtcccaatcaagttggagtaggctagagatgaaacccacaagaaacaagggtggtagattgccgtatctgtggtgatcctaactcagtgcttcgttttgcttttatcgagtttgctgatgacgttgctgcacaagcagcactagcacttggtggaaccgtgcttggcttttatcctgtcaaggttctgccatcaaagacagcaattttacctgtgaaccctaaatttcttcctcacactgatgatgagaaagaaatggtatccaggactgtgtattgtactaacattgacaagaagatcgcagaagatgaagtgaagcaattctttgagggaacatgtggtgaagtttctcgtctgaggctacttggtgattatgtgcactccacatgcatcgcttttgttgagtttgtccaagcagatagtgctattctcgctctgaactgcagtggcattgttcttggaacgcttcctgttagggtgagcccatcaaagacaccagtccgctcgcgatcgccccgtgtgacgtcatactgaattcggctcatctgaagccgtcgtccagggcagcaaatttctgggcaacaaagccctagtcgtgtggccttagagactgccgcatcgcggataagtaattgtcgttgagcagagttctcgttggttaaagtccagtctagtaggaggcgcagagacccgtctgtatggtcgctgggagatctatcttgacctcctttttctgttctttttggtcttagttatcgtggttggattctatagcagccttgacaggcattcgaacaacaatgtttatggttatcctatccgctttggactcttaagcatgttttcccagtctttaaatattaagagatagtttggtaactatattttttcgagggattcatattttttcaaaggaaaataaactaatttctattg

SEQ ID NO: 83034 - DNA, 1328 bp, Zea Mays
atttacttgaaatcatatcatccagcctgaggtttagatgaattcgagaacgacgacacacatcgtcaggcattcctcctttgttaccatagttgttttgttataatttacacaactgaatgctgcatgtttgattaagggcctatttggaagcgcatggtttttttctttatttttagaagagaaatttacattaatatttctatatattaagtgtgggaacaaagatagtccctcgctacgtacatgtcagtacttttaattttagtcgcacgatctggggtttttcttcactgcgagggattacacaactactgtctccctttcctctctatcaactgactatttccttgctctaatgatcatcatattcactcccaaagaaaaaataatctcagtggaagataggtaaatatttcaagcttatttctagaattacaattctttctttacatagtcttttcttaatcaaaattgcattaatgatctggggttccatttttctttgtgccagtagaactaccatctggggttgattgtattctgtcaggttactgaagaaaacctcgcagcactatttataaattgcgggcaggttgtggactgtcgcatgtgtggggacccaaattcagtccttaggtttgctttcatagagttcactgatgagggtaatatatccatatccaaccatgtttcagtttgcttactctgtgtaatggatctactgtttatggggtgaaaaacatcgatgtcccagagggtgcaagggctgctctgaatctgtcaggaaccgtgcttggatattatcctatcaatgttctgctgtcaaaaactgccattgcaccagtcaacgaaacattcctacccaggtctgacgatgaacgtgaaatgtgtgcaaggactatctactgcacaaacatagacaagaaggtttggtacctgcactcatgctactaccactagctaaaagtttgcagaaatggcaccatcaagattgatctggagaccaacaagatcatggacttcatcaagtttgacgtcggcaacgtggtcatgatgaccggcgggaggaacaccatgcgtgtaggagtgatcaagaacagggagaagcacaagggcagcttcgagaccatccacgtgctgcttggagctttttgctatgtctagttttctcctatttgttgtacaggaaaacatataatggaattcaaatttggtggccgcaaaatgtggagacttgaattcatataaagttaggcttaacattagtgcaaatagttgtattttagtttagatttagagtacacttatgtatgtgttgtttgaca

SEQ ID NO: 83035 - DNA, 806 bp, Zea Mays
atggagcctagttttcctcccccacacgtatcagaattcctggattccaaatctgagacggatgttgatgttgactataacagcttgtactcaaagcaggactttctacagggtgaggttactgaagaaaacctcgcagcactatttataaattgcgggcaggttgtggactgtcgcatgtgtggggacccaaattcagtccttaggtttgctttcatagagttcactgatgaggagggtgcaagggctgctctgaatctgtcaggaaccgtgcttggatattatcctatcaatgttctgctgtcaaaaactgccattgcaccagtcaacgaaacattcctacccaggtctgacgatgaacgtgaaatgtgtgcaaggactatctactgcacaaacatagacaagaaggtttggtacctgcactcatgctactaccactagctaaaagtttgcagaaatggcaccatcaagattgatctggagaccaacaagatcatggacttcatcaagtttgacgtcggcaacgtggtcatgatgaccggcgggaggaacaccatgcgtgtaggagtgatcaagaacagggagaagcacaagggcagcttcgagaccatccacgtgctgcttggagctttttgctatgtctagttttctcctatttgttgtacaggaaaacatataatggaattcaaatttggtggccgcaaaatgtggagacttgaattcatataaagttaggcttaacattagtgcaaatagttgtattttagtttagatttagagtacacttatgtatgtgttgtttgaca

SEQ ID NO: 83036 - DNA, 1687 bp, Zea Mays
gccgggggcacaagcgaaagcgaaagcgcatagtgcccgtgctgcctgtcccttaccgcaacggtagcattcgaattctctccccaaatcgccaccctggggcacccaatgctggcagcctcccttctcgctctccgcttcctcctcgtcggcgccactgcggcggggatggggaccgggacggtgggggtgagtggtggtggccagctgtggtgcgttgcgaagaacaacgcggaggacggcgcgctgcagagcgcgattgattgggcgtgcagtgttgacggtggccgcgcggactgtgcagccatccagcagggtggcgcctgttacgatccgcccgacctccagcagcacgcctcctacgccttcaacgactacttcctccgttccggcggtgccgggagccccgccgcctgcgacttctccggcgccgccgcactcaccgcgctcaaccccatgcatctccgaaaaatggtagcttcacaggaacgacaacctatggtccaaccggtgcagacttcagcagcagtttttcatggaaactcaacttctggccattgctcttgcatatatctacatctgtaacgttttgtgccactcatgtgttgtagttttttcttaaactgtgttctgcgcgtatgataaactatcaggctgcagaatgtggtttgttcgctggtctccccttgagttttctgcattgtttgggagagagaaaactgtccaatatcagctgctccctcttttaccaggcagtcctcttcagttttgtgtggccatgtgatttcatccttctgctaactcacaactgcacaagtgcggcttgatctcttacagctgttgagtgtggagaaactgaagtggccagtacaaacatctgtgacgggcgcgtgaggattcatcttatttgaggggaaggttgagcaagctgccggggcgtctcctggccggcgccgatctcggagggaggaccgaccctgcagcggcagagcgggcacgtcgagcgcgacgagagccacaggtcgatgcagtcgcggtggtaaacatggctgcacgcgggcagaagcttgaccatggcgccgacctggatgatgccgaggcagaccgcgcactcggtcaagcccgcgcccttgccgcagtgcctcaccagccggttgtacatgaacgtggggacggccgcggcaacggcgctcagcggcagcagctcctctggctcggcggagcctcctgaggagctcgtcgcgaggacgtccgcggtgggctgctgcggtcggcggtgcgccaggtgcctgcacagcgcgacgagagcgaaggaggcggccaccgacgccgttacggagcagaagaagaggaggttgtccggtgacattgcaaattgcatggcgcccaactcggatggagatggctcgctggctgtctggttgcgtatgcaggcaggcacgctgcctcaagtacctcttctagttctaggcttctatagcagttttcttgagctgaaatggagtttactgatgattgcagttggtgtgtcggaaggctatgaagccttaacaaacacttttgcggtggttagcatagcaactacagtattcctttcattagtttggaaaactctgccacgtgtctgcatcagaccgagcacatggcaggtatgttgtcggagcggagctttcagcgggcagatttg

SEQ ID NO: 83037 - DNA, 1727 bp, Zea Mays
gccaaacttaaagccgggggcacaagcgaaagcgaaagcgcatagtgcccgtgctgcctgtcccttaccgcaacggtagcattcgaattctctccccaaatcgccaccctggggcacccaatgctggcagcctcccttctcgctctccgcttcctcctcgtcggcgccactgcggcggggatggggaccgggacggtgggggtgagtggtggtggccagctgtggtgcgttgcgaagaacaacgcggaggacggcgcgctgcagagcgcgattgattgggcgtgcagtgttgacggtggccgcgcggactgtgcagccatccagcagggtggcgcctgttacgatccgcccgacctccagcagcacgcctcctacgccttcaacgactacttcctccgttccggcggtgccgggagccccgccgcctgcgacttctccggcgccgccgcactcaccgcgctcaaccccagtcatgggagctgcgtgtttccttccagtgcatctccgaaaaatggtagcttcacaggaacgacaacctatggtccaaccggtgcagacttcagcagcagtttttcatggaaactcaacttctggccattgctcttgcatatatctacatctgtaacgttttgtgccactcatgtgttgtagttttttcttaaactgtgttctgcgcgtatgataaactatcaggctgcagaatgtggtttgttcgctggtctccccttgagttttctgcattgtttgggagagagaaaactgtccaatatcagctgctccctcttttaccaggcagtcctcttcagttttgtgtggccatgtgatttcatccttctgctaactcacaactgcacaagtgcggcttgatctcttacagctgttgagtgtggagaaactgaagtggccagtacaaacatctgtgacgggcgcgtgaggattcatcttatttgaggggaaggttgagcaagctgccggggcgtctcctggccggcgccgatctcggagggaggaccgaccctgcagcggcagagcgggcacgtcgagcgcgacgagagccacaggtcgatgcagtcgcggtggtaaacatggctgcacgcgggcagaagcttgaccatggcgccgacctggatgatgccgaggcagaccgcgcactcggtcaagcccgcgcccttgccgcagtgcctcaccagccggttgtacatgaacgtggggacggccgcggcaacggcgctcagcggcagcagctcctctggctcggcggagcctcctgaggagctcgtcgcgaggacgtccgcggtgggctgctgcggtcggcggtgcgccaggtgcctgcacagcgcgacgagagcgaaggaggcggccaccgacgccgttacggagcagaagaagaggaggttgtccggtgacattgcaaattgcatggcgcccaactcggatggagatggctcgctggctgtctggttgcgtatgcaggcaggcacgctgcctcaagtacctcttctagttctaggcttctatagcagttttcttgagctgaaatggagtttactgatgattgcagttggtgtgtcggaaggctatgaagccttaacaaacacttttgcggtggttagcatagcaactacagtattcctttcattagtttggaaaactctgccacgtgtctgcatcagaccgagcacatggcaggtatgttgtcggagcggagctttcagcgggcagatttg

SEQ ID NO: 83038 - DNA, 610 bp, Zea Mays
tctggaaaagccaaacttaaagccgggggcacaagcgaaagcgaaagcgcatagtgcccgtgctgcctgtcccttaccgcaacggtagcattcgaattctctccccaaatcgccaccctggggcacccaatgctggcagcctcccttctcgctctccgcttcctcctcgtcggcgccactgcggcggggatggggaccgggacggtgggggtgagtggtggtggccagctgtggtgcgttgcgaagaacaacgcggaggacggcgcgctgcagagcgcgattgattgggcgtgcagtgttgacggtggccgcgcggactgtgcagccatccagcagggtggcgcctgttacgatccgcccgacctccagcagcacgcctcctacgccttcaacgactacttcctccgttccggcggtgccgggagccccgccgcctgcgacttctccggcgccgccgcactcaccgcgctcaaccccagtcatgggagctgcgtgtttccttccagtgtcataagcagcacactggctatgcttgtgtctgtttaaactttgaagggcaagttagacctcagctggccgagacgaggtggcgcacagaggttaaagttgc

SEQ ID NO: 83039 - DNA, 1445 bp, Zea Mays
cccgccattatccaccacaagcagatggatcgcgagagcgcgatgcagggcagcagtggtggcaaccccggtgctgccacgcaggaggagtggctctaccctggcggctggcagccggagcaagctgtcgtggacggcgcgttcctcatggagctgctggaggacgcgccggtggcggaccagccgccagaggacgtcgaccggctaagccgcgtcatccggtccctggaggctgagatcgatggaggtgggcagccgccctcggcggtggcagacgcaggcacggcggagcaggtcctgggagacgtccatataggcgcgctggaggactaccgcctgctgccgtaccttggtagcatccccagcccctgcgtggccgaggcgccgttggagctctggacggaggtgccggcggcggtggggcatggtatgggcggttggtacctggacggcgacggcgtcatggtcgggtacgagttcagagagcagtgcttttacggctacaacgagagcccacacgttgagcaagtgtacagccccttgtgggaatgaatgatcaaatgtgaaaccacatataactatatgaattcaagcctgaatgaatgaccaaatctgtgaaaacgaaacgaatctaaatatatgaattgaagcttaaaatgtttcggagccctttctggctttctgctttcattttatcaaaaggtattgtgaacttgacgatctttcttcaattcattatcttactaaaggcttaaccacaaggcgatgtctacacctaattttgcactcgcagttttatactgctccacattatcagtaaccttactttcttttttattcgtttacacgctctcgaaaacaaattgatgttataggatttttttatgacagaagtgttaaattgaaattattcggtccttaaatataaagtatgaaagcattaagatttgctctatcccatgtgtccttaccttttaaatcttatctatacatcattttgtgcagaatgagcagtcggcaaaccaatagcaatatagcatgctgaaatctagccttcgtctccagctcgacggggaagaactgggagcatcagtccccttcacgctcatgcgaatacgtttgccggtttgcgtgagtcgtgaatatggcggcaggattcacatcggtgacaattccaatggaactcccccctctgtctcgaagcagatgagcagacgtgtggtgagggagggatgaaagtggaagagaaaggaagcattattgctttccaataaaaaagcagcgcagaggcggcggagcccaggagacgagcaggggacctgacctccaaccctatagtaatgctatgtataaagtcacaatatggaacaagaaatttattttggtcaaaataaatttgtctattgtgtaaaaatttggcatatttttttgaaacatcaaatttg

SEQ ID NO: 83040 - DNA, 1049 bp, Zea Mays
aaaacaccggtacacactggccactgctatatatacccccaacctccttcccgccattatccaccacaagcaggtagcattcagcgccataaagaacttggatttctctgctgactgcttcagcttgataacaataacaattcattgctcgtctcgagcgcagatggatcgcgagagcgcgatgcagggcagcagtggtggcaaccccggtgctgccacgcaggaggagtggctctaccctggcggctggcagccggagcaagctgtcgtggacggcgcgttcctcatggagctgctggaggacgcgccggtggcggaccagccgccagaggacgtcgaccggctaagccgcgtcatccggtccctggaggctgagatcgatggaggtgggcagccgccctcggcggtggcagacgcaggcacggcggagcaggtcctgggagacgtccatataggcgcgctggaggactaccgcctgctgccgtaccttggtagcatccccagcccctgcgtggccgaggcgccgttggagctctggacggaggtgccggcggcggtggggcatggtatgggcggttggtacctggacggcgacggcgtcatggtcggaatgagcagtcggcaaaccaatagcaatatagcatgctgaaatctagccttcgtctccagctcgacggggaagaactgggagcatcagtccccttcacgctcatgcgaatacgtttgccggtttgcgtgagtcgtgaatatggcggcaggattcacatcggtgacaattccaatggaactcccccctctgtctcgaagcagatgagcagacgtgtggtgagggagggatgaaagtggaagagaaaggaagcattattgctttccaataaaaaagcagcgcagaggcggcggagcccaggagacgagcaggggacctgacctccaaccctatagtaatgctatgtataaagtcacaatatggaacaagaaatttattttggtcaaaataaatttgtctattgtgtaaaaatttggcatatttttttgaaacatcaaatttg

SEQ ID NO: 83041 - DNA, 909 bp, Zea Mays
cttagttcagttcagttcaccgtgggttgtagtggctcacgtcttcatgtctgtgttagcgctcccctagccgcaccgggtgtttgcccaagtccttcgcacagcgattccctgcgtttggtgatcacgccgccgacgtctcaccccatcaaggtcaggctaacacgaacaccggcttgccgtcgtggatcgacgccgtgaaccacccccaacgttgaccgatccgcttacgacttctccaagcaaactttgatgagcatcgtgtgctcggtgagccactgatgctccccatactcttcgtttaagttctaccatgtcctaggttctagtcgtggctcgccggacttttgtgttcaccggtgtcacggtgaacatagctcttaaggtctccgtagccgtttctaccctgagtgagttcgccttggtccggggcatgcgggggtgcctcgattttcgctggggacggcccctttggctagttggatttcggctcgccgacactctagcgcggcggtgtcgtggacccgccgtggtaaaagaaacgaagaccgaggggttaaacgcgtgggactttgactcactgcaatagtagaataggctcggtgaaattaatttgggcagtagggacttggccgcaaaaaggataggcgcgggcgagaatggctgatgtggggccgtgctctggcaaacccgtgggccgagcgtatggtttcgggccagtaccattggtggttttcctttttcttttgagtagcaggttgcaaaattcattataaattataggaaactgcaaaaaattactaaactaattttgtagagcccacgaaattatgtagtttatattaaaattattcttagggtttttgccataataagtaaattcttagttattttaaagtacgcttgaga

SEQ ID NO: 83042 - DNA, 895 bp, Zea Mays
cttagttcagttcagttcaccgtgggttgtagtggctcacgtcttcatgtctgtgttagcgctcccctagccgcaccgggtgtttgcccaagtccttcgcacagcgattccctgcgtttggtgatcacgccgccgacgtctcaccccatcaagaacaccggcttgccgtcgtggatcgacgccgtgaaccacccccaacgttgaccgatccgcttacgacttctccaagcaaactttgatgagcatcgtgtgctcggtgagccactgatgctccccatactcttcgtttaagttctaccatgtcctaggttctagtcgtggctcgccggacttttgtgttcaccggtgtcacggtgaacatagctcttaaggtctccgtagccgtttctaccctgagtgagttcgccttggtccggggcatgcgggggtgcctcgattttcgctggggacggcccctttggctagttggatttcggctcgccgacactctagcgcggcggtgtcgtggacccgccgtggtaaaagaaacgaagaccgaggggttaaacgcgtgggactttgactcactgcaatagtagaataggctcggtgaaattaatttgggcagtagggacttggccgcaaaaaggataggcgcgggcgagaatggctgatgtggggccgtgctctggcaaacccgtgggccgagcgtatggtttcgggccagtaccattggtggttttcctttttcttttgagtagcaggttgcaaaattcattataaattataggaaactgcaaaaaattactaaactaattttgtagagcccacgaaattatgtagtttatattaaaattattcttagggtttttgccataataagtaaattcttagttattttaaagtacgcttgaga

SEQ ID NO: 83043 - DNA, 1201 bp, Zea Mays
ccgcggcccaaatcggccctgaagaaaaaggcgagattttggtgcggtgattagacattccacggaatctctcccagctgtcctgtttttccttccatggatccccctcgctagctgagcccgctggtgctcgcggtcgcgggtggtgagcgcggcctcgccggcggcgcagcggcgatggacctcccgtggctggatctgcccttcaccttcctgacgctgctccttgccacccgcctcgcctacgactactatggcgacgtcgccgccgccttcgccggcggcttctcgatccaggtcttcctcttctactgcttcgcgcgctggtaccgctacgccatcgccggccgcgccgccgccgccgctggggcccgcgacgacccgtcgccgtcggcgcggccgccgccgcagcaggaggaggacgcggacgccccgcccgtcctgacaccgctgctggggtcgccggacggcgcgcggccgtcgacgctggccaaccgttgcttcgccgtcgtgttcatggtcttcgtgccgctggtcatcgtcgtcttcgagcggagccaggccgacgtcgtggcctacgcgctctgcctcgccaacatcatcgtcatggtcgtctggctctcgccggacaccgggtcaacggtctcggccgccaagtcgctcctgcgtctcagcgacgacgaggatgaaggcagcgggggcagctccggcgcagaggacaagtgctgcgtctgcctcgccggcatgcgggaggaccaggcgcttcgggcgctgccgcggtgcggccacagcttccacgacaagtgcatcggcaagtggctcaaggcgcacccaacgtgccctgtgtgccgggccaccgccgtgccgccgccgctccacagcgggggcggcgatccgctagatgacgatattagccccgtctagctagcttcccctcagtgattcatccatcttatcttatctaacgaatttgtggacatttgttgggaaatttggtgaaaacctgtatagtaatccaaaacgttgtcaagctcaattcaacatgtcagtagtgatttgtacatacggtcccgtttgtgcactctgagaaaagcaaagccatgtctctcttgcttcatgacaatcattgaacattttgttcgagaaggggaggaaaactgtatggttttcttgaggagtacaagccgtcggtggatcacaa

SEQ ID NO: 83044 - DNA, 442 bp, Zea Mays
cactgtgccccctcctgcttatccctcatgcaagggctgggtggcagtcccctcgacctgggagataagacccagggcacctacgcccctccttcttatccttcgtgcaagactcatcgaaaccgccacaagagagagagtcgggagagctgtcgccgccgcatagcccgtgcggcttgagagagaggcgtcgtgctgggcgaaccgccactgttaggctcgaccaattgggtcagtgggattcggcaacgctcgagaagaccggttgtcgcatcgacggacgaagtggtgatcggagcgcgtgacgatttcacgccggagtcggagctccatcgtcgattccattgcgtcctgcgagcgggctacttcacagctatcactgtgaggacacgtgtcatctgaagatcatcctggtacctggaatctcaagtcacaggcaagt

SEQ ID NO: 83045 - DNA, 500 bp, Zea Mays
ttcaggcgtcgtgctttcccccctctgtgcgcatagcgggcatggccgttacaaacactgtgccccctcctgcttatccctcatgcaagggctgggtggcagtcccctcgacctgggagataagacccagggcacctacgcccctccttcttatccttcgtgcaagactcatcgaaaccgccacaagagagagagtcgggagagctgtcgccgccgcatagcccgtgcggcttgagagagaggcgtcgtgctgggcgaaccgccactgttaggctcgaccaattgggtcagtgggattcggcaacgctcgagaagaccggttgtcgcatcgacggacgaagtggtgatcggagcgcgtgacgatttcacgccggagtcggagctccatcgtcgattccattgcgtcctgcgagcgggctacttcacagctatcactgcagtgaggacacgtgtcatctgaagatcatcctggtacctggaatctcaagtcacaggcaagt

SEQ ID NO: 83046 - DNA, 1696 bp, Zea Mays
gcaaactctgtaaacttaaaagtgaaaaggaaattgaagaagtgaaattaaatctagttcatcgcaacgaaggctcgttagcttgtcgtgctagtccatctcaccgcactagccgccgctgtccgccagtgtacagtggacagggggtgatgactggatgcgggcgacgcgataaacatgcacgtcgagagaatggctgcattttccacaccgcgaaaggagcccatcactcggaaaccgtaagccgtgcaaacaacaggcgacgcaccggcgccgcgcgcgcacgcctatttctagctcgatcgtgtcctctcgccgctccggagtcctcaatccacacgcttgggcgagcaagccttgttccggaagcgcgcggacgacatgctgatgctgcacccgaggttggtgtcgtcgagcgccgtggacgacgaggaccactgcgagagctgcgcctgctactgcgccatggtgtcctgcgtctcgctgctgctcttcatcgtgctggctgccgcggtcagcatcccgagggcctgcgccatcgccggcgtcatgctgctcctgctggggctcgtcggctggctcgtgcccacggggaatggagccggtccggcggcgcagcagcagcagcagcagggccaggctgctgccgatcctggggcgcggcggctggtggtgcaccaccggtgcgcgtgcgggctaacggacgccgctatcgccgcgctgccggcggcgttcacgtactacgaggcgcccgcggtgaagaatggagtggggagcgaggacgacaagcagccgcgcggcagctccttgctgtgcgcggtttgcctggacgacgtgcggggcggcgagatggtgcggcagctgccggcgtgccgccacctgtttcacgtcgactgcgtcgacgcctggttgcgcgctcaccggacgtgcccgctctgccgctgccagctctccccgaggaacgacgtcagcacaaagcgggccgccgcggtcgtcggggagtcatccatcgacgcgttgccgccggtgtgagtgttactcactcatcaatcctccgaagctggccggcgcattggtaaactgtattggaccagattcttcatttcttaacaccacataataaagaaaacttcggcacaatttcgagggcgcgcagcagacgtgtgtctctactctctagtctctaggcatgagcatgagcctcaacatcgatcgagtggttccaaccacatcgccagacccgacgcttccagcagtcgcgaaagaagtagcatctcgccgatggggacgggtaccagaccgtacggaccagggagtctacaacttgacacgcttcagttctgccgctaccagacaggcaatcgagtctatcatgtcagtgccagcttttgtactgtatgctccgttgcaccacgagggtctgatgaatgttgctgccagttacattttcgtgagttgtaaaaccagaacaaatacccgtgtttcttaggaaactgaagcttttgggctcttggatctatttggatggaattctaaaacccgcactcgtctagataaaaataagctgacgatgtttgtgggttagaataattatctagaatgaatcctaaggcacctcagaataaaaatctcataatcctagattctcacccaaacgagctagattgttggcattattctttttatccgggttctt

SEQ ID NO: 83047 - DNA, 825 bp, Zea Mays
ctcgatcagtttctggaaaaaatttacattttttttaaaaaaaagtttgcagagtgtgactggaaattagggaagtatagttaaaaagcaaatgttgcggaactagctttacacgtaggtacgggcaaacagatgtataaagccgttaagctagttacagatgcaccaccaccaccatgtcgtcagataaatctatcatgtcgtcttgaaatttgtggaagcaaaccattgtttacaaccattccatgatgggcatgcgcatagcaaaagattctctcttcatctgtacccaccctaccttttgcatgcccattctctctttcattgtgcaatcatgttctacctggagccccctcatgcttgcatcacatggggctgcactaaacaacaatctgatggactgtgcagaagctcaatttagcatgcggaagttcagggccacgccatcaaacattttccccccattcgaaaacagttgaccactttctgaaactctactgctgcatcatcaatgtatatgcagaatggtgtatgatgaaatgtaagggtcaatcatctactagtgaatttgagactcatagttgagaaatgctacctcaacgccattggcgatagcctttgcaacaaggggcacgtaagtcttgacatcagaaaatgggacgccggagaagagcggcgcgttgtagtcgttgcccccgaactccccgacgacgaacagggatttgctgaagtaatccttgcagtctgcaaccaacattcggtgatccactgcaaaattttcgagaacattcagtgcgggtgagattggggccggaccttgctccg

SEQ ID NO: 83048 - DNA, 825 bp, Zea Mays
cgaaagtaacctcccgtcgagctgcacgccgtcaagatccccctcatacctctctcatacctcctccccctctcggccttcttgcaccctgcgatgctaaagtactccgccagcttgacgagcagtggcaggacgccctctgacccgagtcgcaccctgcaggtggcgctcgaccctaggacctggcacacagtcatggtggcttctctcggaccacaagtggcaacgtcgtggggaagctgcaccatcatgaagaggctgtcgagcgcctccaacacactttgctcctccctgcgcaaatgtgttaccatctactgatccttagatttgggatgtttctgtgtgtgcacagcaggacatatttgtcttggtttcctttcttttggattttggagggccatttcaaggacgtggaggacaagaagctcagggttgtctacgagagcctcaccgactccgacctgaagctacaatatttctatgctaggatgcagagggtatctatgtcagaaggctgctagctaccaattgaagattgtatgcgcacaaacattattatgtgcaatctttggaaggggtggcactctgcttattttgggattctgcactggtcaaggttatccttttgtatgtgtagtatattggttcagattcctcatgactcaattgaactgttgtgtatatgccatgggaaaacatatacaaataacaatacatgttttctttactaggccagtgagattgagcacttatggacaagctgtgtttaaatctaattaggaactatatgaagatgcaattttgttcttatcaaatttattaatt

SEQ ID NO: 83049 - DNA, 1058 bp, Zea Mays
cattccttccccaactctctgcaccagcaccttcccatggcgcagggttcccaggcgtccatcctctctcccttcttcccttgtgcaggcgcccccatctcctccccttttctgcagcaagcagcgcccaactgagccccctccactcgcccagccctatctccctcacggcgccctcgctggtgctcgccccccctgctggacgccgctcctcaccctggtggccgagctcttccatggatgtcagccctcatcctcaggttgcccctcccatggcgtttgttcctgcccaaccatggacgtgcccctcccttttgctgctcgccgtggacaggcttggcgccctcatcctcaggttgcccctcccatgacggtcatggtgtcatctgttctcgaaggaaaaatccctaggaatccgaaggtgatgaagtgatgccccagtgcagcgcctggtaggtgtccggtggaacgcctaagccaggactgttgtcgttcttatgaacctggtatcgattgaggtacgctagttgatcacgtgatgcggaattcaagaattgagttgatctcaagatgatgaaatgatgaactactccgacaaacgatgtctgtgaatcaatcctactactatacaggttcttagagaaaacgtttattgtgcaataaatgatggaattatcaaccttattgacaaggttggccaaacgcttggaacaatggaactattgcaaattcctttttaaagactacaacttctatcggactaggtggtcaaggctcaggattcagagtagaagatgcacataaatactggtgaatgatgccatcgacgatgatgaactgatgaaacgatggatgatgtcatcgatgaaagatggaatggaactcaaattttggtggtcgcacaagtgtggagacttgaattcatatatacttagttaggctcaatgttagcacaaacagttgatgagcaagttttcccattagtagtttagtttgaatttagagtacaattatgtatgagttatttgacaatgcttatttatgagatattgaatggt

SEQ ID NO: 83050 - DNA, 663 bp, Zea Mays
agactcctcaatcctcaacccgacgcggcggtgtgcccccctgcttttttttggcctctcctctccgttggcgacgcatacatccggcgagggagcggaagaagtcagtaaattctgtcgctccaatccggacgaggagatgccgcggatccctctgatcaagttccccaagcggaatctgaaagccccatccgcgccagtgccgtcgcaacccgcagatcagcacgcgaccctcatgtcccggttgggggctaaagcagaggcaccatcttctggagggattaaaaattaccgctttagttcagatgtgccttccccaccgtcgcatactgctgtaggaggtcaagcttcactccttcctaagcgtaaacctctgactgaagaagagattgaggctattatggaacatcaataagatcgcatacccggacttattgccttcgacctctgttattgaagtcatgttgatacagaattgggttttttttttctaattctctgcaagtcagttgtggagacattaatttccagtattctgcacatgtaactgaccaaatcgtgaacacattgaggtccttgaggaagaagtgttgatcatggaatgtttttgcatctgattattttgtattgatgtcttgaattcttgccacacctgaagatctg

SEQ ID NO: 83051 - DNA, 453 bp, Zea Mays
agactcctcaatcctcaacccgacgcggcggtgtgcccccctgcttttttttggcctctcctctccgttggcgacgcatacatccggcgagggagcggaagaagtcagtaaattctgtcgctccaatccggacgaggagatgccgcggatccctctgatcaagttccccaagcggaatctgaaagccccatccgcgccagtgccgtcgcaacccgcagatcagcacgcgaccctcatgtcccggttgggggctaaagcagaggcaccatcttctggagggattaaaaattaccgctttagttcagatgtgccttccccaccgtcgcatactgctgtaggaggtcaagcttcactccttcctaagcgtaaacctctgactgaagaagagattgaggctattatgatccaatcagtattgagaagcggccaaactatgggcgtgtttggcatggc

SEQ ID NO: 83052 - DNA, 279 bp, Zea Mays
agactcctcaatcctcaacccgacgcggcggtgtgcccccctgcttttttttggcctctcctctccgttggcgacgcatacatccggcgagggagcggaagaagtcagtaaattctgtcgctccaatccggacgaggagatgccgcggatccctctgatcaagttccccaagcggaatctgaaagccccatccgcgccagtgccgtcgcaacccgcagatcagcacgcgaccctcatgtcccggttgggaaaatagtccgcataacaatatgtttcttt

SEQ ID NO: 83053 - DNA, 1490 bp, Zea Mays
acatgtctagataaccgtgtatacctagtttcatccttacgaaattcatctcatctctctcataataaatagtctaccatgtcaccagatttattgatgtgtcatattatttaataaaataaaactttcacgaaaatgaccttatgtctatcttgtagcagctagatggtccttttacaaattaaagctgctagtgcgtgctttgctagaatgctagatcttggctcctccgtgcagttgtgcattgcatcggctgatgcttgatgggcacgcagccaaaagaactcagctagctagctccctgctcccctgtttcggctgttccacacttccactttcctcggtggaatgtaatgtgaggaggtggtgccttttcggcttttcctgctgtgatggtgccgcaatcggttggtgtcacgtgtcagttgcgctgcgcagattacagaagcaccgacctgcacctgctggacgtctctaaagccatagcaacgtggatgtttactactactaacgacggaccactgtcatcattcctattgcgtgtcaaataataatccgtcttgttaggtaatttacttaccgttttctatatataactacttcacacatatgaaccaggaacttgttcggctggcctgaaaatggccggtatgatggtctgatccacgggtgtcatctatggttggataaaatacaagtccacaaacaaatacttgttcgtttagccacgtctgtttgtaaaccagacccaatccctacgaaaaaaactcaataccggtctagaaacagtccacgactttcacaactgtggaacccatcctagccatggtgtagaagcgatggcggcgacgcgtgattcggaggaaatgacgacggcgacacaagggctcttccgctgctagccaccctcttcgtcggcgatctttcctcttattgtacctgcaccggttagagttggagaagaccaacctccaccgtcttgggatctggtaccatccccgagaggtacttcttgagatccagtacccccattttttgcaatgagtatggggttaatggagcacattaggaagaggagacatgaggatgatgatgaaatgatgatgttcttcccccagtttttgcaatgagtatggggttaatggagcacattaggaagaggagacatgaggatgatgatgaaatgatgatgttcttccatcctgcattacatttgttgtgttctagttctcttaaagggaggagggttaagaagtgatgacacacatgcaagctaagtagcgaggagcatgttttagagtttcttgaagggcatgtcaagaactgtcgagtagcattcagaatggaacctgaaatttttagagccctagccagctatcttaggaagcaaaggtcttgggtacgtgatacaaggataaaagttgaggagaagctcggtttctttgtatacatgataagccataacgcttcatttgaggatctgcaagaag

SEQ ID NO: 83054 - DNA, 810 bp, Zea Mays
ctataagaaggccagcacaggcactcgtggagaaaccgtttattcagacaattgctagagctttgaagcctggtggtgttctttgtaatcttgctgagagcatgtggctgcacacacatctaatccaggatatgcttgctatctgtcgacagacattcaaaggtgctgtgcactatgcctggacaagtgttccaacatatcccagtggtgtcattggatttttgctatgtgcaaaagaaggtcgtgcagtgaacttcttgactcctgcgaatccaattgagaaaatagaaggagcagcaaaagctggaagggaactcagattttacaattccgagatccatagggctgcttttgttctgccaacatttgtaagaagagaactggaagcatataccactcctattagttctgctgaaaacgagaaaccgaaagaatcagtgtcagaaccgcagaagataaagatattgtcaaacaacgccattcttacagcttcctagccctgagccgtactcaatcttgctcggtatagttgtattctcacagaataaatcagtcactggcttttgctgacaccgcacgagcagctttagtatagaatgatgatcgattgaataagagggtggatattgaactgatgtaatgcctctgccgaaacaatatgtctccctatcttgttaggcgtgttgtgtgttgtgcacgatttcagctgtagcttgtaaattgtacgacccgttgatgtaatgtataccctgcgtttgtgctgagaaatcacttcttttgcccgtctgcagtaatagggatgaaaacggt

SEQ ID NO: 83055 - DNA, 1552 bp, Zea Mays
tgctgatcgagggtgtagcaacctgtcacgcgtagacatgctgctttctgtgcctatccagatggctttgaatccttcatttcgattccgtgcgaagcagcactgataatgacgctcaagactgggaccttcaaagagcaataggactcatggaggttggagacgcaagaaacggttctgcagcagcggcactgacaaagggaggtgcggatgatgccgcccgcaaaccgctccctccttgctgcgtcaaggccaaggcgcgggtgcctgaaaccgaggccaactgccatgatactgtggtttcagggtggttcacggaacccagatcgcgttttggtaaaacaagcaaagtgcagtacttcaataacccgatgtggcctggagaggcccattcattgaaagtggagaagatcttgtttcaagggaaatcgccttaccaagaaattttagtttttgagtcttcaacctatggaaatgttcttgtgcttgatggtatagttcagttgactgacaaggatgaatgcgcataccaggaaatggttactcaccttccactgtgctcaattcctgcaccgaagaatgttttggttgttggaggtggtgatggtggtgtactgcgcgaaatagccagacatgattcagtggaaactattgatatatgtgagattgatcaactagttattgatgtttccaaagaattctttccaaacttatccattggattcaaagatcctcgtgtccgacttcatgttggtgatgctgttgatttcctgaggaattctcccgaaggaaaatatgatgctattattgtagattcatcagatccaattgggccagcacaggcactcgtggagaaaccgtttattcagacaattgctagagctttgaagcctgacattcaaaggtgctgtgcactatgcctggacaagtgttccaacatatcccagtggtgtcattggatttttgctatgtgcaaaagaaggtcgtgcagtgaacttcttgactcctgcgaatccaattgagaaaatagaaggagcagcaaaagctggaagggaactcagattttacaattccgagatccatagggctgcttttgttctgccaacatttgtaagaagagaactggaagcatataccactcctattagttctgctgaaaacgagaaaccgaaagaatcagtgtcagaaccgcagaagataaagatattgtcaaacaacgccattcttacagcttcctagccctgagccgtactcaatcttgctcggtatagttgtattctcacagaataaatcagtcactggcttttgctgacaccgcacgagcagctttagtatagaatgatgatcgattgaataagagggtggatattgaactgatgtaatgcctctgccgaaacaatatgtctccctatcttgttaggcgtgttgtgtgttgtgcacgatttcagctgtagcttgtaaattgtacgacccgttgatgtaatgtataccctgcgtttgtgctgagaaatcacttcttttgcccgtctgcagtaatagggatgaaaacggt

SEQ ID NO: 83056 - DNA, 1616 bp, Zea Mays
gtttgcgtgcctccgattgctgcatccgttgctgatcgagggtgtagcaacctgtcacgcgtagacatgctgctttctgtgcctatccagatggctttgaatccttcatttcgattccgtgcgaagcagcactgataatgacgctcaagactgggaccttcaaagagcaataggactcatggaggttggagacgcaagaaacggttctgcagcagcggcactgacaaagggaggtgcggatgatgccgcccgcaaaccgctccctccttgctgcgtcaaggccaaggcgcgggtgcctgaaaccgaggccaactgccatgatactgtggtttcagggtggttcacggaacccagatcgcgttttggagaggcccattcattgaaagtggagaagatcttgtttcaagggaaatcgccttaccaagaaattttagtttttgagtcttcaacctatggaaatgttcttgtgcttgatggtatagttcagttgactgacaaggatgaatgcgcataccaggaaatggttactcaccttccactgtgctcaattcctgcaccgaagaatgttttggttgttggaggtggtgatggtggtgtactgcgcgaaatagccagacatgattcagtggaaactattgatatatgtgagattgatcaactagttattgatgtttccaaagaattctttccaaacttatccattggattcaaagatcctcgtgtccgacttcatgttggtgatgctgttgatttcctgaggaattctcccgaaggaaaatatgatgctattattgtagattcatcagatccaattgggccagcacaggcactcgtggagaaaccgtttattcagacaattgctagagctttgaagcctggtggtgttctttgtaatcttgctgagagcatgtggctgcacacacatctaatccaggatatgcttgctatctgtcgacagacattcaaaggtgctgtgcactatgcctggacaagtgttccaacatatcccagtggtgtcattggatttttgctatgtgcaaaagaaggtcgtgcagtgaacttcttgactcctgcgaatccaattgagaaaatagaaggagcagcaaaagctggaagggaactcagattttacaattccgagatccatagggctgcttttgttctgccaacatttgtaagaagagaactggaagcatataccactcctattagttctgctgaaaacgagaaaccgaaagaatcagtgtcagaaccgcagaagataaagatattgtcaaacaacgccattcttacagcttcctagccctgagccgtactcaatcttgctcggtatagttgtattctcacagaataaatcagtcactggcttttgctgacaccgcacgagcagctttagtatagaatgatgatcgattgaataagagggtggatattgaactgatgtaatgcctctgccgaaacaatatgtctccctatcttgttaggcgtgttgtgtgttgtgcacgatttcagctgtagcttgtaaattgtacgacccgttgatgtaatgtataccctgcgtttgtgctgagaaatcacttcttttgcccgtctgcagtaatagggatgaaaacggt

SEQ ID NO: 83057 - DNA, 1510 bp, Zea Mays
gtttgcgtgcctccgattgctgcatccgttgctgatcgaggagactgggaccttcaaagagcaataggactcatggaggttggagacgcaagaaacggttctgcagcagcggcactgacaaagggaggtgcggatgatgccgcccgcaaaccgctccctccttgctgcgtcaaggccaaggcgcgggtgcctgaaaccgaggccaactgccatgatactgtggtttcagggtggttcacggaacccagatcgcgttttggagaggcccattcattgaaagtggagaagatcttgtttcaagggaaatcgccttaccaagaaattttagtttttgagtcttcaacctatggaaatgttcttgtgcttgatggtatagttcagttgactgacaaggatgaatgcgcataccaggaaatggttactcaccttccactgtgctcaattcctgcaccgaagaatgttttggttgttggaggtggtgatggtggtgtactgcgcgaaatagccagacatgattcagtggaaactattgatatatgtgagattgatcaactagttattgatgtttccaaagaattctttccaaacttatccattggattcaaagatcctcgtgtccgacttcatgttggtgatgctgttgatttcctgaggaattctcccgaaggaaaatatgatgctattattgtagattcatcagatccaattgggccagcacaggcactcgtggagaaaccgtttattcagacaattgctagagctttgaagcctggtggtgttctttgtaatcttgctgagagcatgtggctgcacacacatctaatccaggatatgcttgctatctgtcgacagacattcaaaggtgctgtgcactatgcctggacaagtgttccaacatatcccagtggtgtcattggatttttgctatgtgcaaaagaaggtcgtgcagtgaacttcttgactcctgcgaatccaattgagaaaatagaaggagcagcaaaagctggaagggaactcagattttacaattccgagatccatagggctgcttttgttctgccaacatttgtaagaagagaactggaagcatataccactcctattagttctgctgaaaacgagaaaccgaaagaatcagtgtcagaaccgcagaagataaagatattgtcaaacaacgccattcttacagcttcctagccctgagccgtactcaatcttgctcggtatagttgtattctcacagaataaatcagtcactggcttttgctgacaccgcacgagcagctttagtatagaatgatgatcgattgaataagagggtggatattgaactgatgtaatgcctctgccgaaacaatatgtctccctatcttgttaggcgtgttgtgtgttgtgcacgatttcagctgtagcttgtaaattgtacgacccgttgatgtaatgtataccctgcgtttgtgctgagaaatcacttcttttgcccgtctgcagtaatagggatgaaaacggt

SEQ ID NO: 83058 - DNA, 1468 bp, Zea Mays
ccctgttcgattcaccgcgaggtctgcgacggagagactgggaccttcaaagagcaataggactcatggaggttggagacgcaagaaacggttctgcagcagcggcactgacaaagggaggtgcggatgatgccgcccgcaaaccgctccctccttgctgcgtcaaggccaaggcgcgggtgcctgaaaccgaggccaactgccatgatactgtggtttcagggtggttcacggaacccagatcgcgttttggtaaaacaagcaaagtgcagtacttcaataacccgatgtggcctggagaggcccattcattgaaagtggagaagatcttgtttcaagggaaatcgccttaccaagaaattttagtttttgagtcttcaacctatggaaatgttcttgtgcttgatggtatagttcagttgactgacaaggatgaatgcgcataccaggaaatggttactcaccttccactgtgctcaattcctgcaccgaagaatgttttggttgttggaggtggtgatggtggtgtactgcgcgaaatagccagacatgattcagtggaaactattgatatatgtgagattgatcaactagttattgatgtttccaaagaattctttccaaacttatccattggattcaaagatcctcgtgtccgacttcatgttggtgatgctgttgatttcctgaggaattctcccgaaggaaaatatgatgctattattgtagattcatcagatccaattgggccagcacaggcactcgtggagaaaccgtttattcagacaattgctagagctttgaagcctgacattcaaaggtgctgtgcactatgcctggacaagtgttccaacatatcccagtggtgtcattggatttttgctatgtgcaaaagaaggtcgtgcagtgaacttcttgactcctgcgaatccaattgagaaaatagaaggagcagcaaaagctggaagggaactcagattttacaattccgagatccatagggctgcttttgttctgccaacatttgtaagaagagaactggaagcatataccactcctattagttctgctgaaaacgagaaaccgaaagaatcagtgtcagaaccgcagaagataaagatattgtcaaacaacgccattcttacagcttcctagccctgagccgtactcaatcttgctcggtatagttgtattctcacagaataaatcagtcactggcttttgctgacaccgcacgagcagctttagtatagaatgatgatcgattgaataagagggtggatattgaactgatgtaatgcctctgccgaaacaatatgtctccctatcttgttaggcgtgttgtgtgttgtgcacgatttcagctgtagcttgtaaattgtacgacccgttgatgtaatgtataccctgcgtttgtgctgagaaatcacttcttttgcccgtctgcagtaatagggatgaaaacggt

SEQ ID NO: 83059 - DNA, 1825 bp, Zea Mays
gcagcatctccaacgccacgaatggtggcaaaaataattatatataaaataaaagatgataaaatgaagaacggctagcaggtatggcacggtgaaaagattcctgctgccacctatttaagggcctccccacacgctcatcagtcatcacccactacctccattccggtgcgccatcgctctcgtcctcgccgatcgatccaaggtgtagcaacctgtcacgcgtagacatgctgctttctgtgcctatccagatggctttgaatccttcatttcgattccgtgcgaagcagcactgataatgacgctcaagactgggaccttcaaagagcaataggactcatggaggttggagacgcaagaaacggttctgcagcagcggcactgacaaagggaggtgcggatgatgccgcccgcaaaccgctccctccttgctgcgtcaaggccaaggcgcgggtgcctgaaaccgaggccaactgccatgatactgtggtttcagggtggttcacggaacccagatcgcgttttggtaaaacaagcaaagtgcagtacttcaataacccgatgtggcctggagaggcccattcattgaaagtggagaagatcttgtttcaagggaaatcgccttaccaagaaattttagtttttgagtcttcaacctatggaaatgttcttgtgcttgatggtatagttcagttgactgacaaggatgaatgcgcataccaggaaatggttactcaccttccactgtgctcaattcctgcaccgaagaatgttttggttgttggaggtggtgatggtggtgtactgcgcgaaatagccagacatgattcagtggaaactattgatatatgtgagattgatcaactagttattgatgtttccaaagaattctttccaaacttatccattggattcaaagatcctcgtgtccgacttcatgttggtgatgctgttgatttcctgaggaattctcccgaaggaaaatatgatgctattattgtagattcatcagatccaattgggccagcacaggcactcgtggagaaaccgtttattcagacaattgctagagctttgaagcctggtggtgttctttgtaatcttgctgagagcatgtggctgcacacacatctaatccaggatatgcttgctatctgtcgacagacattcaaaggtgctgtgcactatgcctggacaagtgttccaacatatcccagtggtgtcattggatttttgctatgtgcaaaagaaggtcgtgcagtgaacttcttgactcctgcgaatccaattgagaaaatagaaggagcagcaaaagctggaagggaactcagattttacaattccgagatccatagggctgcttttgttctgccaacatttgtaagaagagaactggaagcatataccactcctattagttctgctgaaaacgagaaaccgaaagaatcagtgtcagaaccgcagaagataaagatattgtcaaacaacgccattcttacagcttcctagccctgagccgtactcaatcttgctcggtatagttgtattctcacagaataaatcagtcactggcttttgctgacaccgcacgagcagctttagtatagaatgatgatcgattgaataagagggtggatattgaactgatgtaatgcctctgccgaaacaatatgtctccctatcttgttaggcgtgttgtgtgttgtgcacgatttcagctgtagcttgtaaattgtacgacccgttgatgtaatgtataccctgcgtttgtgctgagaaatcacttcttttgcccgtctgcagtaatagggatgaaaacggt

SEQ ID NO: 83060 - DNA, 1661 bp, Zea Mays
gcagcatctccaacgccacgaatggtggcaaaaataattatatataaaataaaagatgataaaatgaagaacggctagcaggtatggcacggtgaaaagattcctgctgccacctatttaagggcctccccacacgctcatcagtcatcacccactacctccattccggtgcgccatcgctctcgtcctcgccgatcgatccaagagactgggaccttcaaagagcaataggactcatggaggttggagacgcaagaaacggttctgcagcagcggcactgacaaagggaggtgcggatgatgccgcccgcaaaccgctccctccttgctgcgtcaaggccaaggcgcgggtgcctgaaaccgaggccaactgccatgatactgtggtttcagggtggttcacggaacccagatcgcgttttgtatcaaattgatgtatgtgcaggtaaaacaagcaaagtgcagtacttcaataacccgatgtggcctggagaggcccattcattgaaagtggagaagatcttgtttcaagggaaatcgccttaccaagaaattttagtttttgagtcttcaacctatggaaatgttcttgtgcttgatggtatagttcagttgactgacaaggatgaatgcgcataccaggaaatggttactcaccttccactgtgctcaattcctgcaccgaagaatgttttggttgttggaggtggtgatggtggtgtactgcgcgaaatagccagacatgattcagtggaaactattgatatatgtgagattgatcaactagttattgatgtttccaaagaattctttccaaacttatccattggattcaaagatcctcgtgtccgacttcatgttggtgatgctgttgatttcctgaggaattctcccgaaggaaaatatgatgctattattgtagattcatcagatccaattgggccagcacaggcactcgtggagaaaccgtttattcagacaattgctagagctttgaagcctgacattcaaaggtgctgtgcactatgcctggacaagtgttccaacatatcccagtggtgtcattggatttttgctatgtgcaaaagaaggtcgtgcagtgaacttcttgactcctgcgaatccaattgagaaaatagaaggagcagcaaaagctggaagggaactcagattttacaattccgagatccatagggctgcttttgttctgccaacatttgtaagaagagaactggaagcatataccactcctattagttctgctgaaaacgagaaaccgaaagaatcagtgtcagaaccgcagaagataaagatattgtcaaacaacgccattcttacagcttcctagccctgagccgtactcaatcttgctcggtatagttgtattctcacagaataaatcagtcactggcttttgctgacaccgcacgagcagctttagtatagaatgatgatcgattgaataagagggtggatattgaactgatgtaatgcctctgccgaaacaatatgtctccctatcttgttaggcgtgttgtgtgttgtgcacgatttcagctgtagcttgtaaattgtacgacccgttgatgtaatgtataccctgcgtttgtgctgagaaatcacttcttttgcccgtctgcagtaatagggatgaaaacggt

SEQ ID NO: 83061 - DNA, 1594 bp, Zea Mays
gcagcatctccaacgccacgaatggtggcaaaaataattatatataaaataaaagatgataaaatgaagaacggctagcaggtatggcacggtgaaaagattcctgctgccacctatttaagggcctccccacacgctcatcagtcatcacccactacctccattccggtgcgccatcgctctcgtcctcgccgatcgatccaagagactgggaccttcaaagagcaataggactcatggaggttggagacgcaagaaacggttctgcagcagcggcactgacaaagggaggtgcggatgatgccgcccgcaaaccgctccctccttgctgcgtcaaggccaaggcgcgggtgcctgaaaccgaggccaactgccatgatactgtggtttcagggtggttcacggaacccagatcgcgttttggagaggcccattcattgaaagtggagaagatcttgtttcaagggaaatcgccttaccaagaaattttagtttttgagtcttcaacctatggaaatgttcttgtgcttgatggtatagttcagttgactgacaaggatgaatgcgcataccaggaaatggttactcaccttccactgtgctcaattcctgcaccgaagaatgttttggttgttggaggtggtgatggtggtgtactgcgcgaaatagccagacatgattcagtggaaactattgatatatgtgagattgatcaactagttattgatgtttccaaagaattctttccaaacttatccattggattcaaagatcctcgtgtccgacttcatgttggtgatgctgttgatttcctgaggaattctcccgaaggaaaatatgatgctattattgtagattcatcagatccaattgggccagcacaggcactcgtggagaaaccgtttattcagacaattgctagagctttgaagcctgacattcaaaggtgctgtgcactatgcctggacaagtgttccaacatatcccagtggtgtcattggatttttgctatgtgcaaaagaaggtcgtgcagtgaacttcttgactcctgcgaatccaattgagaaaatagaaggagcagcaaaagctggaagggaactcagattttacaattccgagatccatagggctgcttttgttctgccaacatttgtaagaagagaactggaagcatataccactcctattagttctgctgaaaacgagaaaccgaaagaatcagtgtcagaaccgcagaagataaagatattgtcaaacaacgccattcttacagcttcctagccctgagccgtactcaatcttgctcggtatagttgtattctcacagaataaatcagtcactggcttttgctgacaccgcacgagcagctttagtatagaatgatgatcgattgaataagagggtggatattgaactgatgtaatgcctctgccgaaacaatatgtctccctatcttgttaggcgtgttgtgtgttgtgcacgatttcagctgtagcttgtaaattgtacgacccgttgatgtaatgtataccctgcgtttgtgctgagaaatcacttcttttgcccgtctgcagtaatagggatgaaaacggt

SEQ ID NO: 83062 - DNA, 1639 bp, Zea Mays
gcagcatctccaacgccacgaatggtggcaaaaataattatatataaaataaaagatgataaaatgaagaacggctagcaggtatggcacggtgaaaagattcctgctgccacctatttaagggcctccccacacgctcatcagtcatcacccactacctccattccggtgcgccatcgctctcgtcctcgccgatcgatccaagagactgggaccttcaaagagcaataggactcatggaggttggagacgcaagaaacggttctgcagcagcggcactgacaaagggaggtgcggatgatgccgcccgcaaaccgctccctccttgctgcgtcaaggccaaggcgcgggtgcctgaaaccgaggccaactgccatgatactgtggtttcagggtggttcacggaacccagatcgcgttttggtaaaacaagcaaagtgcagtacttcaataacccgatgtggcctggagaggcccattcattgaaagtggagaagatcttgtttcaagggaaatcgccttaccaagaaattttagtttttgagtcttcaacctatggaaatgttcttgtgcttgatggtatagttcagttgactgacaaggatgaatgcgcataccaggaaatggttactcaccttccactgtgctcaattcctgcaccgaagaatgttttggttgttggaggtggtgatggtggtgtactgcgcgaaatagccagacatgattcagtggaaactattgatatatgtgagattgatcaactagttattgatgtttccaaagaattctttccaaacttatccattggattcaaagatcctcgtgtccgacttcatgttggtgatgctgttgatttcctgaggaattctcccgaaggaaaatatgatgctattattgtagattcatcagatccaattgggccagcacaggcactcgtggagaaaccgtttattcagacaattgctagagctttgaagcctgacattcaaaggtgctgtgcactatgcctggacaagtgttccaacatatcccagtggtgtcattggatttttgctatgtgcaaaagaaggtcgtgcagtgaacttcttgactcctgcgaatccaattgagaaaatagaaggagcagcaaaagctggaagggaactcagattttacaattccgagatccatagggctgcttttgttctgccaacatttgtaagaagagaactggaagcatataccactcctattagttctgctgaaaacgagaaaccgaaagaatcagtgtcagaaccgcagaagataaagatattgtcaaacaacgccattcttacagcttcctagccctgagccgtactcaatcttgctcggtatagttgtattctcacagaataaatcagtcactggcttttgctgacaccgcacgagcagctttagtatagaatgatgatcgattgaataagagggtggatattgaactgatgtaatgcctctgccgaaacaatatgtctccctatcttgttaggcgtgttgtgtgttgtgcacgatttcagctgtagcttgtaaattgtacgacccgttgatgtaatgtataccctgcgtttgtgctgagaaatcacttcttttgcccgtctgcagtaatagggatgaaaacggt

SEQ ID NO: 83063 - DNA, 2048 bp, Zea Mays
caaagtcccatggcgcacccatatcctctgctccatctccctccagccatccttggattcttcttctcttccgcgcgcgcctcatctactgtttttccagccgcacccagctcctattcgccatgacgcacgaacgagctactctcctcccatctccttcctcgccctctcctggccatggctctagttctcactcgcagcggccagtaaccactgaaacccaccgcccgcgtgagcaaagacgacatcagggcgatgggacggatcctgtgcggcgaccatcctcgcattcgcgcctccccggggccacccctcttcccatcgcgccacgacggattgcgggcgacggtgctatggcggcgtgggctggggttgggggaccatgggggcggggtccgcggtgggttctggtcgcggcatggttgggcctcgctggatctgagctgccattgatgggttttctttcgagcatttgatttccaatgttctgtttttggtatgctctcactgcttcatgctcgtccctgtgcttgagctccgtcctccccagccatggtgctctacgcgcacgagctctacaatggcttgcactcccacctccaggcctctggcatcgacggcgtcaaggtcgacgtcattcacgtctggtgccgttcatctccatccgcttctcgcgtggggcttctgtcttgccaccggccagcctcgccggtgaagtccgccaccgtcctcaggtctccgagctctggagccggcctccttcattagtatcaaactccatccatgacgccggccatgcctccctggtggccacggccttctactccgcctccctggcactaacgcaagttcccgttcgtcggcgacccggccatggcgcacacgctggtttcctctgctcggcttctctggtgccgcgcacgcccttgctcgctgtccttcggctcggtctcatctacacccgagcccagcaccccctcgacaacatggcgtctcgcctctcttccctgcgtcgcatagaccgcgcccctgtgagcttcctacgtcggccatgttcagacgccaccaacatcaagcgctcgtcctcggttccatggccgtagcgcataggagtcccaatcccgattcaaactcggtgagctcccctacaagctcgcttctccctgcttgctgcactcacgtcgtcgtctacctgctcgttccacgacgtcgctcccagtcagcagctcgccggttttcctgcacgcaatcgcggatgtcgtcgcccggtccttgtctcttgccgagctcatcaccaccgtgagactctgtgttgctgtaatcggccgcgtctccccagtcatcttatgcgcactcatctccaaatttgaccgtggggccgactgtcgaccacgtcgttgcctcgcagcatttggacaccttgtcgtcactggaccacgtgttcgctcattaccacaccatttttagcatcacggttctgtaagactccacgcactcgtcaatacccggctgtcgatctccaccacacggtgccacttcggacctctggcctcgtcctactctgctccagcttgcatctaagcctagggtcaagttcgtacgccaccctgcttggtaaaataaagtgaatcggggagcgccagtgtttttggtaaattttgagttaaattactagctgttgatattgtgtgatggttgcaagcgctcgatatggaaagagggaattagatgaagaagaaagcgaagccgcacaacactcatctgatgttctacgacaagcccgagccaggacttatcagcattcttacgagtattgagtcacatttgatgctggcacgtgaattaactacgtgatgcagagaaccataactaagttgacctcaagatggtgcaaggagtggtcttcttcgtacaacgatgtcgtcagtcggaccaacctgaagggcagatagaacaagtgtcagaacaaaggctgatcgccaagtggtcgccacctaacaaacactaacctagtgttatccaggcaagccccggtgcatgcaacccct

SEQ ID NO: 83064 - DNA, 2023 bp, Zea Mays
acaaagtcccatggcgcacccatatcctctgctccatctccctccagccatccttggattcttcttctcttccgcgcgcgcctcatctactgtttttccagccgcacccagctcctattcgccatgacgcacgaacgagctactctcctcccatctccttcctcgccctctcctggccatggctctagttctcactcgcagcggccagtaaccactgaaacccaccgcccgcgtgagcaaagacgacatcagggcgatgggacggatcctgtgcggcgaccatcctcgcattcgcgcctccccggggccacccctcttcccatcgcgccacgacggattgcgggcgacggtgctatggcggcgtgggctggggttgggggaccatgggggcggggtccgcggtgggttctggtcgcggcatggttgggcctcgctggatctgagctgccattgatgggttttctttcgagcatttgatttccaatgttctgtttttggtatgctctcactgcttcatgctcgtccctgtgcttgagctccgtcctccccagccatggtgctctacgcgcacgagctctacaatggcttgcactcccacctccaggcctctggcatcgacggcgtcaaggtcgacgtcattcacgtctggtgccgttcatctccatccgcttctcgcgtggggcttctgtcttgccaccggccagcctcgccggtgaagtccgccaccgtcctcaggtctccgagctctggagccggcctccttcattagtatcaaactccatccatgacgccggccatgcctccctggtggccacggccttctactccgcctccctggcactaacgcaagttcccgttcgtcggcgacccggccatggcgcacacgctggtttcctctgctcggcttctctggtgccgcgcacgcccttgctcgctgtccttcggctcggtctcatctacacccgagcccagcaccccctcgacaacatggcgtctcgcctctcttccctgcgtcgcatagaccgcgcccctgtgagcttcctacgtcggccatgttcagacgccaccaacatcaagcgctcgtcctcggttccatggccgtagcgcataggagtcccaatcccgattcaaactcggtgagctcccctacaagctcgcttctccctgcttgctgcactcacgtcgtcgtctacctgctcgttccacgacgtcgctcccagtcagcagctcgccggttttcctgcacgcaatcgcggatgtcgtcgcccggtccttgtctcttgccgagctcatcaccaccgtgagactctgtgttgctgtaatcggccgcgtctccccagtcatcttatgcgcactcatctccaaatttgaccgtggggccgactgtcgaccacgtcgttgcctcgcagcatttggacaccttgtcgtcactggaccacgtgttcgctcattaccacaccatttttagcatcacggttctgtaagactccacgcactcgtcaatacccggctgtcgatctccaccacacggtgccacttcggacctctggcctcgtcctactctgctccagcttgcatctaagcctagggtcaagttcgtacgccaccctgcttggtaaaataaagtgaatcggggagcgccagtgtttttggtaaattttgagttaaattactagctgttgatattgtgtgatggttgcaagcgctcgatatggaaagagggaattagatgaagaagaaagcgaagccgcacaacactcatctgatgttctacgacaagcccgagccaggacttatcagcattcttacgagtattgagtcacatttgatgctgagaaccataactaagttgacctcaagatggtgcaaggagtggtcttcttcgtacaacgatgtcgtcagtcggaccaacctgaagggcagatagaacaagtgtcagaacaaaggctgatcgccaagtggtcgccacctaacaaacactaacctagtgttatccaggcaagccccggtgcatgcaacccct

SEQ ID NO: 83065 - DNA, 1495 bp, Zea Mays
cttgctcctaccgtgcccagatctccgtcgatggatggcacaatttcaggatgctccgcggccgccccatccatcctcggcctcgctggcttcgcttcaaccccgccatcctcgccccgctctccgttgatggaagccaacgaccgcctcctccatcctcgccccactcaccaccatccccttccatcaacacccctccatcaccgctccacatccacaattgtcgcgtccttccatcggcatccacaccccatgtacaactgccatgatcgcccccaccatcctcaccccgctccccaccatccccttccatcgatgccccctccatcgcccccaccagcgacccaggccggctattcgtcgtcaacgtgaggtcacaaggggaggctggtgaggtcctcgatggcgaccatcttcatggcagcagtggtggcctctgatctgggcggcatcagtgtgcgtctaggaaaccactcacgctcaatggcagtgatggcatgggagcaggtgtcggacttggaggaggtaggccatttccaggcacgaccacgactaccacctcatggtgctccccaccttcctgcacaagcaattcaaccgcatcaagctcgacttcttcctgcactcgtcgttcccctagtccgaaatctacaagacactccccgtgcgcgaggagcttctgcgcgccctgctcaactcgacctcatcggcttccacaccttcgactacgcgcgccacttcctctcctgctgcggccggatgctcgggctctcgtacgagttcaagagggggcacattcgcctcgagtactacggtcgtacggtgagcatcaagatcctgcctgtgggggtacacatggagcagctcaagacggtccccgaggtgatgtcaggctgtcagcagtaccagttctattgtgacctcttggcgcaaccggaggcggatgccatcggggtggccttttcggatgactggatctttgttggatcggtctccaagcagctaatcgttgtgtttgacttctggtttgtcagggttggatcgtcatggggctttttgggaagactattcctaagacgggatggacgagcaggtttggggagaggacctagcagcggcaggggcagaaggagagcgaaaggatggaggtgggcctgttaagaaagtcgcgacaccaggcggaaggatgtggtactatggtggtggccaagggttccatcgataacaccactccatgttcaaaggactcgtcacaatggtcgatcgtcgaacctttgacatcttatggccaagggctagaccttcctggtcctagacatcgaagcttgatgagcgggtacaacttaaccgatgttgtcgtaaccgggaacaatggagttattgatggccatagcttggtatggtggcattggttgcactcccatgagctgaaccatagccgacccaaccttctggagttcttgtattctgaagatattgtgatctcaaacttgac

SEQ ID NO: 83066 - DNA, 1116 bp, Zea Mays
atggctccagggaggatgggatctcgatgcaaaagggatgccctagcagaaaccactcctactgaatatgagaaacagagggcagcacatgtgatgaggaacaaccaaatgttccaacggcttgggattaatcagctgcgcacaataatgactgctacaagagtaaggagcaaagatgattgttcagaggaatctgggtctttgtatgacggtgaggacagtgaaggctctgagcaagaggaggatttccaggttgcaaaagtttcattttacacgcagaacaattgtgtcaagaacaaacttaatcgtgagaaggtcaatttccacagtgcacaggatctcaatcctacattgcaaaatcctatgtagtgaggcaagaaaaatataaagatatggaacctagtgcaattgatcttttcaaggagatgcattgcagcaagaagaaaggatttagtgaggccgttcagaaagctataggtgatatggaagcaatggtggcaacaccagttgaagatggacagcatgtgctgtcttcgacagaagttgtttccaatgtgctaccgggttcaagtaaatttcttcacaatgctggccttttacttgcctccaagagaagcaatacaaggactatctcgacaaggatgcaagagcttcagactcaattggacactgagaggcaagaaaaaaatggatttcgagaagaaatggaaaccttaaaggcccagtcacaagcatctgaggcaaccattgctaatcaatcgactgagattgcagatttgaagaagtccttatcagaaaataacagtctccttcgacaaatattaagcatcaatcgtggccagatgactcctccttaagtatgcttgctagggtgttggtgtcaaccatcctgaagattgatctcacaaaactttagacctcgttttatccttatgcttgctgtagaaattaatacgaactacaacttgttctattgttcacttgttatagaggattatgaatcatgtttaatgttaaaagcttatgtgttggatgcattatgcttgaaatatatgtggatattgttactttggatgtttgtaaaaaatatgtgcattatgtgttggatggttttgg

SEQ ID NO: 83067 - DNA, 160 bp, Zea Mays
caggacaactcagcaaggatctcgccaccgcagatcggcgccgttggcagcctgaccgtcaacccgcttaaccgcatcttctccggctgacttcgtgtgagcaccgtgtgcctggaggaacacctagaagaagtggtgtttgaaggagtctactccaatg

SEQ ID NO: 83068 - DNA, 2294 bp, Zea Mays
gttcgattgaccacttccattagtttagtgaaacggatgatgcggtttttactttgaccgattcagaacctctaacagctttaggcaagaaggaaggttccacaaaaccagaagaaagttgtgatcttttccatggcgagtgggttcccaattcatcaggaccagcttatactaatgcaagctgccgcttcattgagtctcctcagaactgtatgacaaatggaagacctgacacagattatctcaattggagatggaagccatatggttgtgaggtatcaccatttgacggcaagaagtttttggatggcatgaaaggcaagcattgggcactcattggtgattccatccttcgcaaccacgtccagtcattgctttgtcttctttccaaggtcgaagatgctactgaggtttaccacgacgatacattcagatccagaagatggcacttcccttcgtacaattttacgatctcccttgtctgggcaccattcctggtcaaagctaaaatatttgaggacgacgatggagtttctactgctgatctccagctgcaccttgacgttctcgagacagactggactagtcaatgggagaagttcgattacgcggtgatatccacgggccaatggttcttcaagactgcagtgtactgggagaatggagctgcgattggctgccactcctgccagaacaaaaccctggaagagaggcctccggagtactccttccgcagggcactcagggtggccttccagttcatcacatcctcacctcacaagccagtagtcttctacagaacgtgggctccctcgcattttgagaacggcgagtggttcagcggcgggacttgcaacaggacggccccattcaagccaggggaggccggtgacagagaatgggacaatagtatgtggaggattgagagagaagagtttcacaacgcggtgcctatcggtggtgaccgtctgaaactgctcgatacatttgagctctctctcctcaggcctgatggtcatccagggccttatagagcataccatccttacgagaagggcgtgacagccaaagtccagaatgactgcctccactggtgcttgcctgggcctattgatgcgtggaacgatgtaattatgaagatggtggcaaaggactgaagcattatcaggtggtagtgtggtaccctaggcatggcatctgatctgaacaccagtattgtctcaagtctcattttcatacatatgtatgtttctgggcattgcatggcgtctcctctatctggtgtcaagaaactcaagtagattcggacttctcttcatggtgggtatgatttttttttatgttaacaaaattcaattaaatcttggaaaaatcataaaaccccatgtatggcaagggagatagctatccaattgcgagcttatcgggtcacgataagatcgaggatcgtgagcttatcggtttgtagacgtagtcctatataaggcacctgtcatcccttgccagacaccatcacaatccaacatgagttaggtttttgcctctggtcacagctgtgccgccatcgtagttctcttatctcgagaatcgacgtgcatctgcaatcgggagagcaggtcttcggaacccggtgcctttgagatcctgcgtgggagatgacaaatatggttttttggaagcgtcttcacgtgattgctcgcgatcttctcgtcgatctcgtcaacgatgtcatcccttctcgtcgatctcgtcaacgatgtcatcctcgaccttgctgcttcaacgctgtcaaccctactgcttaaacccacgtcgtctactagtatgtatcagtagacatcatcttatttgacctcatacttcagttcatctattatgatcgaggtatgctgtatttttataattatgctgttaggtaacctgttaggttacttgttgtggaacagacacctagactatttattgttggtcatgatttatattcggaatttaatatggaaaatgtctagttattcaacaatccaaaaatcttattttagacaatttcctagtttaactatggctggttttgtcgacgcactgaagctagaaaaattcaatggcatgcactttaagaggtggcaagtcaagggtcacgctctgtaacaccctaaaatcatattctatgatttagaaaaaataaagtaaaatagggtcatcttcaattggtaaattgatgaattatgtgtttagaaaccttctataaaagagatttaaaacaaaagtaattcttgataaaagttatacaatattag

SEQ ID NO: 83069 - DNA, 3390 bp, Zea Mays
aaagttacagagggtgaaagattaatagttccaatctggcgtggatgtgtgcttcataataccaaactagtgaagcacagctgcggagtaataaactggcgaagccgcgtgacgagaatgttacaaactcaaataactcctcctctcccccggcttcagcggttcagctccttcacatactgacgtacacatctcctcgccgaggttgctccgtccggtggccagaccgtggttcttggcgctcttggttggtcggggtccttggcaaccggacgtctggtgttcctgtttcgaccttgaacttcttgggggtggggttttgggggcgtcacctccctgtttgtttcttgggttgatgtggcggcggcgcttcctgtgaccggaggggccaaggaggtgggactttttcggtgaagggaaaactgcgggaatggaaggcgaggcagcggcggccgaggcggtggcgcggatacggctggtgcggtgccccaagtgcgacaagttcttgccagagctgcccgcctactccgtctacgtctgcggcggatgcggcgccactctccaagcaaagaagaagaattcagcccaatcttcagatgatgctgacaatggaaatgtgaaataccttgaagtactggagtgtattccacaggcatctgcaagaaaacatggagctagtactactgataagtcagaaaccagtaagattgcagatgtacatagcaaaccagtttatggcaatcatgataggattcagacagggccaagtccctcaaatctgaacacttctattagagatgatggcaaggaggcaaagtaccgacacattcgttattgcgagaatggtgaaatggggcaatcattgagagtaagagacatgtccccgaagtctccaatcaatcacatttcagacaataatcggagtgagtaccacttgaagcagaggtacagctattctactaaggaatgccctggtgaaagaaacttggatggtccaagcaaagtcaggggacttgagaaagaccgcgctgagatcttgaggatgcttgatgagttgagagaccaggtacagcaatcttgcaatgcgactaatggggcaagtggaattgccccatctactgcagcagcagattccaacagttcacatggtacttctgaccggttgagtcaattgaggcaggttgcaccacaattgcatcagaatggttcacatcactccccatccttgaatgttggaagtcctagcgtttctcgtgtttatgctccgctgcctgcacaacaagattgtgtcagatatgcagagcctatttcacatgctcgagcctctagctatcctgccagcctctatccatggagaaattttgataattatttctttggacagcatgatcccgatcctcttctctcttgccgccatgatggcttctatcaccaagctgcctgttcttgcttgcactgttgccaccaagaattcttgcctatacagggaaatcacataggcttccatgatcaaagggcaccatatcttctgaacaattatggggcttatcctgtggacagtcccttacttggtcagcaaagatacagtgcaagagttaccaatactaccttgcagcagaatcacatgagggtcaacgttagcaagaaggctgcacagacttgtgagccagtcgcaggtggtgctccattcaccatatgctgcaattgctacgaagttctacagataccaaggaaacagtccctgtcagggaacgagtataaattgcgttgtggatcatgctcacatgcaattatagtcaagcttgatggaaacaggctcaatgtatcagaatttgcactatgtacacgtttatctgatggacaggaaaatgacatgggaaccgatgggcaaactcaagacaataggtccattccagcttaccatttatctgttggaagtcctgcatctcaagaacgagatctgcactcaaatttgagcgagtcagagaacaatcatacccctctaggaactgactcagagggcacttccctgtccagggatcttcctgctgaagacagtgcagtttcccatgtaccaaatttaccacatcacagtcattctggatcatctccaactgaacattttggagtgggaagtagaagtacccattctgaacctgaaaaagttatactattaactgaaagttccaagcagacctcagttagaggtatatgtgtaacaaacaagatgcaatctccaaacaatgagtttgatgttcctgaatacacagatgatacattaaatgaccaacaagatactgaccaccctagaacaacaaaggccagtgattcctttctcactaatctgataaaaaggagcttcaaaattaataatggattgcgcaacagaagagcaagggtttatgtaaatggctttcctatctctgatcatgtggtccgaaaggctgagaagctagcaggatcaatctgccctggcaattattggtatgactaccatgctggcttctggggcgttatgggacatccctgccttggcatgataccgccttatattcctgagttcaatttccccatgcccaagaactgtgctggtggaaacaccagcatatttgttaatggaagagagcttcaccagaaggatttggatttacttgtcactagaggactctctgattcccctggtagatcttatgtagttgaaaattctggaaaggtttcagatgaagtatctggtgaagagctttatggccttggaaagcttgcaccaacagttgagaaaatggggcggggatttggcatgcgcatcccaaggttcatcaagcgacaggccaattcgatctaccgtggttacttcaattgtgaagaaagttccattccatgtacatagctgatggcggacgaagctggccttcggctgaagtgctaccaagaaaaacccctggaagtgctgcctataaaagctgaagtagtgtgaagagaagcttcgtctaacacatacaaacggcaagggtgtaactcgaagccacaagcctcggcatgaagaggctttcaggtgtaaagtgacgaagtagacgaagtctgagacttgtgcagcaagaaagaaagagaaaagatagcaatgtccctgcatcgttcgtaaacatgtgtgtaaactttatggatatgtttgtaattttccacgaagctatttatcttcgctataaataggtgaacaatgctctacataaattcacctttttgaggaccttaccttcgttttgcttagccttcgaagtatctttgagccatcttgtgtggagaagccgaacgtatgtttgtaaactcgtttaatacgaagagaaagggaatgaaaatgctaaggcataagagatgagtcttgtacctcgttac

SEQ ID NO: 83070 - DNA, 3134 bp, Zea Mays
ccttcacatactgacgtacacatctcctcgccgaggttgctccgtccggtggccagaccgtggttcttggcgctcttggttggtcggggtccttggcaaccggacgtctggtgttcctgtttcgaccttgaacttcttgggggtggggttttgggggcgtcacctccctgtttgtttcttgggttgatgtggcggcggcgcttcctgtgaccggaggggccaaggaggtgggactttttcggtgaagggaaaactgcgggaatggaaggcgaggcagcggcggccgaggcggtggcgcggatacggctggtgcggtgccccaagtgcgacaagttcttgccagagctgcccgcctactccgtctacgtctgcggcggatgcggcgccactctccaagcaaagaagaagaattcagcccaatcttcagatgatgctgacaatggaaatgtgaaataccttgaagtactggagtgtattccacaggcatctgcaagaaaacatggagctagtactactgataagtcagaaaccagtaagattgcagatgtacatagcaaaccagtttatggcaatcatgataggattcagacagggccaagtccctcaaatctgaacacttctattagagatgatggcaaggaggcaaagtaccgacacattcgttattgcgagaatggtgaaatggggcaatcattgagagtaagagacatgtccccgaagtctccaatcaatcacatttcagacaataatcggagtgagtaccacttgaagcagaggtacagctattctactaaggaatgccctggtgaaagaaacttggatggtccaagcaaagtcaggggacttgagaaagaccgcgctgagatcttgaggatgcttgatgagttgagagaccaggtacagcaatcttgcaatgcgactaatggggcaagtggaattgccccatctactgcagcagcagattccaacagttcacatggtacttctgaccggttgagtcaattgaggcaggttgcaccacaattgcatcagaatggttcacatcactccccatccttgaatgttggaagtcctagcgtttctcgtgtttatgctccgctgcctgcacaacaagattgtgtcagatatgcagagcctatttcacatgctcgagcctctagctatcctgccagcctctatccatggagaaattttgataattatttctttggacagcatgatcccgatcctcttctctcttgccgccatgatggcttctatcaccaagctgcctgttcttgcttgcactgttgccaccaagaattcttgcctatacagggaaatcacataggcttccatgatcaaagggcaccatatcttctgaacaattatggggcttatcctgtggacagtcccttacttggtcagcaaagatacagtgcaagagttaccaatactaccttgcagcagaatcacatgagggtcaacgttagcaagaaggctgcacagacttgtgagccagtcgcaggtggtgctccattcaccatatgctgcaattgctacgaagttctacagataccaaggaaacagtccctgtcagggaacgagtataaattgcgttgtggatcatgctcacatgcaattatagtcaagcttgatggaaacaggctcaatgtatcagaatttgcactatgtacacgtttatctgatggacaggaaaatgacatgggaaccgatgggcaaactcaagacaataggtccattccagcttaccatttatctgttggaagtcctgcatctcaagaacgagatctgcactcaaatttgagcgagtcagagaacaatcatacccctctaggaactgactcagagggcacttccctgtccagggatcttcctgctgaagacagtgcagtttcccatgtaccaaatttaccacatcacagtcattctggatcatctccaactgaacattttggagtgggaagtagaagtacccattctgaacctgaaaaagttatactattaactgaaagttccaagcagacctcagttagaggtatatgtgtaacaaacaagatgcaatctccaaacaatgagtttgatgttcctgaatacacagatgatacattaaatgaccaacaagatactgaccaccctagaacaacaaaggccagtgattcctttctcactaatctgataaaaaggagcttcaaaattaataatggattgcgcaacagaagagcaagggtttatgtaaatggctttcctatctctgatcatgtggtccgaaaggctgagaagctagcaggatcaatctgccctggcaattattggtatgactaccatgctggcttctggggcgttatgggacatccctgccttggcatgataccgccttatattcctgagttcaatttccccatgcccaagaactgtgctggtggaaacaccagcatatttgttaatggaagagagcttcaccagaaggatttggatttacttgtcactagaggactctctgattcccctggtagatcttatgtagttgaaaattctggaaaggtttcagatgaagtatctggtgaagagctttatggccttggaaagcttgcaccaacagttgagaaaatggggcggggatttggcatgcgcatcccaaggttcatcaagcgacaggccaattcgatctaccgtggttacttcaattgtgaagaaagttccattccatgtatctttctttttttattatattccgattaacatgaggcctagtttagtcaatcaagtttattgtaatttcccatgcatttgtttttactgaaaaattccctttttcatttacatgtgcaagaacaatgaagcaattacctagttgaatggcatgaattgtatcaaataagggtcggtttgctttatattaaagccagctattcggactgttgcaactgcaatctatagagacaaaacattgtagaagtagaagtccgtatagattaaaaccaaacgaacatgctgtaagctaaaagggaagtaatagctatgttatcccatgttgagttagttaggtcatcattattaatatccttggtagctattgtcaataaaatttagggatggtagaaacaagatcaaaagattctttgaactttcac

SEQ ID NO: 83071 - DNA, 2522 bp, Zea Mays
gtttgctccatttctagaagcaaacgtaaacatttcatttgcttttaggataacttaggaacaaattgaaattcttgatgtgtttctaagttatgttctgaaattttgtagcctcctttgaagagcatattatcatccttcagatttgaagtggaagaaccatggccctattttcttgcacacacaaaaaacaaagaagaagaattcagcccaatcttcagatgatgctgacaatggaaatgtgaaataccttgaagtactggagtgtattccacaggcatctgcaagaaaacatggagctagtactactgataagtcagaaaccagtaagattgcagatgtacatagcaaaccagtttatggcaatcatgataggattcagacagggccaagtccctcaaatctgaacacttctattagagatgatggcaaggaggcaaagtaccgacacattcgttattgcgagaatggtgaaatggggcaatcattgagagtaagagacatgtccccgaagtctccaatcaatcacatttcagacaataatcggagtgagtaccacttgaagcagaggtacagctattctactaaggaatgccctggtgaaagaaacttggatggtccaagcaaagtcaggggacttgagaaagaccgcgctgagatcttgaggatgcttgatgagttgagagaccaggtacagcaatcttgcaatgcgactaatggggcaagtggaattgccccatctactgcagcagcagattccaacagttcacatggtacttctgaccggttgagtcaattgaggcaggttgcaccacaattgcatcagaatggttcacatcactccccatccttgaatgttggaagtcctagcgtttctcgtgtttatgctccgctgcctgcacaacaagattgtgtcagatatgcagagcctatttcacatgctcgagcctctagctatcctgccagcctctatccatggagaaattttgataattatttctttggacagcatgatcccgatcctcttctctcttgccgccatgatggcttctatcaccaagctgcctgttcttgcttgcactgttgccaccaagaattcttgcctatacagggaaatcacataggcttccatgatcaaagggcaccatatcttctgaacaattatggggcttatcctgtggacagtcccttacttggtcagcaaagatacagtgcaagagttaccaatactaccttgcagcagaatcacatgagggtcaacgttagcaagaaggctgcacagacttgtgagccagtcgcaggtggtgctccattcaccatatgctgcaattgctacgaagttctacagataccaaggaaacagtccctgtcagggaacgagtataaattgcgttgtggatcatgctcacatgcaattatagtcaagcttgatggaaacaggctcaatgtatcagaatttgcactatgtacacgtttatctgatggacaggaaaatgacatgggaaccgatgggcaaactcaagacaataggtccattccagcttaccatttatctgttggaagtcctgcatctcaagaacgagatctgcactcaaatttgagcgagtcagagaacaatcatacccctctaggaactgactcagagggcacttccctgtccagggatcttcctgctgaagacagtgcagtttcccatgtaccaaatttaccacatcacagtcattctggatcatctccaactgaacattttggagtgggaagtagaagtacccattctgaacctgaaaaagttatactattaactgaaagttccaagcagacctcagttagaggtatatgtgtaacaaacaagatgcaatctccaaacaatgagtttgatgttcctgaatacacagatgatacattaaatgaccaacaagatactgaccaccctagaacaacaaaggccagtgattcctttctcactaatctgataaaaaggagcttcaaaattaataatggattgcgcaacagaagagcaagggtttatgtaaatggctttcctatctctgatcatgtggtccgaaaggctgagaagctagcaggatcaatctgccctggcaattattggtatgactaccatgctggcttctggggcgttatgggacatccctgccttggcatgataccgccttatattcctgagttcaatttccccatgcccaagaactgtgctggtggaaacaccagcatatttgttaatggaagagagcttcaccagaaggatttggatttacttgtcactagaggactctctgattcccctggtagatcttatgtagttgaaaattctggaaaggtttcagatgaagtatctggtgaagagctttatggccttggaaagcttgcaccaaccggtctattggtaggcgagaagtgggggagaacagatttatgcgctttgcatgtgatgacatgacacacgaggcacgatacacgacacatgaaactcgtgctttaaagaagtagagattaagagcccg

SEQ ID NO: 83072 - DNA, 2388 bp, Zea Mays
tttcatctctgagtgactgacatctgcaaggcagcaggagagagacttaaaatttcgcaaagaagaagaattcagcccaatcttcagatgatgctgacaatggaaatgtgaaataccttgaagtactggagtgtattccacaggcatctgcaagaaaacatggagctagtactactgataagtcagaaaccagtaagattgcagatgtacatagcaaaccagtttatggcaatcatgataggattcagacagggccaagtccctcaaatctgaacacttctattagagatgatggcaaggaggcaaagtaccgacacattcgttattgcgagaatggtgaaatggggcaatcattgagagtaagagacatgtccccgaagtctccaatcaatcacatttcagacaataatcggagtgagtaccacttgaagcagaggtacagctattctactaaggaatgccctggtgaaagaaacttggatggtccaagcaaagtcaggggacttgagaaagaccgcgctgagatcttgaggatgcttgatgagttgagagaccaggtacagcaatcttgcaatgcgactaatggggcaagtggaattgccccatctactgcagcagcagattccaacagttcacatggtacttctgaccggttgagtcaattgaggcaggttgcaccacaattgcatcagaatggttcacatcactccccatccttgaatgttggaagtcctagcgtttctcgtgtttatgctccgctgcctgcacaacaagattgtgtcagatatgcagagcctatttcacatgctcgagcctctagctatcctgccagcctctatccatggagaaattttgataattatttctttggacagcatgatcccgatcctcttctctcttgccgccatgatggcttctatcaccaagctgcctgttcttgcttgcactgttgccaccaagaattcttgcctatacagggaaatcacataggcttccatgatcaaagggcaccatatcttctgaacaattatggggcttatcctgtggacagtcccttacttggtcagcaaagatacagtgcaagagttaccaatactaccttgcagcagaatcacatgagggtcaacgttagcaagaaggctgcacagacttgtgagccagtcgcaggtggtgctccattcaccatatgctgcaattgctacgaagttctacagataccaaggaaacagtccctgtcagggaacgagtataaattgcgttgtggatcatgctcacatgcaattatagtcaagcttgatggaaacaggctcaatgtatcagaatttgcactatgtacacgtttatctgatggacaggaaaatgacatgggaaccgatgggcaaactcaagacaataggtccattccagcttaccatttatctgttggaagtcctgcatctcaagaacgagatctgcactcaaatttgagcgagtcagagaacaatcatacccctctaggaactgactcagagggcacttccctgtccagggatcttcctgctgaagacagtgcagtttcccatgtaccaaatttaccacatcacagtcattctggatcatctccaactgaacattttggagtgggaagtagaagtacccattctgaacctgaaaaagttatactattaactgaaagttccaagcagacctcagttagaggtatatgtgtaacaaacaagatgcaatctccaaacaatgagtttgatgttcctgaatacacagatgatacattaaatgaccaacaagatactgaccaccctagaacaacaaaggccagtgattcctttctcactaatctgataaaaaggagcttcaaaattaataatggattgcgcaacagaagagcaagggtttatgtaaatggctttcctatctctgatcatgtggtccgaaaggctgagaagctagcaggatcaatctgccctggcaattattggtatgactaccatgctggcttctggggcgttatgggacatccctgccttggcatgataccgccttatattcctgagttcaatttccccatgcccaagaactgtgctggtggaaacaccagcatatttgttaatggaagagagcttcaccagaaggatttggatttacttgtcactagaggactctctgattcccctggtagatcttatgtagttgaaaattctggaaaggtttcagatgaagtatctggtgaagagctttatggccttggaaagcttgcaccaaccggtctattggtaggcgagaagtgggggagaacagatttatgcgctttgcatgtgatgacatgacacacgaggcacgatacacgacacatgaaactcgtgctttaaagaagtagagattaagagcccg

SEQ ID NO: 83073 - DNA, 1810 bp, Zea Mays
ccgcttcggtcagggctgttgcgccctcaccaggggtataataagctaccaccgcgacccccatcgacgtccgtgcacacaacgaggtgagagcaagcgagaagagagagggtgagtgccgccattgccgacctttgcgctcgtcgcttggtccgccgccgccgtagatgcttgtctgcactgaagcttggcgaccgtgggtggcggtgtgagctcgcgggtgtgtgtgggtcgcttgcatgccctcctcctacgaatatgtgcaccagagccctcccaattcctcgtcgatgtacgggtgctgtcgcagatccgcattgcgccatggacaacgcggtcgacaccgtaatcctcgtcaccggtggggccaacactgcgggggatggtggcgccagcatgcccaatcggctaggaaggaagatgatgtgtgcgccgtccatctcttattgaacggtggagattagagcgttcagtggattgatctcgatcgtcggatcttgatccgatggcggtctctacggtgagagcgtaatataatccgtggcgtagaactcagatcctgcggcagcgtaggtgcaccagcgctgttactgtcgttagtgacgacgatggagtggtgaggctagccgcacacaactacggatctgtagatctccaccgacaacttctcgtcatacccatggcaagcatgagatattgacgtggctcaatcatcggttccctcactgtcggagcacctactacacgcctccgcgtcagacccacgcccactcaaacgaaaccgtttctgcattcctgtcgcgctttctcgtttgtccgattaaaaaaagttaaacctaacggctttgatggtagaaaatattgaattttttatattatagagatagatagatatgagaagacaagtgcacattatttgtgctattttttgaaaattaaaagcataaatacaatatcttcttatatgatttttattttacctcgatgacaaacatataggtataagataaataaaatacttattttgtatttgttgcagaggaagaccatatattcactatttatgctatttttgagaaaatttaaaacatatttataatatcttttgatatgatcatgcgcgaaaaattctaaaacagagctaaaacatgaaagatattaatatctaaatgaagaggtagagtttgcattcaacttgaaaagaagaaggcgaccgacccaagactcccgtaaccttgatgatttctatacggtatctaaacattaaaaatagtttatttaaaaatacatcatatgtctatgacatatgcatattgtcatgtaatatcgtcacaattattgtgttaagaaggttatgacgatttattcttatgacaattgctatattgtcatagaaaattatcaaaacatgatgctagattatattatgacagttttaatgacagatgttaattttttgtcactacactaaaccatattgtgaaaatcatcataaacaaggttatctaatgacaaattactctattgtcattgactatttgtcatagacgctcataagtgttgtagtgtataatcacaccatgtgaagagcaggcactactcgaggaggactactatgatgagttaaatgagatttaggtgtcgactctcattcaactatggcgtcgtggagatagttatcttagtttgatttaattaattattagttattttgtaagacattctcgtcatgtaataaagattatggcattcgtctctgtacactgagtcattatatgcgtggatttgattctggcgcacatatgagatg

SEQ ID NO: 83074 - DNA, 549 bp, Zea Mays
actccatctagagattgcagagaccgtcgtcccctgggccataaaattcgtgcgccatggccttctatcccattccttcgccgttcctcagtcgtcgatttccagagagagagaaaggatgtccttctgccaggaacttggcggctccgcctcgggctcacgactgcgtgctactcggtgaaattaaaggggctagggtgtgtcgtcgaggttcgttgtccacgagtgtggtttgcggtggtcggaaaagcacgaggttactggggatttctcgccggaggtcatttccgtcgcgacgtcgaggacagccttgcgcccaccgtctcctttggttggaagagatccaggtgacggaagccatactcgctttcggcctcctccagcagcgctgcgaagacgaggtgctcgaggtggcctattgactgctggtgtgcatcagcaccgtcaacctttcgtgcatcccccagttcgtgtaccggtactttggccgcggcagagtcgacatctgagatatatgaggccttggaattgaggaatggtggatctgat

SEQ ID NO: 83075 - DNA, 619 bp, Zea Mays
ctttcaacagaccacgtggatctcgcgtccgccaacaaactccatctagagattgcagagaccgtcgtcccctgggccataaaattcgtgcgccatggccttctatcccattccttcgccgttcctcagtcgtcgatttccagagagagagaaaggatgtccttctgccaggaacttggcggctccgcctcgggctcacgactgcgtgctactcggtgaaattaaaggggctagggtgtgtcgtcgaggttcgttgtccacgagtgtggtttgcggtggtcggaaaagcacgaggttactggggatttctcgccggaggtcatttccgtcgcgacgtcgaggacagccttgcgcccaccgtctcctttggtaccactggacaaggcgcatgaaggatgttgtgatgagttcgtgagtggtctaggctgtcgtctcccagtcaactatggttgttggttcgttgtctatatatgatgtaattatttagctattttttacataactcctattatatagtaaagatgtgacatttgtttctgtaccatgagtcatcatatgtgtgagacttggtcccagcacacttggtgactattacgcgcctgggttttggacccctaaa

SEQ ID NO: 83076 - DNA, 887 bp, Zea Mays
agagaccgtcgtcccctgggccataaaattcgtgcgccatggccttctatcccattccttcgccgttcctcagtcgtcgatttccagagagagagaaaggatgtccttctgccaggaacttggcggctccgcctcgggctcacgactgcgtgctactcggtgaaattaaaggggctagggtgtgtcgtcgaggttcgttgtccacgagtgtggtttgcggtggtcggaaaagcacgaggttactggggatttctcgccggaggtcatttccgtcgcgacgtcgaggacagccttgcgcccaccgtctcctttgcaatgaggttacgagtcacttgaagaccaaccttgtacctggaatctcaagtctaaggcaagttgtgcccttgatcacttttctttacccaataatgttcatgttaatcactgtgacatgctcaggttaatttgatgggacataattggtttccctagacttgtttattccacaccttgtttaccattgaacttttgggtagttttgctattgctctgcattatgatcattgttccagttatactgttgttttagttattgttcgtgacaagatcattgtgttaattggaacatggagcttaacttgagatatccgtgctaccacaagggtggaatgggacgtccttcgctgactaattaggaaagctagtggagtactaccttacccaaaaggggcaagggtagtagaggagttgtcgatatagggaggttctcgggtcgatcatgctgcgatggcttgtcggacggggaattcctatattgcgctccctagaactgtagcgggttttctgaaggtagtggaaatttttaaaggcctcgtagtgcatccctagtcattcacctcagaagtgtc

SEQ ID NO: 83077 - DNA, 223 bp, Zea Mays
acaaagtatactttacattccagaactcaagttttacatggtagaaagagatgtatttattacaagtctttatagtacttgaagtgcataacttattacaataattggaagggtgaagcctttccataagatatatacataaacattctaagcttcaagtcatccacatgaagtaactaacccaaagataagggaataaaacttctcctacaaaacaagggat

SEQ ID NO: 83078 - DNA, 937 bp, Zea Mays
caaatcttaagtgcatgaacaacagcagccaattcgagatcatgggttgggtaatgctcttcatgatgctttagctgccgagatgcataagcaatcactctgccttcttgcataagtacacacccaataccaatgcccgaagcatcacaataaacatcaaacgctttctcaatattaggctgcgtcaatactggtgttgtagtcattaacttctttagttcttcaaaagctttgttgcactcagatgaccacacaaatttgacatgattcttgagcaactcagtaataggtttagctatcctggagaaatctggaataaaacgacggtaataccctgccattccaaggaaacttcggacttggtgtactgtagtgggtggtttccattccaaaatgtccttgactttacttgggtcgactgcaacaccttcggcagacaagatatgacccaagaatggaattgtgtccaatcaaaattcacatttgctgaacttggcatatagttggtgttcccttagctgcgttaaaactacacgcaagtgctctgcatgttcttcttttgtcttggagtatatcaagatgtcatcaataattaccaccacaaacttgtcaagttcaggcatgaacactgagttcatcaagtacaagaaatgagctggagcattggtcaaaccaaaagacatcaccaaatattcatagagaccatatcgagtagtgaaagcagtcttaggaatatcttcaggtcgaattcttatctggtgataacctgatctaagatcaatcttagagaacactttagctccagaaagttgatcaaacaaccaatcaataggaggtagaggatatttgttcttaatggtcacctcgttaagtggtcggtaaacaacacataaccggagtgtttgatccttctttttcacaaaaaaagcaggacaac

SEQ ID NO: 83079 - DNA, 1931 bp, Zea Mays
attttcctaatctagatcattcacttgacctacactaggttgcttttaaaatccaaattttattttgcttgttatctacgatgaagggcagcaatccagtcttcatatccgaaaagtaacgacgatccgaatcgattaatacccaactggggatctctaaccacacgacatatgtagtacttaacccttgcatatatcaaccattcccatggatcctccactacatgaactggtccgcgctacccgggagcacattaccctaccatccagcctcttgccaggaggataactgctactcccaccatctcccacgcccagtgcgcggttgttatttcacgtatggaatagccgggttcaggcttaaccatgacgaggtatgtggtcagctaaaaggtcctagatcaacaggcctacaatcggtacggtccttaatcgacacagacgaagaccctacaaccagactctgttctggtgcaagtcaaccgcccggcctcaagtttacttatgctatttctcaaaacatttggcacctgacagaggggtcatgcctggataatgaatttatcactgcagatgatgcattcattatcccaagcaaattttcttttggaaattatgagtcatagatcaaaaacattttttaatctatccgcatgattaagcatctctagcttttataaaacaggtgataagttatgataatcaattctttcaaggaatggtaatgcatcaggtgtttaatcaattaacttctatcacctaatgcatcatataagtgataaaatttttataaatacaaggaaggtggtaaatgcatggggcttgccttattgcagaagaagatcctgaaacccttctactctggtaagtagttagataaaactccaccattaggtattcagataccggagcaaatttctcttcgatgtacacttctttacggagcttggagatggcagtggcttcaagtggggggatgttggtgctgctgcagcttgaggaggggaggcgtgagggacaggcgtgcgaagtcgcagcgaggacggcgcgtgctggtggagctcacagcagcgcgcgacggcacggtggcgcaggatgcctaggcaagaccgagcgggcgcgggcgccacggcggggtgaagatggcacaagaccaggcgcggctaggaaccaaagcctagacgcgagagggaggtgacggcacaggacgctgctccgcaggaaagcgatgccgagagggctggagctgctccagcgaactgctgctacatcttcgagtgtcggtggagaagagaggggaaagcgccgagcgttgatgggcaaggtgacaccgccacgacgattgcgaagctagcagcaagacgacagtagttcctggtgaggacaaggaagaacgagacaactctaacgcccaagatctgaagacaagaccgctagcttatgcaatagggagggcgacgtgggagggacaagctagtgaaaagtctgcgcgctcgaccggaggagatgagaccgagactagtcggcagcaaagctgactagtcgaggcagtcaggcggcggatggtggctgggcacgacggccagtccacgcagcccgcgtgtctgcacacgcgttgagcccaagcgcataaaggataaggaaaaggagtggtggtgggaggataagagaaagtttttttttaacatacaacgagtcgagctccttaaagcaaagtcgatcactgttatacccctccaactttacttaaacgatcagacaaggaatagagagacagaaggctccaaaagttggaccaaaaatcacagaaatccagtttactaagactgcgttcagcgcatcctatctgacggagcaactttgagattaatttactcacaagttttagtggtaaaagggagatctccgttaaccaaacttgttgacaaaat

SEQ ID NO: 83080 - DNA, 301 bp, Zea Mays
ctggaactcatcatcccaaggatctcccacataacaggtatattacagtaatcacatttgatacacacacattggagatagagcggaagacatttacaaagtatactttacattccagaactcaagttttaaatggtagaaagagatgtatttattacaagtcctgatagtactcgaagtgcataacttattacaataattggaagggtgaagcctttccataagatatatacataaacattctaagcttcaagtcatccacatgaagtaactaacccaaagataagggaataaaacttct

SEQ ID NO: 83081 - DNA, 969 bp, Zea Mays
atggcatacatcgcgttcgtgttgcctactcagatcagaggcgggcctcgagcgaaccagctgagattgcaagaagtagagcagcggccgccgccaagggccatggtgaagccgggaaagagaacgagcagggggcgccagaaaattgagatccgccgcatcgacaacaaggagagccgccaagtcacccagtgcaagcgcaagggcgggctcctaaagaaggcctcggagctccatctcctctgtggtgcccaagtcgccatcatcgtcttcaagagaagggaccccgaaagaaaggaggtgcccgttccgccccgcggccaacgcgacgacggcggccttgccttcgcgatgggcaccccctccgtcgaccacgtcctccaccgctgtggcctgctccacgccgacgagggcctcaccgcgatccaggatgtgggcgccatcgccgcagagcgtgccgttatggaggcgagagcggggcagaccgagcagaccagggcgctcgtggaggcggagaaggcgcggaatgacgccatcgggcagaaggtgctgcaggccgtggaggtgaccgggaggcggttctggtgggaagtggacgtcggggtgctcggcgaggccgagcttccggtctttacttcgcagctccagcgcctcagggacagcgtgcggctccaagccaacaaatcgcggacctctgctaccccggccggggtggcggcgccgtggcttccgctgggatagtctgctggtcaatgtcttgatccaaggtctattaggagcaccttgaaagacgaggaaggagtcagaaatttgcaatgaagcgccgattgaaagctgttatctacaagtttgagcccactcatgtttttaggggtcatcgggggaggggctcctcaataggtgcgagaccagggatgggtatgccaagtttggtgtcatgaactgaatgttgagcttgcattatggtag

SEQ ID NO: 83082 - DNA, 1050 bp, Zea Mays
atggcatacatcgcgttcgtgttgcctactcagatcagaggcgggcctcgagcgaaccagctgagattgcaagaagtagagcagcggccgccgccaagggccatggtgaagccgggaaagagaacgagcagggggcgccagaaaattgagatccgccgcatcgacaacaaggagagccgccaagtcacccagtgcaagcgcaagggcgggctcctaaagaaggcctcggagctccatctcctctgtggtgcccaagtcgccatcatcgtcttcaagagaagggaccccgaaagaaaggaggtgcccgttccgccccgcggccaacgcgacgacggcggccttgccttcgcgatgggcaccccctccgtcgaccacgtcctccaccgctgtggcctgctccacgccgacgagggcctcaccgcgatccaggatgtgggcgccatcgccgcagagcgtgccgttatggaggcgagagcggggcagaccgagcagaccagggcgctcgtggaggcggagaaggcgcggaatgacgccatcgggcagaaggtgctgcaggccgtggaggtgaccgggaggcggttctggtgggaagtggacgtcggggtgctcggcgaggccgagcttccggtctttacttcgcagctccagcgcctcagggacagcgtgcggctccaagccaacaaatcgcggacctctgctaccccggccggggtggcggcgccgtggcttccgctgggataggtctattaggagcaccttgaaagacgaggaaggagtcaggtagcacttgctcttgctgaaatgtgatgaatggtaacttgaagccatgtcttgtgataatatgtaatcctggtgtacatgtcttttccttcctttgatgtatacagaaatttgcaatgaagcgccgattgaaagctgttatctacaagtttgagcccactcatgtttttaggggtcatcgggggaggggctcctcaataggtgcgagaccagggatgggtatgccaagtttggtgtcatgaactgaatgttgagcttgcattatggtag

SEQ ID NO: 83083 - DNA, 1047 bp, Zea Mays
attgcttgcgccctcctccgcacgttcaccccatcctccctaggaagctagaaccactcaccccatgatactcgcacgggaggcgggtcaccctctccgacgttgtgcgaccacaccaacactcgggtcacggtgggggttgcagaatctttgtcgggccgcgtggctcgtgccagggtcctcgccgggccgagcttgtagttgctgcgccccaaatttactcaccggaagcggggttcgtcgtggagtcgcccggtgacgcggactggtgccccggccttgccctaaccctgcagtacacgagaatctgaggatcatcctggtacctggaatctcaagtcccaggcaagttgtgcccttgatcacatttattacccaataatgttatttaatatcacttattcatgcataggtttaattttgatgggacccaataggtcaccctagtctgattatcttttaccttgtttacccctgaatcacttgggtagttttgttattgctttatatggttttgggttaatatttcattatatccatgttccaattattttgttattttatttatgttcatataaagatcattatattatgttaattggaacatggagcttaacttgagaaacacgtgccaccataagggtggaatgagatgcccttggctgactaattaggacagctagtggaagacaatcttacccgaaaagggcaagggcagtaggggagttgcatgcagggaggttctcaggttgattttgctgtgatggcggtcagatgagggattcttgcaagtgctgttcccatatactgtagcgtgttttccgaagctagtggaactttgtaaaggcctcgtagtgttaccctgcctcgcttccttggtagaggtgtatgggattcatgaccccttggcagatgggtaacacgacttgtgggtacagggtacaacctctgcagagtgtaaaactggtatactagccgagctcacggtcaagagcagctcaggactctcgcatgattaaattatggaactaaatttcatttgtcatt

SEQ ID NO: 83084 - DNA, 1098 bp, Zea Mays
ctcgcccaacaaattcggcacgttcgttgcacctcgaccacattgcgcagataaattgcttgcgccctcctccgcacgttcaccccatcctccctaggaagctagaaccactcaccccatgatactcgcacgggaggcgggtcaccctctccgacgttgtgcgaccacaccaacactcgggtcacggtgggggttgcagaatctttgtcgggccgcgtggctcgtgccagggtcctcgccgggccgagcttgtagttgctgcgccccaaatttactcaccggaagcggggttcgtcgtggagtcgcccggtgacgcggactggtgccccggccttgccctaaccctgtacacgagaatctgaggatcatcctggtacctggaatctcaagtcccaggcaagttgtgcccttgatcacatttattacccaataatgttatttaatatcacttattcatgcataggtttaattttgatgggacccaataggtcaccctagtctgattatcttttaccttgtttacccctgaatcacttgggtagttttgttattgctttatatggttttgggttaatatttcattatatccatgttccaattattttgttattttatttatgttcatataaagatcattatattatgttaattggaacatggagcttaacttgagaaacacgtgccaccataagggtggaatgagatgcccttggctgactaattaggacagctagtggaagacaatcttacccgaaaagggcaagggcagtaggggagttgcatgcagggaggttctcaggttgattttgctgtgatggcggtcagatgagggattcttgcaagtgctgttcccatatactgtagcgtgttttccgaagctagtggaactttgtaaaggcctcgtagtgttaccctgcctcgcttccttggtagaggtgtatgggattcatgaccccttggcagatgggtaacacgacttgtgggtacagggtacaacctctgcagagtgtaaaactggtatactagccgagctcacggtcaagagcagctcaggactctcgcatgattaaattatggaactaaatttcatttgtcatt

SEQ ID NO: 83085 - DNA, 4937 bp, Zea Mays
gcgcagatgagatcttcccctccggtatagactaggcctcgccggatgccggatcaccctaccccaccccaccaatgcgatgaagtgccactctgtggccgcgctctggtcgccgttgccgccgtcacaccacgtcaccgccgctgccacaaccccggtcgcgctcttcaccggcgccgccgacggcaccgtcctccactggccactggcgctcgcctcagcttccccatctccgcgcccgtcttccctcctctgcgcccacgctgctgccatcacctccctctgcccactcccctcaccggcctcccttcttgtcgcctgcaccgcgggagtgctctccctcttctccacctacgcacccctccgctgcctccgccgccgctccctcccgctctgggtcggctcaccctccctcatcgcctcgctcccgtccatcacctccgccgaccctcgagtcgcgatcctctgccacgctcccgacgacggccaccgtcacgtttcagcactcgtagtcgtcgacgcacgcaccctcgccgtcctctacaccgtcttccatgggattctctcggtcgggactccgaatgcgatcgcggttagtggcggcggtgatgatgcagtcagcgttgtgttggctgacgcgcagggtcgggtgcaggtgatgcccgttgccgagggcgcggctgtcgaagtggacccacccaggcgtctcatcgtgagctcggtggccagcgtcgcgtcggcggagttggcggacgagagggtggaagccgtggcgttgtctcatgatgggaagaacgtggcgttggtgctgaagactagatgtttgttgaaatgtgtcactgagggggttgtgctcggtgaggtatctctgctgggtacttctctttgcaaggacaaaaacacagtagacaaggtatgcactgctggagcttttttcctcagcagtgatgaatgggatgctcatgtttcagacgatggcgttgtggttaggaatttggtgttgtggagtaacaatggtgctgtcacaatgtacaggattgctcttggtagctcatactttgactctgagatagtgtgtgaaattcctagcaacttatctatgcaaggagagggactagaagttaaattttgctggtcaaatcagcatcttgttagggtggaatgttgctcctataaggtagctgggtcattgttgtggaaaccaacagtcgccatttggtgtatggatcagttcgaactgagtaaaacagtgaatacacaaaaaccacctatgaggaaaatgcttggagaaggtggtcttcagggagaagaatttagaccagagccttctcattctcaatacaatatcaaccgagggtcggaagtgatttcacagatgtgctcattagaaaggtatagagggacagtgtcttcgtcaatgttactttctgaggattcttatgctccatatgctgtagtttatggtttccataatggtgacatagaagttatccgatttctgaacttgtcacctgctgctgcaaaatttggtggtcgagggctttacccacatatttccgagaggttatttttggggcacaagggagcaattctttgtttggctgcacattacatgcatgcacaccctgactctagaaacttccaccgagcactcatatcagggagtttagattgtacagttcgtgtctgggatctagatgctggcactcttctttctgtgatgcatcatcatgttggctcagttaagcaaatcgtactaccacctccatggacataccacccttgggatgactgcttcctttctgttggagaagatggccttgtggcgcttgtttcacttcaaaccatgcgggttgagaggatgtttcctggccatccggattatgcatcattggtagcttgggatggagtaaaagggtacatagcttgtttatgcaagaatctccactcttgcaatgatgcaggtagtggattatatatttgggatctgaaaacgggtgctcgagaacgtgttatcaatggcactgcttctcagttagcgtttgagcacttctgcaggggtatatcgaaaaacacagttactggtagcatcttaggaggaacaacttcagcgtcttccttacttgttccaatttttgaagacatgagccacattcggtctcatgcagataaaaatggtcatgacatttcatccgtgtcaaccaaccttcacaatggatgtacagattctgtgactgtaaatgcccctacaacatatgattttaagggaaagacgccagctccagatgaagctcatgaattccatggagataattctgtatacaattcaggaaaggctgtttcttcccacagtatccataataaaaaaataaagtgccctataaagtgctcttgcccctatcctggcattgcaagtctgaggtttgacctcacggcaatcatgtccacacaaggcatgacaaacagcaatagtgataggcatttgaaagatcatctccatagtgagaatcctaaagaaatgttgcagcctggaactttagacagtccttctcgtgttcatgaaatggatagcccctctagagagtcattggaagggtgtttacttcgatttagcctctgttttttgcatttatgggatgttgattgcgagctagacaaattacttgtagatgagatgcaagtttgcaagccagaaggctgccatatagcaactggggtggtaggagacaaaggctcatttacattgatgttcccaggcaaagaagccactcttgagctttggaagtcttcagccgaattttgtgccatgaggtcactgtctataatatctcttgctcaactcatgattaaattatctcgttcttgtacaaattctagcagtgctttggcagcattttatacaaggcattttgctgaaaaggttccagatataaagcctccatccctacagcttttggtgagcttttggcaacacccttcggaacatgtgcgaatggctgcacgttccttgttccactgtgcagctccccgttctattccacaaccactacgagtaaacaaaaataaagtggtcaatgcccccttgtcttcatcagataatatgaatgttcttatatgtgctgtgcagactgcctctgtatccaatcatggagagttgaaggaagatgatgaaaatgttgataaagatgatattgacactgctaatatgatcttatggttggaatcatttgaaaatcaggagtggttatcatggataggaggcacaagccaggatgcagtggcgtcaaatatcatagttgcagctgctttggtcgtttggtatccaagtgtcgtgaaagctaaactttcaagtttagttgttagtcaactaatcaagttagttatgtcgatgaatgatcgatatagttcaactgcagctgaacttctagcagagggaatggaaaacacttggaaggcatgcttgggtgctgagatcactcattttatgagtgatatccttttccaaattgagtgcctaagcactgcaccttctagcaatgctatcaataaaactgcagtggccattacaatgcgagaagcattggttggcacccttttaccaagcttggctatggctgatgtaacaggattttttggtgtaatagagagccaaatttgggctacttcgtctgattcacctgttcatgtcgcttcaatcaaaaccattatccgtgtagttcgaggtgcgccgaagtccttggtcccatacctcgacaaggcaatcaactacattctacacactatggatccaagcaatctaataatgcgaaaagcttgtattatcagttcaatgatggctctaagagaaatggcacgtgtatttccgatggttgctctcaatgagtcaatgacaaagctagctgttggtgatgctattggagagatttatgatggtacaattcgagtctatgacatagaaagtgtcacaaagataagaattcttgatgcaagtggaccaccaggccttccaagcttacttgcaggatcatcgaatagaacaacaaccatactgatatcagttctgagtttctcaccggatggagagggtctggttgccttctctgagaacggattgatgataagatggtggtccttaggtagtgcctggtgggagaggctgagcagaagccttactcctattcaatgcacaaagcttatctatgttcctccatgggaaggattttcacctaactctgctcgcttgagtataatttctagcattttagatgataaacctggaaggtcagagaaggaactaggcgaggcggataatctgaagttattgcttcataatcttgacctttcataccgtcttcactggattggtggaaagactatcaaacttacgaggcatggccaggatttgggtacatttcagttgtgatgggcttacccatgaatattgagttgctttgtagtgttgaaagacagctaattcgatggctggcaagtctaacaagaatcaccagtacattcatatgtcatgtgagttacagaactgcattcacatgcagcgcccaggatggggctcatctgtcacacctttgagctacagagttcaggatgcttttagtttagttgtggttcgcttgatatcatcacaatcatatacatattttgtggatgattggctatacttcatactttggagtttttgcacttgttctgaggttcatccttcaacttcaacactcctcaagtgcagtctaagtgttacctcaatcagtatttttgccaagcatatttggtttagttctcagatttttaatctgttagtttcataaactttgtaatcaagaacatttagtttctataatgttgggatggagtcctctgcgaagagtccaaacactagagatgatgattacaatacagaccaatagttcaaaatgtcccat

SEQ ID NO: 83086 - DNA, 4444 bp, Zea Mays
atgaagtgccactctgtggccgcgctctggtcgccgttgccgccgtcacaccacgtcaccgccgctgccacaaccccggtcgcgctcttcaccggcgccgccgacggcaccgtcctccactggccactggcgctcgcctcagcttccccatctccgcgcccgtcttccctcctctgcgcccacgctgctgccatcacctccctctgcccactcccctcaccggcctcccttcttgtcgcctgcaccgcgggagtgctctccctcttctccacctacgcacccctccgctgcctccgccgccgctccctcccgctctgggtcggctcaccctccctcatcgcctcgctcccgtccatcacctccgccgaccctcgagtcgcgatcctctgccacgctcccgacgacggccaccgtcacgtttcagcactcgtagtcgtcgacgcacgcaccctcgccgtcctctacaccgtcttccatgggattctctcggtcgggactccgaatgcgatcgcggttagtggcggcggtgatgatgcagtcagcgttgtgttggctgacgcgcagggtcgggtgcaggtgatgcccgttgccgagggcgcggctgtcgaagtggacccacccaggcgtctcatcgtgagctcggtggccagcgtcgcgtcggcggagttggcggacgagagggtggaagccgtggcgttgtctcatgatgggaagaacgtggcgttggtgctgaagactagatgtttgttgaaatgtgtcactgagggggttgtgctcggtgaggtatctctgctgggtacttctctttgcaaggacaaaaacacagtagacaaggtatgcactgctggagcttttttcctcagcagtgatgaatgggatgctcatgtttcagacgatggcgttgtggttaggaatttggtgttgtggagtaacaatggtgctgtcacaatgtacaggattgctcttggtagctcatactttgactctgagatagtgtgtgaaattcctagcaacttatctatgcaaggagagggactagaagttaaattttgctggtcaaatcagcatcttgttagggtggaatgttgctcctataaggtagctgggtcattgttgtggaaaccaacagtcgccatttggtgtatggatcagttcgaactgagtaaaacagtgaatacacaaaaaccacctatgaggaaaatgcttggagaaggtggtcttcagggagaagaatttagaccagagccttctcattctcaatacaatatcaaccgagggtcggaagtgatttcacagatgtgctcattagaaaggtatagagggacagtgtcttcgtcaatgttactttctgaggattcttatgctccatatgctgtagtttatggtttccataatggtgacatagaagttatccgatttctgaacttgtcacctgctgctgcaaaatttggtggtcgagggctttacccacatatttccgagaggttatttttggggcacaagggagcaattctttgtttggctgcacattacatgcatgcacaccctgactctagaaacttccaccgagcactcatatcagggagtttagattgtacagttcgtgtctgggatctagatgctggcactcttctttctgtgatgcatcatcatgttggctcagttaagcaaatcgtactaccacctccatggacataccacccttgggatgactgcttcctttctgttggagaagatggccttgtggcgcttgtttcacttcaaaccatgcgggttgagaggatgtttcctggccatccggattatgcatcattggtagcttgggatggagtaaaagggtacatagcttgtttatgcaagaatctccactcttgcaatgatgcaggtagtggattatatatttgggatctgaaaacgggtgctcgagaacgtgttatcaatggcactgcttctcagttagcgtttgagcacttctgcaggggtatatcgaaaaacacagttactggtagcatcttaggaggaacaacttcagcgtcttccttacttgttccaatttttgaagacatgagccacattcggtctcatgcagataaaaatggtcatgacatttcatccgtgtcaaccaaccttcacaatggatgtacagattctgtgactgtaaatgcccctacaacatatgattttaagggaaagacgccagctccagatgaagctcatgaattccatggagataattctgtatacaattcaggaaaggctgtttcttcccacagtatccataataaaaaaataaagtgccctataaagtgctcttgcccctatcctggcattgcaagtctgaggtttgacctcacggcaatcatgtccacacaaggcatgacaaacagcaatagtgataggcatttgaaagatcatctccatagtgagaatcctaaagaaatgttgcagcctggaactttagacagtccttctcgtgttcatgaaatggatagcccctctagagagtcattggaagggtgtttacttcgatttagcctctgttttttgcatttatgggatgttgattgcgagctagacaaattacttgtagatgagatgcaagtttgcaagccagaaggctgccatatagcaactggggtggtaggagacaaaggctcatttacattgatgttcccaggcaaagaagccactcttgagctttggaagtcttcagccgaattttgtgccatgaggtcactgtctataatatctcttgctcaactcatgattaaattatctcgttcttgtacaaattctagcagtgctttggcagcattttatacaaggcattttgctgaaaaggttccagatataaagcctccatccctacagcttttggtgagcttttggcaacacccttcggaacatgtgcgaatggctgcacgttccttgttccactgtgcagctccccgttctattccacaaccactacgagtaaacaaaaataaagtggtcaatgcccccttgtcttcatcagataatatgaatgttcttatatgtgctgtgcagactgcctctgtatccaatcatggagagttgaaggaagatgatgaaaatgttgataaagatgatattgacactgctaatatgatcttatggttggaatcatttgaaaatcaggagtggttatcatggataggaggcacaagccaggatgcagtggcgtcaaatatcatagttgcagctgctttggtcgtttggtatccaagtgtcgtgaaagctaaactttcaagtttagttgttagtcaactaatcaagttagttatgtcgatgaatgatcgatatagttcaactgcagctgaacttctagcagagggaatggaaaacacttggaaggcatgcttgggtgctgagatcactcattttatgagtgatatccttttccaaattgagtgcctaagcactgcaccttctagcaatgctatcaataaaactgcagtggccattacaatgcgagaagcattggttggcacccttttaccaagcttggctatggctgatgtaacaggattttttggtgtaatagagagccaaatttgggctacttcgtctgattcacctgttcatgtcgcttcaatcaaaaccattatccgtgtagttcgaggtgcgccgaagtccttggtcccatacctcgacaaggcaatcaactacattctacacactatggatccaagcaatctaataatgcgaaaagcttgtattatcagttcaatgatggctctaagagaaatggcacgtgtatttccgatggttgctctcaatgagtcaatgacaaagctagctgttggtgatgctattggagagatttatgatggtacaattcgagtctatgacatagaaagggtctggttgccttctctgagaacggattgatgataagatggtggtccttaggtagtgcctggtgggagaggctgagcagaagccttactcctattcaatgcacaaagcttatctatgttcctccatgggaaggattttcacctaactctgctcgcttgagtataatttctagcattttagatgataaacctggaaggtcagagaaggaactaggcgaggcggataatctgaagttattgcttcataatcttgacctttcataccgtcttcactggattggtggaaagactatcaaacttacgaggcatggccaggatttgggtacatttcagttgtgatgggcttacccatgaatattgagttgctttgtagtgttgaaagacagctaattcgatggctggcaagtctaacaagaatcaccagtacattcatatgtcatgtgaggtaccttgatgtttctttgactgttaaaagcattgtctggtacagttcataaattggatccctatgtatggtaaataaaaaaactgaatgcaatttgattccatgttacaagactgct

SEQ ID NO: 83087 - DNA, 4579 bp, Zea Mays
ccccaccccaccaatgcgatgaagtgccactctgtggccgcgctctggtcgccgttgccgccgtcacaccacgtcaccgccgctgccacaaccccggtcgcgctcttcaccggcgccgccgacggcaccgtcctccactggccactggcgctcgcctcagcttccccatctccgcgcccgtcttccctcctctgcgcccacgctgctgccatcacctccctctgcccactcccctcaccggcctcccttcttgtcgcctgcaccgcgggagtgctctccctcttctccacctacgcacccctccgctgcctccgccgccgctccctcccgctctgggtcggctcaccctccctcatcgcctcgctcccgtccatcacctccgccgaccctcgagtcgcgatcctctgccacgctcccgacgacggccaccgtcacgtttcagcactcgtagtcgtcgacgcacgcaccctcgccgtcctctacaccgtcttccatgggattctctcggtcgggactccgaatgcgatcgcggttagtggcggcggtgatgatgcagtcagcgttgtgttggctgacgcgcagggtcgggtgcaggtgatgcccgttgccgagggcgcggctgtcgaagtggacccacccaggcgtctcatcgtgagctcggtggccagcgtcgcgtcggcggagttggcggacgagagggtggaagccgtggcgttgtctcatgatgggaagaacgtggcgttggtgctgaagactagatgtttgttgaaatgtgtcactgagggggttgtgctcggtgaggtatctctgctgggtacttctctttgcaaggacaaaaacacagtagacaaggtatgcactgctggagcttttttcctcagcagtgatgaatgggatgctcatgtttcagacgatggcgttgtggttaggaatttggtgttgtggagtaacaatggtgctgtcacaatgtacaggattgctcttggtagctcatactttgactctgagatagtgtgtgaaattcctagcaacttatctatgcaaggagagggactagaagttaaattttgctggtcaaatcagcatcttgttagggtggaatgttgctcctataaggtagctgggtcattgttgtggaaaccaacagtcgccatttggtgtatggatcagttcgaactgagtaaaacagtgaatacacaaaaaccacctatgaggaaaatgcttggagaaggtggtcttcagggagaagaatttagaccagagccttctcattctcaatacaatatcaaccgagggtcggaagtgatttcacagatgtgctcattagaaaggtatagagggacagtgtcttcgtcaatgttactttctgaggattcttatgctccatatgctgtagtttatggtttccataatggtgacatagaagttatccgatttctgaacttgtcacctgctgctgcaaaatttggtggtcgagggctttacccacatatttccgagaggttatttttggggcacaagggagcaattctttgtttggctgcacattacatgcatgcacaccctgactctagaaacttccaccgagcactcatatcagggagtttagattgtacagttcgtgtctgggatctagatgctggcactcttctttctgtgatgcatcatcatgttggctcagttaagcaaatcgtactaccacctccatggacataccacccttgggatgactgcttcctttctgttggagaagatggccttgtggcgcttgtttcacttcaaaccatgcgggttgagaggatgtttcctggccatccggattatgcatcattggtagcttgggatggagtaaaagggtacatagcttgtttatgcaagaatctccactcttgcaatgatgcaggtagtggattatatatttgggatctgaaaacgggtgctcgagaacgtgttatcaatggcactgcttctcagttagcgtttgagcacttctgcaggggtatatcgaaaaacacagttactggtagcatcttaggaggaacaacttcagcgtcttccttacttgttccaatttttgaagacatgagccacattcggtctcatgcagataaaaatggtcatgacatttcatccgtgtcaaccaaccttcacaatggatgtacagattctgtgactgtaaatgcccctacaacatatgattttaagggaaagacgccagctccagatgaagctcatgaattccatggagataattctgtatacaattcaggaaaggctgtttcttcccacagtatccataataaaaaaataaagtgccctataaagtgctcttgcccctatcctggcattgcaagtctgaggtttgacctcacggcaatcatgtccacacaaggcatgacaaacagcaatagtgataggcatttgaaagatcatctccatagtgagaatcctaaagaaatgttgcagcctggaactttagacagtccttctcgtgttcatgaaatggatagcccctctagagagtcattggaagggtgtttacttcgatttagcctctgttttttgcatttatgggatgttgattgcgagctagacaaattacttgtagatgagatgcaagtttgcaagccagaaggctgccatatagcaactggggtggtaggagacaaaggctcatttacattgatgttcccaggcaaagaagccactcttgagctttggaagtcttcagccgaattttgtgccatgaggtcactgtctataatatctcttgctcaactcatgattaaattatctcgttcttgtacaaattctagcagtgctttggcagcattttatacaaggcattttgctgaaaaggttccagatataaagcctccatccctacagcttttggtgagcttttggcaacacccttcggaacatgtgcgaatggctgcacgttccttgttccactgtgcagctccccgttctattccacaaccactacgagtaaacaaaaataaagtggtcaatgcccccttgtcttcatcagataatatgaatgttcttatatgtgctgtgcagactgcctctgtatccaatcatggagagttgaaggaagatgatgaaaatgttgataaagatgatattgacactgctaatatgatcttatggttggaatcatttgaaaatcaggagtggttatcatggataggaggcacaagccaggatgcagtggcgtcaaatatcatagttgcagctgctttggtcgtttggtatccaagtgtcgtgaaagctaaactttcaagtttagttgttagtcaactaatcaagttagttatgtcgatgaatgatcgatatagttcaactgcagctgaacttctagcagagggaatggaaaacacttggaaggcatgcttgggtgctgagatcactcattttatgagtgatatccttttccaaattgagtgcctaagcactgcaccttctagcaatgctatcaataaaactgcagtggccattacaatgcgagaagcattggttggcacccttttaccaagcttggctatggctgatgtaacaggattttttggtgtaatagagagccaaatttgggctacttcgtctgattcacctgttcatgtcgcttcaatcaaaaccattatccgtgtagttcgaggtgcgccgaagtccttggtcccatacctcgacaaggcaatcaactacattctacacactatggatccaagcaatctaataatgcgaaaagcttgtattatcagttcaatgatggctctaagagaaatggcacgtgtatttccgatggttgctctcaatgagtcaatgacaaagctagctgttggtgatgctattggagagatttatgatggtacaattcgagtctatgacatagaaagtgtcacaaagataagaattcttgatgcaagtggaccaccaggccttccaagcttacttgcaggatcatcgaatagaacaacaaccatactgatatcagttctgagtttctcaccggatggagagggtctggttgccttctctgagaacggattgatgataagatggtggtccttaggtagtgcctggtgggagaggctgagcagaagccttactcctattcaatgcacaaagcttatctatgttcctccatgggaaggattttcacctaactctgctcgcttgagtataatttctagcattttagatgataaacctggaagaaggaactaggcgaggcggataatctgaagttattgcttcataatcttgacctttcataccgtcttcactggattggtggaaagactatcaaacttacgaggcatggccaggatttgggtacatttcagttgtgatgggcttacccatgaatattgagttgctttgtagtgttgaaagacagctaattcgatggctggcaagtctaacaagaatcaccagtacattcatatgtcatgtgaggtaccttgatgtttctttgactgttaaaagcattgtctggtacagttcataaattggatccctatgtatggtaaataaaaaaactgaatgcaatttgattccatgttacaagactgct

SEQ ID NO: 83088 - DNA, 4312 bp, Zea Mays
atgaagtgccactctgtggccgcgctctggtcgccgttgccgccgtcacaccacgtcaccgccgctgccacaaccccggtcgcgctcttcaccggcgccgccgacggcaccgtcctccactggccactggcgctcgcctcagcttccccatctccgcgcccgtcttccctcctctgcgcccacgctgctgccatcacctccctctgcccactcccctcaccggcctcccttcttgtcgcctgcaccgcgggagtgctctccctcttctccacctacgcacccctccgctgcctccgccgccgctccctcccgctctgggtcggctcaccctccctcatcgcctcgctcccgtccatcacctccgccgaccctcgagtcgcgatcctctgccacgctcccgacgacggccaccgtcacgtttcagcactcgtagtcgtcgacgcacgcaccctcgccgtcctctacaccgtcttccatgggattctctcggtcgggactccgaatgcgatcgcggttagtggcggcggtgatgatgcagtcagcgttgtgttggctgacgcgcagggtcgggtgcaggtgatgcccgttgccgagggcgcggctgtcgaagtggacccacccaggcgtctcatcgtgagctcggtggccagcgtcgcgtcggcggagttggcggacgagagggtggaagccgtggcgttgtctcatgatgggaagaacgtggcgttggtgctgaagactagatgtttgttgaaatgtgtcactgagggggttgtgctcggtgaggtatctctgctgggtacttctctttgcaaggacaaaaacacagtagacaaggtatgcactgctggagcttttttcctcagcagtgatgaatgggatgctcatgtttcagacgatggcgttgtggttaggaatttggtgttgtggagtaacaatggtgctgtcacaatgtacaggattgctcttggtagctcatactttgactctgagatagtgtgtgaaattcctagcaacttatctatgcaaggagagggactagaagttaaattttgctggtcaaatcagcatcttgttagggtggaatgttgctcctataaggtagctgggtcattgttgtggaaaccaacagtcgccatttggtgtatggatcagttcgaactgagtaaaacagtgaatacacaaaaaccacctatgaggaaaatgcttggagaaggtggtcttcagggagaagaatttagaccagagccttctcattctcaatacaatatcaaccgagggtcggaagtgatttcacagatgtgctcattagaaaggtatagagggacagtgtcttcgtcaatgttactttctgaggattcttatgctccatatgctgtagtttatggtttccataatggtgacatagaagttatccgatttctgaacttgtcacctgctgctgcaaaatttggtggtcgagggctttacccacatatttccgagaggttatttttggggcacaagggagcaattctttgtttggctgcacattacatgcatgcacaccctgactctagaaacttccaccgagcactcatatcagggagtttagattgtacagttcgtgtctgggatctagatgctggcactcttctttctgtgatgcatcatcatgttggctcagttaagcaaatcgtactaccacctccatggacataccacccttgggatgactgcttcctttctgttggagaagatggccttgtggcgcttgtttcacttcaaaccatgcgggttgagaggatgtttcctggccatccggattatgcatcattggtagcttgggatggagtaaaagggtacatagcttgtttatgcaagaatctccactcttgcaatgatgcaggtagtggattatatatttgggatctgaaaacgggtgctcgagaacgtgttatcaatggcactgcttctcagttagcgtttgagcacttctgcaggggtatatcgaaaaacacagttactggtagcatcttaggaggaacaacttcagcgtcttccttacttgttccaatttttgaagacatgagccacattcggtctcatgcagataaaaatggtcatgacatttcatccgtgtcaaccaaccttcacaatggatgtacagattctgtgactgtaaatgcccctacaacatatgattttaagggaaagacgccagctccagatgaagctcatgaattccatggagataattctgtatacaattcaggaaaggctgtttcttcccacagtatccataataaaaaaataaagtgccctataaagtgctcttgcccctatcctggcattgcaagtctgaggtttgacctcacggcaatcatgtccacacaaggcatgacaaacagcaatagtgataggcatttgaaagatcatctccatagtgagaatcctaaagaaatgttgcagcctggaactttagacagtccttctcgtgttcatgaaatggatagcccctctagagagtcattggaagggtgtttacttcgatttagcctctgttttttgcatttatgggatgttgattgcgagctagacaaattacttgtagatgagatgcaagtttgcaagccagaaggctgccatatagcaactggggtggtaggagacaaaggctcatttacattgatgttcccaggcaaagaagccactcttgagctttggaagtcttcagccgaattttgtgccatgaggtcactgtctataatatctcttgctcaactcatgattaaattatctcgttcttgtacaaattctagcagtgctttggcagcattttatacaaggcattttgctgaaaaggttccagatataaagcctccatccctacagcttttggtgagcttttggcaacacccttcggaacatgtgcgaatggctgcacgttccttgttccactgtgcagctccccgttctattccacaaccactacgagtaaacaaaaataaagtggtcaatgcccccttgtcttcatcagataatatgaatgttcttatatgtgctgtgcagactgcctctgtatccaatcatggagagttgaaggaagatgatgaaaatgttgataaagatgatattgacactgctaatatgatcttatggttggaatcatttgaaaatcaggagtggttatcatggataggaggcacaagccaggatgcagtggcgtcaaatatcatagttgcagctgctttggtcgtttggtatccaagtgtcgtgaaagctaaactttcaagtttagttgttagtcaactaatcaagttagttatgtcgatgaatgatcgatatagttcaactgcagctgaacttctagcagagggaatggaaaacacttggaaggcatgcttgggtgctgagatcactcattttatgagtgatatccttttccaaattgagtgcctaagcactgcaccttctagcaatgctatcaataaaactgcagtggccattacaatgcgagaagcattggttggcacccttttaccaagcttggctatggctgatgtaacaggattttttggtgtaatagagagccaaatttgggctacttcgtctgattcacctgttcatgtcgcttcaatcaaaaccattatccgtgtagttcgaggtgcgccgaagtccttggtcccatacctcgacaaggcaatcaactacattctacacactatggatccaagcaatctaataatgcgaaaagcttgtattatcagttcaatgatggctctaagagaaatggcacgtgtatttccgatggttgctctcaatgagtcaatgacaaagctagctgttggtgatgctattggagagatttatgatggtacaattcgagtctatgacatagaaagtgtcacaaagataagaattcttgatgcaagtggaccaccaggccttccaagcttacttgcaggatcatcgaatagaacaacaaccatactgatatcagttctgagtttctcaccggatggagagggtctggttgccttctctgagaacggattgatgataagatggtggtccttaggtagtgcctggtgggagaggctgagcagaagccttactcctattcaatgcacaaagcttatctatgttcctccatgggaaggattttcacctaactctgctcgcttgagtataatttctagcattttagatgataaacctggaaggtcagagtcattttttgtggctgctgctgcaattgcatcaattttctggactcagctgctgcagcgaattagggccatgtgaatttgaaaattgtcaaaacaagttaaag

SEQ ID NO: 83089 - DNA, 381 bp, Zea Mays
atgggaggtggctgcaacagggaagtggagattaggcgagcaggaatgaggggcgagctcgccacccggggcaaggaaaggggcgaccatggagaaatctggagcagggagggagtgcgaggtcgtccaacgcagggggaaacagaggtgagcaccagggagatgcggcgtcaggcactgaagggggctcagccggcgaccagcacgacggcgcagcagggcgcgacctcatggagaaggacgagccagagaaatgaaggaacggctgggagagacgtgcgtgaggtgggagaggagttgaggctgcgtgctagcttgagggaggaaaatggttgggcggcagtgagacaaggccagcagatgagcggcggcagggaatga

SEQ ID NO: 83090 - DNA, 929 bp, Zea Mays
ccctagatccttccacgccgccctccctcagctcattccctgccgccgctcatctgctggccttatctcactgccgcccaaccattttcctccctcaaactagcacacagcctcaactcctctcccacctcacgcacgtctctcccagtcgttccttcatttctctggctcgtccttctccatgaggtcgcgccctgctgcgccgtcgtgctggtcgccggctgagcccccttcagtgcctgacgccgcatctccctggtgctcacctctgtttccccctgcgttggtcgacctcgcactccctccctgctccagatttctccatgccacctcccatggacgccagccctcagccatggatgccgaaccccctctctttagtgcctttctttgcagcccctgcgtccccgtgcgtgtaaggtgtttgtataaatgctcaagaggagtgtcgtgtcgtggccaacccttttggcgtcgtcggatgtttgatgttttgcgcatcccgtctacgacgccgtcgaccatcggtgaggattcgttcttgctttgtcatttcatcgatcgacgtctatttgctaatgtgaattgtgtttatgtgcctatgtgtgttgaggagcgaaatccgtgaaatctaggtgaagaagagacggagcacgtcgtcgccatggttgcagctttgcttttgtcgtcgtggagcctccaccagtgccgtgtagcattcaggaacaatggaaccaaaatacatgacattttcctacttcacgtctggatgccatccaattaatatcttctctgcgatattgcaatggaaggtcaatatgtgatagatgactagaagaaaattataaaaggatgttgaataagattgtgcttattttctcgtgacgaaggttttttctatgcttagggactgctcttatgtgttattg

SEQ ID NO: 83091 - DNA, 1875 bp, Zea Mays
tttcttattcttttttatataactgtcactttaccgggccggaaaagtgacaccgtcacgtctcagggtcgtatgcctggaacaagaagggtcgtcgtacaatttccatttcggcgattacaaaaaagaaggaggcgagctccctatccctctttgtctttccacttccggaacaaacacttcgtaaaattattttgagtcccggcccggtttttccccactaaccaattacgttacgaccactgaacaaacttggttgacgaacatggtttatgcgccgctaatctagcggcttgtcgagcatttgacaaactcacaccatccatttcaaatgggatttgtcccgtggacacacgagcaatccaacccgtaggatttccttttcctcttcccattcgaacttctgcgggtttccccgtaataggaagatctgcgagaactcttacccatatcttacaatttcttcggaattgtccgctcatagcacgacggaattgtccgattgtagcccgacgcgctgcttcaatggctcgatatgaaagacgaccagctctactacttttggtgccatatcttccaaaaccaagttgtgtaccatccggttcgcgacccctactacatctgcatttactatatttactatatttcgtacgtttcggatatagcacgtcccttcttattttgactatatgagatccacactttgacacctgaaattccgtcacgagtagatacttccgcaggagcataatcgattttctggttaaatacattacaagatgtttttccatactttccgcattcagttctagctatttccgcaccccctaatcgaccagaacaacaaatacgtatcccctccaccccttttggcattattaatggaatatccttaactattttactaaaaatggaacgaaatgagattggattgttcctcagttgaaaagagatgtcttgagcaatcagagaagcactttgataaactgatttgatctttaccgactcaattaaggtattagtgtttgttctattagacaaaaaagatcgcattttttgcacttcgttcaaataagagttgtacccgtacggaattctcctctttctcagtatgatctctatcatcatctctattccctttatcaatttgcctatcctacctaggtctatgaatttctctatcaattccattaccttatccttacccatgaggttcctacatttgatccttaattgacctaggagttgttcccgggcatactcataaaatgggttattatacaccccaaccccatcccttgaaaaaaaaaggtagcaccgaagaaaggaaagagcgagatggtggtttttgttgttcccgcgaagcgaagatcattcgcttggcgaatgaagtggatcaacctctttttggctcgggccaaacactttttatcgctggtcgagctttctacaaaaaaaagcgatgcgagagcgtattctcttatctaagcttcctcccttcgctccccccatcgtagatggttcagccacacccggtgccacgaaatgattgagaactacgacggggtcgaaatgcattttgttctttgtattaaaaaagtattgcatgaccgaataattcaaggaggggcgcacagcggggagggtcctttttagtagatgactcgtcgggccgtcagagcgggacttctttggtaaaaaaaagaacttgaataactttgtttttatgaaggagtcgtcattttctatcaggaaggctatgtcatttacaaccccggcgtatttcggatgcttgaaggccccgctcacccgaagtgatttagaaaaattcttctttctcgatggtgatcggtcatggtatccataacgttgcat

SEQ ID NO: 83092 - DNA, 1074 bp, Zea Mays
gtcatcacctcgtatccacctagtgccaccgccgatgccacgtcttggccaggtgtctagttccgtctccgcatgtccccagccctcgtccaccgtccacggcccaccagcggcctcccgagtgtcgcctccgcgatgtcactggagcggcggaacatctagcccagccaagctctaccatggccgacgccatagccgagctctgcgtccggccagccgcccaggacgaggtggctagctttggcccttctgcccttcgcgctgaggcaggccgagctcctccccacctccgccttaccgagctccagccagggtgccagggccgctggtggagctccgccccgtacaccgcgagctcctattcttccggccagctgtgagccttattccttggtaccagaaaataaggcaacacaagtgagtatagttcaagcttgatcaactttcctttaggaagccgacaaaatggagaagctcgggataaaatcattcaatcattagcatgttacacaatgcaacaaagttgaacctgaaggtatctttggaggtggaacaagccgacactatcgagctccaaaaatctctctatgcataacactgtttctttatttatagtcgtgggtacaactttctataaaattacaaacatacccatgaatcttacacaaatgatttatatgttccataagggcagtattgtcttttcttcttctctttccacgttgaactagccttccgagcatccttcctctctcttgctttgtatgccgccttcgaagccgaagccaagtccttcggcacgtgtcgtcataacgcctagatgtagatgaagctacgtagcctctcgttctgattcgtaagctgttttttatgaaggttagcttcactgatccttcacattttacctgaaacacatattttcaatttgataacaaggggttttgaagattttcgacaataaaggttcccaacactaggctagcgaggatttttaggatggaactcaaccatgtattttctatggctattttgtgttgggtgttctgcagatctttacaaatgcctatgttttct

SEQ ID NO: 83093 - DNA, 1111 bp, Zea Mays
aaaacgtttaaccgatttcgatatcgattccgaaatttaataccgatttcgttttcgggaattaccgttacagttggatcggataaaaaaattcgaaaatggtttccataaaaccgaaaatttttgaaaccgttttcatcccagtcatcacctcgtatccacctagtgccaccgccgatgccacgtcttggccaggtgtctagttccgtctccgcatgtccccagccctcgtccaccgtccacggcccaccagcggcctcccgagtgtcgcctccgcgatgtcactggagcggcggaacatctagcccagccaagctctaccatggccgacgccatagccgagctctgcgtccggccagccgcccaggacgaggtggctagctttggcccttctgcccttcgcgctgaggcaggccgagctcctccccacctccgccttaccgagctccagccagggtgccagggccgctggtggagctccgccccgtacaccgcgagctcctattcttccggccagctgtgagccttattccttggtaccagaaaataaggcaacacaattgaacctgaaggtatctttggaggtggaacaagccgacactatcgagctccaaaaatctctctatgcataacactgtttctttatttatagtcgtgggtacaactttctataaaattacaaacatacccatgaatcttacacaaatgatttatatgttccataagggcagtattgtcttttcttcttctctttccacgttgaactagccttccgagcatccttcctctctcttgctttgtatgccgccttcgaagccgaagccaagtccttcggcacgtgtcgtcataacgcctagatgtagatgaagctacgtagcctctcgttctgattcgtaagctgttttttatgaaggttagcttcactgatccttcacattttacctgaaacacatattttcaatttgataacaaggggttttgaagattttcgacaataaaggttcccaacactaggctagcgaggatttttaggatggaactcaaccatgtattttctatggctattttgtgttgggtgttctgcagatctttacaaatgcctatgttttct

SEQ ID NO: 83094 - DNA, 1780 bp, Zea Mays
attccctctcaagtctcgagacccaccaccgcaccccgcgctcggcggactcttttgctgctgcacctgccatcgtcacgcaccggtgtgtggagcgaagccagcgagcgagaagtagccacagagcggcctcagagagacgtgcagatcgagagagagacgaacagagagagcgattcatggtaggtgcgatgcgcggcggagccatggagttggaggaccgcctggccacccttcctcgcttccgcggcgatcacgatgacgacggcaaggaaaggaggacagggacggtatggacggcaacggcgcacatcatcacggcggtgatcggctccggcgtgctgtcgctggcgtgggcgatggcgcagctggggtgggtggccgggccgttgaccctggtgctcttcgcggcgatcaccttctacacctgcggcctcctcgcagactgctaccgcgttggcgaccccgtgacgggcaagcgcaactacacctacaccgaggccgtcaagagcaacctgggcggctgggccatcaacaagtccaactgcttccactggcacggccacgatgccgactgcagccagaacaccagcgcctacatcatcggcttcggcgtggtgcaggtcatcttcagccagctccacaacttccacaagctgtggtggctctccatcatcgccgccatcatgtccttctcctactccgccatcgccgtgggcctctccctggcgcagatcgtcatgggccccacggggaagaccaccatgaccggcaccctggtcggggtggacgtggacgctgcgcagaaggtgtggatgacgttccaggcgctgggcaacgtggccttcgcgtactcgtacgccatcatcctcatcgagatccaggacacgctgcgctccccgcccgccgagaacaagaccatgcgccgcgccaccatgatgggcatctccaccaccaccggcttctacatgttgtgcggctgcctcggctacgccgcgttcggcaacgccgcgtcggggaacatcctcaccggcttcggcttctacgagcccttctggctcgtcgacttcgccaacgcctgcatcgtcgtgcacctcgtcggcggcttccaggtcttctgccagccgctgttcgcggccgtcgagggcgccgtggcggcgcggtaccccgggtcgacgcgcgagtacggcgccgcgggcctcaacgtcttccgcctcgtgtggcgcacggcgttcgtggctgtcatcacgctgctggccatcctcatgcccttcttcaacagcatcctgggcatcctcggcagcatcgccttctggccgctcaccgtcttcttccccgtcgagatgtacatccggcagcggcaggtgcgaaggttcagcaccaagtggatagcgctgcagagcctcagcttcgtctgtttcctcgtcaccgccgcctcctgcgcggcctccgtgcagggcgtggtcgactcgctcaagacctacgtgccgttcaagacgaggtcgtgagctcctgctgcttagttattatacatgtagcatacatactactcgtgcctcctttgtagtggcaccgaaacaaactgagcaaactcagccaaattagttatgcgggagtttaattttgaactactagtatgttgctgtcgaatgcaacaaaactaataacgtttacagtttttctatttggcatcaaccttgtccagcaataattggcgtatgttgtttcagaaaagtcaaactgcgcaggtcttgtaaacggagcaactacgtttatttgg

SEQ ID NO: 83095 - DNA, 1734 bp, Zea Mays
ggggcccgctggtcagctctatccctgacctcgggggctggctttggacaaaaaacacagaatcccaccccaaatatcttctctgtattgttctcctcatctcgaccatccctatccgagattgttgtaactggccctcgatcgcccagaaaccacgctggccgttcttggacttggcccggaatctgggcgcccctagggatgtatatttgaggccacggcctccctccactcatccgtctgtgccaaagccgagtgcatcatgtgagcagagaggagaagaaagagagaacaacgctgctaccgtcgatctcgtcccgcactatctctcgaggaacagctgaatcactcgacagagttcctcgagcgccgctcgtaggctccttgcagcgtattctctgagtagcagcgaggttaacgagtcacttgaagaccaagttggtgaaatacctaggaatcttgagtctaaggcaagttgtgcccttgatcacttttctctttacccaataatgttccaattaatcactatgacatgctcaggttaattttatgggacctaataggttccctagatttgtttatcccacaccttgtttaccactgaacttttgggtagttttgctattgctctacctggttttgggattaatgttacattatgatcctgttcccagttatgctgttgttttaattattgttcatgacaagatcattgtgttgattggaacatccgaacatggagcttaacttgagatatccatgataccacaagggtggaatgggacgcccttggtcgactaattaggaaagctagtggagcactaccttaaccaaaaggggcaagggcgatagaggagctgtgtatagggaggttctcgggtcgatcatgctgcgatggcttttcggacgagggattcctatattgcccttcttagaaaccgtagcgggttttctaaagctagtggaactttgtaaaggcctcatagtggatccctagccattcacctcggaagtgtctaagagccttgaaaccctggctagacgggatacacgacttgtgggtaaagggcgcaacctctgcagagtgtaaaactggtatatcagccatgctcacggtcaagagcgactcaggactctcgcatgattaacttatggaactaaacttaatctgttagatgcattgcgtcgtgggtgttattatcaattgtgatcttttatttaattgggttggtatctacttatgcatagtaaatgctaataaaattctgaccaactctaaaagcaatgcttagctttaaccatctcctttggtaagccttacacttcacatgagatcccaccttcgatgagttcatgcacattattccccacaacttgttgagcgatgaacgtatgtgagctcacccttgctgtactcagatccccccaggtcaagaataggtaccgtaggatgaggcgcatgaaggatgctgtgatgagttcatgagtggtctaggccatcgtctcccagtcaactttggttgctggatcgttgtcttcgtatgatgtaattacttaactattttgtatagaactccattatatataaatgatgttacattcatttctgtaccatgagttatcatatgtgtgagacttgatcctagcacacatgtgaatcgcgcccaggtttggccccctaaatccgggtgtgacaatattgatgagtctaggaagggctagcaaagcagcatc

SEQ ID NO: 83096 - DNA, 1614 bp, Zea Mays
tgtggctgattcatcattatctatggaacggtatggacggcaagcgcgcacatcatcacagccgtcatcggctccggcgtgctctccctcgcctggtcgactgcacagctgggctgggtcgtggggccgctcaccctgatgatctttgccttgatcacgtactacacctctagccttcttgctgactgctaccgcagcggcgatcagctcaccggcaagaggaactacacctacatggacgctgttgccgcgtacctgggtcgatggcaagtcctgtcctgtggtgttttccaattcagtctcatcgtcgattgagaaaccccttttggctgaatggcgatgagcagggccgtgcacaaggcaaactgcttccacaacaagggccacgcggccgactgcagcacctacgacaccatgtacatggtcgtatttgggatcgttcagatcttcttctctcagctccctaacttcagcgacctttcgtggctgtccatcgtcgccgccatcatgtcgttctcttactccagcatcgccgtcggcctctcgttggcgcggaccatttcaggccgtagtggtacgaccactctgaccggcactgagatcggagtcgacgttgattcagcccagaaggtctggctcgcgcttcaagctcttggcaacatcgcgttcgcttactcctactccatgattctcatcgaaatccaagacacggtgaagtctcctccagccgagaacaagacgatgaagaaggcgacgctgatgggcgtgacgaccaccacggcgttctacatgcttgctggctgcctcgggtactcggcattcgggaacgcggcgccagggaacatcctgaccgggttcggcttctacgagccctactggctgatcgacttcgccaacgtctgcatcgtggtgcacctggtgggcgcgtaccaggtcttctcccagcccatcttcgcggccttggagacggcggccgccaagcgctggccgaacgccaggttcgtcacgcgcgagcaccccctcgtggccggcaggttccacgtcaacctgctcaggctgacgtggaggacggcgttcgtggtggtgagcacggtgctcgccatcgtgttgcccttcttcaacgatatcctgggcttcctcggcgccatcggcttctggccgctcaccgtgtactacccagtggagatgtacatccggcagcggcgtatacagaagtacaccagcaggtgggtggcgctgcagctgctcagcttcctgtgcttcctggtctcgctcgcctcggcggtcgcgtccatcgagggagtcaccgagtcgctcaaacactacgttccctttaagaccaagtcgtgatgactgactgagcttcaattctccggtccctgtacaatgcaatggcctaccaccttgcagtggtcgctaagggttatatagtccacatgaaaaactgatgtacatagaaaatcctgaccttcaaaaacagatttggtgtgtgattgttttgcaccgttatatctgattttgaagactaggattttatatgtgtacgtgtataccaaactttcatgtgtaccaaataccatgggctaatgaaaaactgatacaattgagtcccgt

SEQ ID NO: 83097 - DNA, 1846 bp, Zea Mays
cgccctactcgagcgggctttcttcttcgagtcaataggaaccaaaatcccccaaccgccccagcgcacggcccggccgtctcaggcgtccgcggagatgacgcagcaggacgtggagatggcggcgcgccacgggaccggcgccgacggagcgggattctaccctcagccgcggaacggcgccggcggcgagacgctcgacgacgacggcaagaagaagcgcacgggaacggtatggacggcaagcgcgcacatcatcacagccgtcatcggctccggcgtgctctccctcgcctggtcgactgcacagctgggctgggtcgtggggccgctcaccctgatgatctttgccttgatcacgtactacacctctagccttcttgctgactgctaccgcagcggcgatcagctcaccggcaagaggaactacacctacatggacgctgttgccgcgtacctgggtcgatggcaagtcctgtcctgtggtgttttccagtatgttaacttggttggaactgccgttggattcagtctcatcgtcgattgagaaaccccttttggctgaatggcgatgagcagggccgtgcacaaggcaaactgcttccacaacaagggccacgcggccgactgcagcacctacgacaccatgtacatggtcgtatttgggatcgttcagatcttcttctctcagctccctaacttcagcgacctttcgtggctgtccatcgtcgccgccatcatgtcgttctcttactccagcatcgccgtcggcctctcgttggcgcggaccatttcaggccgtagtggtacgaccactctgaccggcactgagatcggagtcgacgttgattcagcccagaaggtctggctcgcgcttcaagctcttggcaacatcgcgttcgcttactcctactccatgattctcatcgaaatccaagacacggtgaagtctcctccagccgagaacaagacgatgaagaaggcgacgctgatgggcgtgacgaccaccacggcgttctacatgcttgctggctgcctcgggtactcggcattcgggaacgcggcgccagggaacatcctgaccgggttcggcttctacgagccctactggctgatcgacttcgccaacgtctgcatcgtggtgcacctggtgggcgcgtaccaggtcttctcccagcccatcttcgcggccttggagacggcggccgccaagcgctggccgaacgccaggttcgtcacgcgcgagcaccccctcgtggccggcaggttccacgtcaacctgctcaggctgacgtggaggacggcgttcgtggtggtgagcacggtgctcgccatcgtgttgcccttcttcaacgatatcctgggcttcctcggcgccatcggcttctggccgctcaccgtgtactacccagtggagatgtacatccggcagcggcgtatacagaagtacaccagcaggtgggtggcgctgcagctgctcagcttcctgtgcttcctggtctcgctcgcctcggcggtcgcgtccatcgagggagtcaccgagtcgctcaaacactacgttccctttaagaccaagtcgtgatgactgactgagcttcaattctccggtccctgtacaatgcaatggcctaccaccttgcagtggtcgctaagggttatatagtccacatgaaaaactgatgtacatagaaaatcctgaccttcaaaaacagatttggtgtgtgattgttttgcaccgttatatctgattttgaagactaggattttatatgtgtacgtgtataccaaactttcatgtgtaccaaataccatgggctaatgaaaaactgatacaattgagtcccgt

SEQ ID NO: 83098 - DNA, 867 bp, Zea Mays
gggtttttcatttatgtcatttggcagcccacaatcggacggagattcgtccaagaaaccctattttacactaggaaagaaccttgtccttgggaggccaggtgattctccctccccacgtgcgtctcctcggccaccatctccacgagcacctccgtcgccgcgtctcctcagccgccatctccgcgagcacctccgctgccgcatctcctcagctgccatctccacgagcacctctgccgcctctccaacatattctccgacgctatcccctttccctcgacaaggtagtgtggctaccagagagttaaatttcacatcaacctttgttgatcttcctccaccttcagctccatccaggagtgtgtctgcacaaagtctcaatcccttggtactaattcacttgatttggatggacaagaaaccacaaaatcaagccagagagaaggtggcagtgggagaaagtgtaagcaaagccatgttggattagctcttgaaagttatgtggagtttaaaaagatccaaaatacagaaacacttgaaactcttaaagaacataagaggcaagaggatcaattttctattagcaagtgccaggttgaattgaaaggaatggatggattaacaaccatgaacaaatcatatgctttggagcttttcgtatctgcgacaaaccgagagatgttcttaacaacaacagaacatgatgttagagaaatttggctcaaacgcaaaattaggttgcttcgggggagtgatgcatggactgaacaaatgatatgagcaaaattgatgtattttgttgacggtggcttcacaatctggcacatgactcatgaaaagcagtgttctgctacaaacattttg

SEQ ID NO: 83099 - DNA, 749 bp, Zea Mays
gggtttttcatttatgtcatttggcagcccacaatcggacggagattcgtccaagaaaccctattttacactaggaaagaaccttgtccttgggaggccaggtgattctccctccccacgtgcgtctcctcggccaccatctccacgagcacctccgtcgccgcgtctcctcagccgccatctccgcgagcacctccgctgccgcatctcctcagctgccatctccacgagcacctctgccgcctctccaacatattctccgacgctatcccctttccctcgacaaggtagtgtggctaccagagagttaaatttcacatcaacctttgttgatcttcctccaccttcagctccatccaggagtgtgtctgcacaaagtctcaatcccttggtactaattcacttgatttggatggacaagaaaccacaaaatcaagccagagagaaggtggcagtgggagaaagtgttgaattgaaaggaatggatggattaacaaccatgaacaaatcatatgctttggagcttttcgtatctgcgacaaaccgagagatgttcttaacaacaacagaacatgatgttagagaaatttggctcaaacgcaaaattaggttgcttcgggggagtgatgcatggactgaacaaatgatatgagcaaaattggaacaaattttagatgtattttgttgacggtggcttcacaatctggcacatgactcatgaaaagcagtgttctgctacaaacattttg

SEQ ID NO: 83100 - DNA, 349 bp, Zea Mays
gggtttttcatttatgtcatttggcagcccacaatcggacggagattcgtccaagaaaccctattttacactaggaaagaaccttgtccttgggaggccaggtgattctccctccccacgtgcgtctcctcggccaccatctccacgagcacctccgtcgccgcgtctcctcagccgccatctccgcgagcacctccgctgccgcatctcctcagctgccatctccacgagcacctctgccgcctctccaacatattctccgacgctatcccctttccctcgacaagctccatccaggagtgtgtctgcacaaagtctcaatcccttggtactaattcacttgatttgg

SEQ ID NO: 83101 - DNA, 328 bp, Zea Mays
gggtttttcatttatgtcatttggcagcccacaatcggacggagattcgtccaagaaaccctattttacactaggaaagaaccttgtccttgggaggccaggtgattctccctccccacgtgcgtctcctcggccaccatctccacgagcacctccgtcgccgcgtctcctcagccgccatctccgcgagcacctccgctgccgcatctcctcagctgccatctccacgagcacctctgccgcctctccaacatattctccgacgctatcccctttccctcgacaagttttgaataaagtatgatttggaacaatgtgtatgagaaag

SEQ ID NO: 83102 - DNA, 561 bp, Zea Mays
caggcgcctcccgccccgtcatgtgaggaagagcagctgcccttggaggctgaggaggcgcagaacgatgccgaggaggcacagggcgacgctgaggagacgcaacaagacgtcgagggggcgacagtaggagattctactgcctctggttcgtcgagcgtctacttgcgaggtcccgcaagcctccctaagcgaccgatacctcttgagagacgtccggtgattcaacccgaggcggaaaggaactggtcgactgtggtgagtggaggtgctcacacacgccgagtcaatggcatactcggtcttctgtgcaaggaacacttccctggcatggttgagtacgacggagtgatggtgccagcctactcgttcgaccactatgccattgcccccgatgctgaagatcgagtcggtagggtattcaacaacaaggcagagcgggtgaagcaagagttgatttctacagatgtcaggagggatatgagggcagggcagatgcgttggctaccagatgttgtaaaaaactcgtcgtagatatgcactacgaggcgcgcatccagg

SEQ ID NO: 83103 - DNA, 4198 bp, Zea Mays
gtggaatgggaaatcattttttttccaggaagaatccgcaccaagtccactgctttgacactcaccacacaccgattgattagttgaggctgaggctgaaacaggataagcgtcagggcagtttgtggcggggttcagtgggttggtttgctcgctcgctcactcctgctacccgcctctttttttgaccgtaaaccaaagccatcgtcttcctgcctgtgcctggtggggccaatcaggacgcagagggttggtgcaacaacccgacctcgcggcgatggcgcgacccgatcagcccagatttgcgaacgcccacgacgtgttcgccgaaatgccaggccaaagatactggggctggacatctgcgcggacaccatcgtcggcgaccagatgcagcgggggatctccggtggccagaagaagcgtgtcaccacaggagagatgattgttggcccgaccaaggtgctattcatggacgagatatcaactgggctggacagctccacgacattccaaatcgtcaaatgtctccagcagattgtccacttgggcgaggccaccatcctcatgtccctcctccagcctgcccccgagaccttcgacctattcgatgacatcatcctactgtcagaaggccagattgtttaccagggaccccgcgaacacgtccttgagttcttcgaatcttgcggattcagctgccccgagcgcaagggtactgcagactttcttcaggaggtaacatcaaggaaggatcaggagcagtactgggctgacaagcagaggccttacagatacatttcggtgccagaatttgcacagcggtttcaacggttccatgtcgggctgcagcttgagaaccacctctcacttccgtttgacaagagccgtagccatcaggctgcccttgtattctcaaagcattctgtgtcaacaacagaactcctcaaggcatcttttgacaaggagtggctcctcatcaagcgcaattcattcgtgtacatcttcaagaccttacagcttatcattgtagccctcgttgcttcaacggtgtttctgagaactcacatgcatacgaggaatctagatgatggctttgtctacattggagcactgctctttactctgattgtgaacatgttcaatggttttgctgagctctccttggccataacaaggttgccggtgttcttcaagcaccgggacctgctcttctatcctgcttgggtcttcacactaccgaacgtcattcttaggatcccattctccattattgaatctatagtctgggttcttgtcacatattataccatagggttttctccagaggctgacaggtttttcaagcacttgctgctcgtgttcttgatccagcagatggcaggtgggcttttcagagcaatcgctggactttgcaggtccatgatcattgctcacactggtggagcactatctcttcttctcttctttgttcttggaggctttctcctgccaaaagctttcatccctaaatggtggatttggggatactggatttcacctttaatgtatggatacaatgctctagcagtcaatgaattctattctcctcggtggatgaataagtttgtactggatcaaaatggtgttccaaaaagactggggatagctatgcttgaaggtgccaacatctttgttgacaaaaattggtactggattggagcagcagggctcttgggtttcaccatctttttcaatgttcttttcacattgtcactcatgtacctgaaccctcttggcaagccacaagctattatatcagaagaaactgcaaaagaagcggaagggaatgggcatgcaaaagggacaataagaaatggaagcacgaaatcgaaggacggtagccatgataaggaaatgaaggagatgagattgaatgcgcgtttgagcagcagttcatctaatggggtttcacgagtcatgtccattggcagcaatgaagccgctctgtcaagaggcatggttcttccattcaaccctcttgccatgtcttttgataatgtgaattactatgtcgacatgcctgcggaaatgaaacagcaaggagtgcaggatgaccgactccaattgttgcgtgaggttacgggatcattcaggcctggagtgctgacagcacttatgggtgtcagtggagctggaaagactactcttatggatgttttagctggaagaaagactgggggttatattgaaggagatatcagaattgcaggctatcccaagaaccaagcaacatttgcaaggatttctggatactgcgagcaaaatgatatccattctcctcaggtcacagttcgggagtctttgatatactctgcctttttgcgccttcctgaaaagattggagataaagaaataactgatgatataaagattcaatttgtggatgaagttatggaactagtggaactcaacaatctgagcgacgctatagttgggctaccaggaatcacagggctttcaacagagcaaagaaaaaggttgacaatagccgtggagcttgttgccaatccatcaatcatatttatggatgaaccaacatcaggacttgatgcaagagctgcggcaattgtcatgagaaccgtgcgaaacacagttgacaccggacggacagttgtttgcacaatccatcagccaagcattgacatctttgaggcttttgatgagttgctattgttaaaaagaggaggccaggtgatctactctgggaaattgggtcgcaactcccagaaaatggttgagtattttgaggcaattcctggagtgcctaaaattaaagataagtacaatcctgcaacgtggatgctggaggtcagttcagttgcagctgaagtgcgactaaagatggattttgctgagtactataaaacatcagatctcaacatgcaaaacaaggtactggtgaaccagctgagtcaaccagaaccaggaacatcagatctttatttccctacagagtactcacaatccacagtaggacagttcaaagcctgcctctggaagcaatggctgacctattggcgcagcccggattacaaccttgttagattttccttcactttgttagttgccttgctgctcggctccattttctggaggataggcaccaacatgggagattcaaccactctcaggatggttattggatcaatgtacactgctgtgatgtttgtcggcatcaacaattgttcaactgtgcagccaattgtttcaattgagaggacggtcttctacagagagagggctgctgggatgtactctgcaatgccatatgccattgctcaggttgtcatagagataccatatgtgtttgtccaaacaacgtattacaccctcatcgtatacgccatgatgagtttccaatggacagctgccaagttcttctggttcttcttcatttcctacttctccttcctctacttcacctactatggcatgatgactgtctcaatctccccaaaccatgaggttgcatccatcttcgccgcagctttctattctctgttcaacctcttctcaggctttttcattccaagaccgagaattcctagatggtggatctggtactactggatttgcccattggcatggacagtgtatgggctcatcgtgacacaatacggagacctgcaagaccccatcacagtccctggcgaaagcaaccagacgattagctactatataacacatcattttggataccatagggattttatgccagtcgttgcgccagttctcgtgctctttgcagtattcttcgctttcatgtacgcagtctgcatcaagaagttgaactttcagcaacgataggaacaagatatggcagaaaagctcttgagagtattttttctttttttggaaaatacttccttttctcctttcatttttgagtccctttaatatattgcaatgtatatagggtgtagcttcggtattccacacatcgtcaaatgtggcgaggtcttatacagatttctagccgtttaactgtggaacattgtaatttgtaagagcacatctatgagaaagttttgttcatgcccaattcatttcacatggaatctttcgtgaaaccaactattcaattggaaacgagtataaggttatgtaaaagcggatattgtttttattgatatgatactctaaagacaagggcaag

SEQ ID NO: 83104 - DNA, 4402 bp, Zea Mays
gagaggctgacggtgcaggccaagtgccacgtgggcagccgcgcgctgccgacgctgctgaacacggcgcgcaacatcgcggagggcgccctgggcctgtgcggcgtgcggctggggcggcaggccaggctcaccatcctcggggacgtgtccggcgccgtccgcccctcgcggatgacgctgctgctgggcccgccgtcgtcggggaagaccacgctgctgctcgccctcgccggcaagctggaccccgcgctcacgcgcgccggcgaggtcacctacaacggcttccgcctcgacgagttcgtgccgcagaagacggcggcgtacatcagccagacggacgtgcacgtcggcgagatgacggtcaaggagacgctcgacttctccgccaggtgccagggcgtcggcaccaaatacgatctcatgaccgagttggcgaggagggagaaggaggccggcatccgcccggagcctgaagtcgacctcttcatgaaggccacttcaatggaaggtgtggggagcagtctccaaacggattatactctcaggatactggggctggacatctgcgcggacaccatcgtcggcgaccagatgcagcgggggatctccggtggccagaagaagcgtgtcaccacaggagagatgattgttggcccgaccaaggtgctattcatggacgagatatcaactgggctggacagctccacgacattccaaatcgtcaaatgtctccagcagattgtccacttgggcgaggccaccatcctcatgtccctcctccagcctgcccccgagaccttcgacctattcgatgacatcatcctactgtcagaaggccagattgtttaccagggaccccgcgaacacgtccttgagttcttcgaatcttgcggattcagctgccccgagcgcaagggtactgcagactttcttcaggaggtaacatcaaggaaggatcaggagcagtactgggctgacaagcagaggccttacagatacatttcggtgccagaatttgcacagcggtttcaacggttccatgtcgggctgcagcttgagaaccacctctcacttccgtttgacaagagccgtagccatcaggctgcccttgtattctcaaagcattctgtgtcaacaacagaactcctcaaggcatcttttgacaaggagtggctcctcatcaagcgcaattcattcgtgtacatcttcaagaccttacagcttatcattgtagccctcgttgcttcaacggtgtttctgagaactcacatgcatacgaggaatctagatgatggctttgtctacattggagcactgctctttactctgattgtgaacatgttcaatggttttgctgagctctccttggccataacaaggttgccggtgttcttcaagcaccgggacctgctcttctatcctgcttgggtcttcacactaccgaacgtcattcttaggatcccattctccattattgaatctatagtctgggttcttgtcacatattataccatagggttttctccagaggctgacaggtttttcaagcacttgctgctcgtgttcttgatccagcagatggcaggtgggcttttcagagcaatcgctggactttgcaggtccatgatcattgctcacactggtggagcactatctcttcttctcttctttgttcttggaggctttctcctgccaaaagctttcatccctaaatggtggatttggggatactggatttcacctttaatgtatggatacaatgctctagcagtcaatgaattctattctcctcggtggatgaataagtttgtactggatcaaaatggtgttccaaaaagactggggatagctatgcttgaaggtgccaacatctttgttgacaaaaattggtactggattggagcagcagggctcttgggtttcaccatctttttcaatgttcttttcacattgtcactcatgtacctgaaccctcttggcaagccacaagctattatatcagaagaaactgcaaaagaagcggaagggaatgggcatgcaaaagggacaataagaaatggaagcacgaaatcgaaggacggtagccatgataaggaaatgaaggagatgagattgaatgcgcgtttgagcagcagttcatctaatggggtttcacgagtcatgtccattggcagcaatgaagccgctctgtcaagaggcatggttcttccattcaaccctcttgccatgtcttttgataatgtgaattactatgtcgacatgcctgcggaaatgaaacagcaaggagtgcaggatgaccgactccaattgttgcgtgaggttacgggatcattcaggcctggagtgctgacagcacttatgggtgtcagtggagctggaaagactactcttatggatgttttagctggaagaaagactgggggttatattgaaggagatatcagaattgcaggctatcccaagaaccaagcaacatttgcaaggatttctggatactgcgagcaaaatgatatccattctcctcaggtcacagttcgggagtctttgatatactctgcctttttgcgccttcctgaaaagattggagataaagaaataactgatgatataaagattcaatttgtggatgaagttatggaactagtggaactcaacaatctgagcgacgctatagttgggctaccaggaatcacagggctttcaacagagcaaagaaaaaggttgacaatagccgtggagcttgttgccaatccatcaatcatatttatggatgaaccaacatcaggacttgatgcaagagctgcggcaattgtcatgagaaccgtgcgaaacacagttgacaccggacggacagttgtttgcacaatccatcagccaagcattgacatctttgaggcttttgatgagttgctattgttaaaaagaggaggccaggtgatctactctgggaaattgggtcgcaactcccagaaaatggttgagtattttgaggcaattcctggagtgcctaaaattaaagataagtacaatcctgcaacgtggatgctggaggtcagttcagttgcagctgaagtgcgactaaagatggattttgctgagtactataaaacatcagatctcaacatgcaaaacaaggtactggtgaaccagctgagtcaaccagaaccaggaacatcagatctttatttccctacagagtactcacaatccacagtaggacagttcaaagcctgcctctggaagcaatggctgacctattggcgcagcccggattacaaccttgttagattttccttcactttgttagttgccttgctgctcggctccattttctggaggataggcaccaacatgggagattcaaccactctcaggatggttattggatcaatgtacactgctgtgatgtttgtcggcatcaacaattgttcaactgtgcagccaattgtttcaattgagaggacggtcttctacagagagagggctgctgggatgtactctgcaatgccatatgccattgctcaggttgtcatagagataccatatgtgtttgtccaaacaacgtattacaccctcatcgtatacgccatgatgagtttccaatggacagctgccaagttcttctggttcttcttcatttcctacttctccttcctctacttcacctactatggcatgatgactgtctcaatctccccaaaccatgaggttgcatccatcttcgccgcagctttctattctctgttcaacctcttctcaggctttttcattccaagaccgagaattcctagatggtggatctggtactactggatttgcccattggcatggacagtgtatgggctcatcgtgacacaatacggagacctgcaagaccccatcacagtccctggcgaaagcaaccagacgattagctactatataacacatcattttggataccatagggattttatgccagtcgttgcgccagttctcgtgctctttgcagtattcttcgctttcatgtacgcagtctgcatcaagaagttgaactttcagcaacgataggaacaagatatggcagaaaagctcttgagagtattttttctttttttggaaaatacttccttttctcctttcatttttgagtccctttaatatattgcaatgtatatagggtgtagcttcggtattccacacatcgtcaaatgtggcgaggtcttatacagatttctagccgtttaactgtggaacattgtaatttgtaagagcacatctatgagaaagttttgttcatgcccaattcatttcacatggaatctttcgtgaaaccaactattcaattggaaacgagtataaggttatgtaaaagcggatattgtttttattgatatgatactctaaagacaagggcaag

SEQ ID NO: 83105 - DNA, 4311 bp, Zea Mays
gagaggctgacggtgcaggccaagtgccacgtgggcagccgcgcgctgccgacgctgctgaacacggcgcgcaacatcgcggagggcgccctgggcctgtgcggcgtgcggctggggcggcaggccaggctcaccatcctcggggacgtgtccggcgccgtccgcccctcgcggatgacgctgctgctgggcccgccgtcgtcggggaagaccacgctgctgctcgccctcgccggcaagctggaccccgcgctcacgcgcgccggcgaggtcacctacaacggcttccgcctcgacgagttcgtgccgcagaagacggcggcgtacatcagccagacggacgtgcacgtcggcgagatgacggtcaaggagacgctcgacttctccgccaggtgccagggcgtcggcaccaaatacgatctcatgaccgagttggcgaggagggagaaggaggccggcatccgcccggagcctgaagtcgacctcttcatgaaggccacttcaatggaaggtgtggggagcagtctccaaacggattatactctcagggagagatgattgttggcccgaccaaggtgctattcatggacgagatatcaactgggctggacagctccacgacattccaaatcgtcaaatgtctccagcagattgtccacttgggcgaggccaccatcctcatgtccctcctccagcctgcccccgagaccttcgacctattcgatgacatcatcctactgtcagaaggccagattgtttaccagggaccccgcgaacacgtccttgagttcttcgaatcttgcggattcagctgccccgagcgcaagggtactgcagactttcttcaggaggtaacatcaaggaaggatcaggagcagtactgggctgacaagcagaggccttacagatacatttcggtgccagaatttgcacagcggtttcaacggttccatgtcgggctgcagcttgagaaccacctctcacttccgtttgacaagagccgtagccatcaggctgcccttgtattctcaaagcattctgtgtcaacaacagaactcctcaaggcatcttttgacaaggagtggctcctcatcaagcgcaattcattcgtgtacatcttcaagaccttacagcttatcattgtagccctcgttgcttcaacggtgtttctgagaactcacatgcatacgaggaatctagatgatggctttgtctacattggagcactgctctttactctgattgtgaacatgttcaatggttttgctgagctctccttggccataacaaggttgccggtgttcttcaagcaccgggacctgctcttctatcctgcttgggtcttcacactaccgaacgtcattcttaggatcccattctccattattgaatctatagtctgggttcttgtcacatattataccatagggttttctccagaggctgacaggtttttcaagcacttgctgctcgtgttcttgatccagcagatggcaggtgggcttttcagagcaatcgctggactttgcaggtccatgatcattgctcacactggtggagcactatctcttcttctcttctttgttcttggaggctttctcctgccaaaagctttcatccctaaatggtggatttggggatactggatttcacctttaatgtatggatacaatgctctagcagtcaatgaattctattctcctcggtggatgaataagtttgtactggatcaaaatggtgttccaaaaagactggggatagctatgcttgaaggtgccaacatctttgttgacaaaaattggtactggattggagcagcagggctcttgggtttcaccatctttttcaatgttcttttcacattgtcactcatgtacctgaaccctcttggcaagccacaagctattatatcagaagaaactgcaaaagaagcggaagggaatgggcatgcaaaagggacaataagaaatggaagcacgaaatcgaaggacggtagccatgataaggaaatgaaggagatgagattgaatgcgcgtttgagcagcagttcatctaatggggtttcacgagtcatgtccattggcagcaatgaagccgctctgtcaagaggcatggttcttccattcaaccctcttgccatgtcttttgataatgtgaattactatgtcgacatgcctgcggaaatgaaacagcaaggagtgcaggatgaccgactccaattgttgcgtgaggttacgggatcattcaggcctggagtgctgacagcacttatgggtgtcagtggagctggaaagactactcttatggatgttttagctggaagaaagactgggggttatattgaaggagatatcagaattgcaggctatcccaagaaccaagcaacatttgcaaggatttctggatactgcgagcaaaatgatatccattctcctcaggtcacagttcgggagtctttgatatactctgcctttttgcgccttcctgaaaagattggagataaagaaataactgatgatataaagattcaatttgtggatgaagttatggaactagtggaactcaacaatctgagcgacgctatagttgggctaccaggaatcacagggctttcaacagagcaaagaaaaaggttgacaatagccgtggagcttgttgccaatccatcaatcatatttatggatgaaccaacatcaggacttgatgcaagagctgcggcaattgtcatgagaaccgtgcgaaacacagttgacaccggacggacagttgtttgcacaatccatcagccaagcattgacatctttgaggcttttgatgagttgctattgttaaaaagaggaggccaggtgatctactctgggaaattgggtcgcaactcccagaaaatggttgagtattttgaggcaattcctggagtgcctaaaattaaagataagtacaatcctgcaacgtggatgctggaggtcagttcagttgcagctgaagtgcgactaaagatggattttgctgagtactataaaacatcagatctcaacatgcaaaacaaggtactggtgaaccagctgagtcaaccagaaccaggaacatcagatctttatttccctacagagtactcacaatccacagtaggacagttcaaagcctgcctctggaagcaatggctgacctattggcgcagcccggattacaaccttgttagattttccttcactttgttagttgccttgctgctcggctccattttctggaggataggcaccaacatgggagattcaaccactctcaggatggttattggatcaatgtacactgctgtgatgtttgtcggcatcaacaattgttcaactgtgcagccaattgtttcaattgagaggacggtcttctacagagagagggctgctgggatgtactctgcaatgccatatgccattgctcaggttgtcatagagataccatatgtgtttgtccaaacaacgtattacaccctcatcgtatacgccatgatgagtttccaatggacagctgccaagttcttctggttcttcttcatttcctacttctccttcctctacttcacctactatggcatgatgactgtctcaatctccccaaaccatgaggttgcatccatcttcgccgcagctttctattctctgttcaacctcttctcaggctttttcattccaagaccgagaattcctagatggtggatctggtactactggatttgcccattggcatggacagtgtatgggctcatcgtgacacaatacggagacctgcaagaccccatcacagtccctggcgaaagcaaccagacgattagctactatataacacatcattttggataccatagggattttatgccagtcgttgcgccagttctcgtgctctttgcagtattcttcgctttcatgtacgcagtctgcatcaagaagttgaactttcagcaacgataggaacaagatatggcagaaaagctcttgagagtattttttctttttttggaaaatacttccttttctcctttcatttttgagtccctttaatatattgcaatgtatatagggtgtagcttcggtattccacacatcgtcaaatgtggcgaggtcttatacagatttctagccgtttaactgtggaacattgtaatttgtaagagcacatctatgagaaagttttgttcatgcccaattcatttcacatggaatctttcgtgaaaccaactattcaattggaaacgagtataaggttatgtaaaagcggatattgtttttattgatatgatactctaaagacaagggcaag

SEQ ID NO: 83106 - DNA, 1355 bp, Zea Mays
cccatttattgttatcgatcttattttattcgactcatgttatagcactaaaaatcttgcatcagaaatatctgtgattttcagtaaaaaaataataaaaggagaaagaaattaaaaaaaaagagaaatatccacggatcctctgtgattttcagtaaaaaaataataaaaggagaaagaaattaaaaaaaaagagaaatatccacggatcctcatccgctcgccgcccatgggctgatttttttgccgccccctgctcttatatctcacgcgaagactccatcgtcttcaattctccctgtcgtgcggcaccagctccctgctcctcccactcgttcgaccgccgtggagcttccccgtctcccctgctcaagatttttttccacgccgctgtcttcttcttcttctcccagccgaattctccctctccctggtcacttccgcgcgcgcgcctggccctctgtttttcctcgtcgtttttcagccgggcttctctactgcacgctggcttctcccccatggcgcctcagccagccgagcagctcgtggagctcccatggcgctcgacccctgctgcagctcgcgccctgctccctgcgtctgggtccgaagctccctggcgcgttcgcccagccaagctccctcgccaaaccgcgcccccgctactcgctggtgctcaccgcgcacgcccagctctctgttcgtctctgcgcatagcttcccaagctccatggccggttccctgctcgcgtcgtggtctcccagctcgtcaatacttgttcagtcatctcggctggctcggcctcaaattccagcgcctcgccctgctctcgtggttcagcgacggccggcgcgagcctggccgtggtgatgttgtggcgtgacgatgttgtgtgcgtcgcgacagctgtcttggccacggggcagtccacgccatagagttcgcccgaccgcaacctcgctttactcctcgcgtcgttgctggtcgagtcctaagcatctgcgcacatgtcttagttggcgccaaacatcttcgtgccgcacacactcatctttgctagctggccgtgcacctcacttcgttgtttcgtgtccgccagttgccattgctcatccacatcaaaacatcacttgccgtggttcagctcgctagttcgtcgttgttccgtcgcctcgatgtcagtcccctctgaattgtgatcgcacggacaaaagaatccccaagaaatgtgttcaaagatttgatggtggtgtgtgtgaagttcgtgtggctcctgccaagcgctcgacaaattatttaaatcggaaaatcattactgaactcatatattcgagtcaactgttggaatggtaag

SEQ ID NO: 83107 - DNA, 411 bp, Zea Mays
gtcagctccgtccctcaactgaacctcggcgcatggcggggcgcgccgtcgtcgcgcagtccgttgaagcgtcctggtcaaattcgcgcttataagggaagccacgtcctcgggtccgtctcttcctcctctttccccgttcttgcgaccaccaccgtaccacaaattgcggcgccaggaggggaaagagggtgctgccgtcagggaactccgacctaaccgtcaaccgcgcctcggaattgttctcggtagctccttaaggaccggaggaaagtagtcgtgtccaagccactcgaggattgccacgagccccgtcgggattgcttgccggtgcgacatcaccgccgtcagcctgctttgcgccgtggccaacacctttccagcactcaaccacgacgagcaagtgaccga

SEQ ID NO: 83108 - DNA, 1568 bp, Zea Mays
gttttacatgcttttgtgttacttatgtcactttgttgcagccagttggacaattggaggagttttggttggtttattacatatagaggaaagtaatttgcatttgtaggttggcatctaagaatttgaactgcagagcgtttcaattgattcatccaaatcttccaaaaaagaattgaacttgctagcttccgtgtagcatttcgtttacaaaaaagggatgtaaacctctggcaacagagcgtccagatccaattgggaggtctgcatcaccaagcccctgctcttcatatcaaccaagtccgcgagcctcatacaacccaagcgcggcatcctcctcgttcccaagctctgggtcctcctcccacattactcttggcgggagcaacttcatgggaggcgtcgagggcagctcccttatcccgtggctaaagaacctctcgtcgagctcctcgttcgcctcctcctccaagttcccgcagcttcaccacctctacttcaacggcggttccatcagcgcgccggtgacgcctccatccagctctccaacccgcacgcctcgcatcaagactgactgggagaacccgagtgttcagccaccgtgggctggggcgaactacgcgtctcttcccaactcccagccgccgagccctgggcaccaggttgctccggacccggcgtggctagccgggttccagatttcgtctgctggcccttcgtctccaacttacagccttgtggctccgaatccgtttggtatcttcaaggagaccatcgtcagcacctcaagaatgtgcacccctgggcagagtggaacgtgctctcctgtaatgggcggtgcgccgatccatcacgatgtccagatggctgatggtgccccagatgacttcgccttcgggagcagcagcaacggcaacaacgagtcgcctggtctcgtgaaggcatgggagggggaacggatacacgaggagtgcgcctcggacgagcatgagctggagctcacccttgggagctcaaagactcgtgcagatccttcctgatcatgctgcaagagacaagtcttcacctgttttttttttttactttcatctttattcggacggtgctcctctgctttatgagttcaatgtttgtagaaagagggaagggattcagagaccttatcctgctcctctggagatgatatccatcctctttcaaggatatgaactttattctagcttaagcaaattgttaacttatttatttcattttttcttcatatcctttttttttgtctccctcaagaaacgaaaaggaaaaaaatgcaagggaaaagagtgcttgcaggaaccttttagacaagtcgcagaacttgtcatctgtcagcagtagctgagattcctgtggcattcctgtggccttgtaaaaattagctccagttgtcattgatatgactattatcgttgtacttgtgtcgaaagtgtgtacattgtatggatcatttaggtcttgttgtcattgatatgactattatcgttgtacttgtgtcgaaagtgtgtacattgtatggatcatttaggtctttc

SEQ ID NO: 83109 - DNA, 1374 bp, Zea Mays
ggtgtactctgctcatctgctgtaggatgtaaacctctggcaacagagcgtccagatccaattgggaggtctgcatcaccaagcccctgctcttcatatcaaccaagtccgcgagcctcatacaacccaagcgcggcatcctcctcgttcccaagctctgggtcctcctcccacattactcttggcgggagcaacttcatgggaggcgtcgagggcagctcccttatcccgtggctaaagaacctctcgtcgagctcctcgttcgcctcctcctccaagttcccgcagcttcaccacctctacttcaacggcggttccatcagcgcgccggtgacgcctccatccagctctccaacccgcacgcctcgcatcaagactgactgggagaacccgagtgttcagccaccgtgggctggggcgaactacgcgtctcttcccaactcccagccgccgagccctgggcaccaggttgctccggacccggcgtggctagccgggttccagatttcgtctgctggcccttcgtctccaacttacagccttgtggctccgaatccgtttggtatcttcaaggagaccatcgtcagcacctcaagaatgtgcacccctgggcagagtggaacgtgctctcctgtaatgggcggtgcgccgatccatcacgatgtccagatggctgatggtgccccagatgacttcgccttcgggagcagcagcaacggcaacaacgagtcgcctggtctcgtgaaggcatgggagggggaacggatacacgaggagtgcgcctcggacgagcatgagctggagctcacccttgggagctcaaagactcgtgcagatccttcctgatcatgctgcaagagacaagtcttcacctgttttttttttttactttcatctttattcggacggtgctcctctgctttatgagttcaatgtttgtagaaagagggaagggattcagagaccttatcctgctcctctggagatgatatccatcctctttcaaggatatgaactttattctagcttaagcaaattgttaacttatttatttcattttttcttcatatcctttttttttgtctccctcaagaaacgaaaaggaaaaaaatgcaagggaaaagagtgcttgcaggaaccttttagacaagtcgcagaacttgtcatctgtcagcagtagctgagattcctgtggcattcctgtggccttgtaaaaattagctccagttgtcattgatatgactattatcgttgtacttgtgtcgaaagtgtgtacattgtatggatcatttaggtcttgttgtcattgatatgactattatcgttgtacttgtgtcgaaagtgtgtacattgtatggatcatttaggtctttc

SEQ ID NO: 83110 - DNA, 1543 bp, Zea Mays
ccagccatgtgcacatgctgccactgctctgataaaccaaaagcagtagttcattactttgcctttgaggcttgcgccaaactggttcgtaaccagaggctttcgaatttccacaccgtggtttggttcgttggttgcctttgttgtatgcggtatgcagcacttgtgttcactcgttcttcagtagccaatgggatgtaaacctctggcaacagagcgtccagatccaattgggaggtctgcatcaccaagcccctgctcttcatatcaaccaagtccgcgagcctcatacaacccaagcgcggcatcctcctcgttcccaagctctgggtcctcctcccacattactcttggcgggagcaacttcatgggaggcgtcgagggcagctcccttatcccgtggctaaagaacctctcgtcgagctcctcgttcgcctcctcctccaagttcccgcagcttcaccacctctacttcaacggcggttccatcagcgcgccggtgacgcctccatccagctctccaacccgcacgcctcgcatcaagactgactgggagaacccgagtgttcagccaccgtgggctggggcgaactacgcgtctcttcccaactcccagccgccgagccctgggcaccaggttgctccggacccggcgtggctagccgggttccagatttcgtctgctggcccttcgtctccaacttacagccttgtggctccgaatccgtttggtatcttcaaggagaccatcgtcagcacctcaagaatgtgcacccctgggcagagtggaacgtgctctcctgtaatgggcggtgcgccgatccatcacgatgtccagatggctgatggtgccccagatgacttcgccttcgggagcagcagcaacggcaacaacgagtcgcctggtctcgtgaaggcatgggagggggaacggatacacgaggagtgcgcctcggacgagcatgagctggagctcacccttgggagctcaaagactcgtgcagatccttcctgatcatgctgcaagagacaagtcttcacctgttttttttttttactttcatctttattcggacggtgctcctctgctttatgagttcaatgtttgtagaaagagggaagggattcagagaccttatcctgctcctctggagatgatatccatcctctttcaaggatatgaactttattctagcttaagcaaattgttaacttatttatttcattttttcttcatatcctttttttttgtctccctcaagaaacgaaaaggaaaaaaatgcaagggaaaagagtgcttgcaggaaccttttagacaagtcgcagaacttgtcatctgtcagcagtagctgagattcctgtggcattcctgtggccttgtaaaaattagctccagttgtcattgatatgactattatcgttgtacttgtgtcgaaagtgtgtacattgtatggatcatttaggtcttgttgtcattgatatgactattatcgttgtacttgtgtcgaaagtgtgtacattgtatggatcatttaggtctttc

SEQ ID NO: 83111 - DNA, 1495 bp, Zea Mays
ctttcttcttcccaatggtgcttttgtagttccttcctagccatgaccaaaagaaaattttcaacagctcatctgaagatttttttttgtccgctaccacatttctcttggtcctcctcagctgagggaaggtggttcagtctagggatgtaaacctctggcaacagagcgtccagatccaattgggaggtctgcatcaccaagcccctgctcttcatatcaaccaagtccgcgagcctcatacaacccaagcgcggcatcctcctcgttcccaagctctgggtcctcctcccacattactcttggcgggagcaacttcatgggaggcgtcgagggcagctcccttatcccgtggctaaagaacctctcgtcgagctcctcgttcgcctcctcctccaagttcccgcagcttcaccacctctacttcaacggcggttccatcagcgcgccggtgacgcctccatccagctctccaacccgcacgcctcgcatcaagactgactgggagaacccgagtgttcagccaccgtgggctggggcgaactacgcgtctcttcccaactcccagccgccgagccctgggcaccaggttgctccggacccggcgtggctagccgggttccagatttcgtctgctggcccttcgtctccaacttacagccttgtggctccgaatccgtttggtatcttcaaggagaccatcgtcagcacctcaagaatgtgcacccctgggcagagtggaacgtgctctcctgtaatgggcggtgcgccgatccatcacgatgtccagatggctgatggtgccccagatgacttcgccttcgggagcagcagcaacggcaacaacgagtcgcctggtctcgtgaaggcatgggagggggaacggatacacgaggagtgcgcctcggacgagcatgagctggagctcacccttgggagctcaaagactcgtgcagatccttcctgatcatgctgcaagagacaagtcttcacctgttttttttttttactttcatctttattcggacggtgctcctctgctttatgagttcaatgtttgtagaaagagggaagggattcagagaccttatcctgctcctctggagatgatatccatcctctttcaaggatatgaactttattctagcttaagcaaattgttaacttatttatttcattttttcttcatatcctttttttttgtctccctcaagaaacgaaaaggaaaaaaatgcaagggaaaagagtgcttgcaggaaccttttagacaagtcgcagaacttgtcatctgtcagcagtagctgagattcctgtggcattcctgtggccttgtaaaaattagctccagttgtcattgatatgactattatcgttgtacttgtgtcgaaagtgtgtacattgtatggatcatttaggtcttgttgtcattgatatgactattatcgttgtacttgtgtcgaaagtgtgtacattgtatggatcatttaggtctttc

SEQ ID NO: 83112 - DNA, 651 bp, Zea Mays
ctgtatccgatcccgaatccatttaaaatacattagggtaggatataagatgagctagtatccatccgtatccgcccattttcacccctaacagtaattgcctcggccttgtacacccaatattacacccggtagagggaagggtccacttggactttgttgctcatgcatggccctaagccattggtgtaacacccggatttaaggaacaaagccaggtgcatctcatacatgcaccaaagaagacaacatatataataacagagtgtatagagataaatgtcacaataacatcagagtatttattacatagcggaagtcttacaaaataaaatataaatatggatcgaactaaaatccatccttggcgccaaaaagtcaactgggagacgtcgacctagatctctcacgaacacatcacaacatcatccatgcgcctcaccatgtggtacttgtccttaacctgtgggggtgtgagacagcaagggtgagctcacacatgttcatcgctcaacaagttgtggggaataatgtgcatgaactcaccaaaggtgggagttcatgtgatgtgtaaagctgatcaacaataagggttaaagatgagcattgcttttaataagttggtcaaattttattagaagttactaaaag

SEQ ID NO: 83113 - DNA, 1391 bp, Zea Mays
caattaattcaagtcattggcccgaaagaacaggaaaagaatagtcgtgatctattacagaaatgaattgtacaagttataagcagcaaaaaataattgaaaccaaagaaatttaatcgactcaaacatggttttgctaatcctttcataatggaaggaaaacaactaacatgccttctggtcagaagtgactgagcctagcctcttccaatccaattgaaccattgggtttaagtattcgcattagaacaagcaatgcatataaatgcaaaacatgatttgtaccatagttaaaagatgaaagctagagggccacttttatattatagtttacttcgttgtcagataaaataccaaaaatcattccaaacaaagaagccaaaaagcaaaggacttaggcctcagagataagtgcagcaatagacaagcaactgctagccttcagatggtacggacaattaattcaagtcattggcccaatagaacagaaaaagaatagtcgtgttgtattacagaaatgaattgcataggttaataagcagcgaaaaataattgaaaccaaagaaatttaatcgagccaatgatggttttgttaatcatttcataatggaaggaaaacaactaacatcccttcaggtcagaagtgactgatcatagcctcttccaatccaattgaaaacatgtttagcacagcagtgaaaagatgaaagctagatggtcacttttatattgtagttttggctttgttgtcagataaagtaccaaaaatcattccaacgaggaagctaaaaggcaaagaacttaggcctcagagataaagtgcagcaataggcaagcaactgctagccttcagatggtacggacaattaattcaagtcattggcccaccagaacaggaaaagaataggcgtgttctattacagaaatgaaatgcaagggttaataagcagcaaaaaataattaaaaccaaagaaaattaattaactcagaaattttatgttaggaaaagatgagacttgttcttttcagaatgggaggaacatgaactaacattccttcaagtcccaagatattaggcctatcctccttgcttccaataaaatccttggttaagtcttcaagttacaaagagtaaacaaacaagaaatagatttatgcaaaataaaacaatgcatatccaacggaaacatgattaacatctccgtcccaagaaatgatagctaaatgctgctcaattttgtattaacataattatagacctaagtttcagtgagtcagaaacaggacacactgaagagtcttacttgatgccaagatcaatgtgctcctggattccgaaaccaaagcaccctgtgtcactgaagttcctccttagcagttcatattccttg

SEQ ID NO: 83114 - DNA, 3079 bp, Zea Mays
gcgacacggtacccagcgcgctcaaggacgacgtagaaatccattccgtagataccggttgaaggatcatacctgaggccaaataggaacgaagccatgattgacaaagcaatctgtatgctaatttacatgaaccaacaataatgaacaggataaattctttattattcatgatggaaatgctattgtatagacatctgcaaacagttttcaaacaaaacatgaaagatatatagaagtatcagataatgatcaccatttcaccagtcaaacaaaacatgaatgatatatatacgtacacgtatcagataatgatcaccatttgaccagtaaaaaatgccgttgttcagaattcaatgtaaatcaacatcaaacagtttccagaaaaacaaagtgtggaccatactgtattgttcaacagcgtgaaatgctgactggaccagaaataatatagtcaaacaagaaaacaactaaattaaaaattaaaggagggaaatgccaaagataactccaggaaagaagctaaaaaacaagtacttaggcctcagagaaaattgcatcagtagaccagctgctgcttggcctcagatggtacggacaattaattcaagtcactggcctagcagaagaggaaaagaatacgggttttcagttacaaaatttaagttggttcataatcagcatgcaaattttgaaaacgagaaatttaccaccaacaacaaacctaaaagcggagtacttaggcctcagatataaagtgcatcagtataccagcaattgctaggcttcagatggtacggacaattaactcaagtcattggcccaacagagcaagaaaagaataggaacagaaatatattatatggactaaatcaactcaaggcttctttagttagtcagtgaaggtgagctctaaacctttcataatgcaaggaaaacaactaacatcccttctgatctaacgtgactgagcctacgtagcatctacgtctttcaatccaattgaaccattgggtttaagtattcgcattagaacaagcaatgcatataaatgcaaaacatgattagtaccgtagttaaaagatgaaagctagagggtcacttttatattatagtttacttcgttatcagataaaataccaaaaatcgttccaaacaaagaagctaaaaagcaaaggacttaggcctcagagataagtgcagcaatagacaagcaactgcttgccttcagatggtacggacaattaattcaagtcattggcccaaaagaacaggaaaagaacagaaatgaattggacaggttataagcagcaaaaaataattgaaaccaaagaaatttaatcgactcaagatggttttgataatcctttcataatggaaggaaaacaactaacatcccttctggtcagaaatgactgagcctagcctcttccaatccaattgaaccattgggttcaattattcgcattagaacaagcaatgcatataaatgcaaaacatgatttgtaccatagttaaaagatgaaagctagagggtcacttttatattatagtttacttcgttatcagaaaaaataccaaaaaatcattccaaacaaagaagctaaaaagcaaaggacttaggcctcagagataagtgcagcaatagacaagcaactgctagccttcagatggtacggacaattaattcaagtcattggcccaaaagaacaggaaaagaatagtcgtgttcaattacagaaatgaattggacagattataagcagcaaaaattaattgaaaccaaagaaatttaatcgactcaaagatggttttgctaatcctttcataatggaaggaaaacaactaacatcccttctggtcagaagtgactgagcgtctgagcctagcctcttccaatccaattgaaccattgagtttaagtattcgctttagaacaagcaatgcatataaatgcaaaacatgatttgtaccatagttaaaagatgaaagctagagggccacttttatattatagtttacttcgttgtcagataaaataccaaaaatcattccaaacaaagaagccaaaaagcaaaggacttaggcctcagagataagtgcagcaatagacaagcaactgctagccttcagatggtacggacaattaattcaagtcattggcccaatagaacagaaaaagaatagtcgtgttgtattacagaaatgaattgcataggttaataagcagcgaaaaataattgaaaccaaagaaatttaatcgagccaatgatggttttgttaatcatttcataatggaaggaaaacaactaacatcccttcaggtcagaagtgactgatcatagcctcttccaatccaattgaaaacatgtttagcacagcagtgaaaagatgaaagctagatggtcacttttatattgtagttttggctttgttgtcagataaagtaccaaaaatcattccaacgaggaagctaaaaggcaaagaacttaggcctcagagataaagtgcagcaataggcaagcaactgctagccttcagatggtacggacaattaattcaagtcattggcccaccagaacaggaaaagaataggcgtgttctattacagaaatgaaatgcaagggttaataagcagcaaaaaataattaaaaccaaagaaaattaattaactcagaaattttatgttaggaaaagatgagacttgttcttttcagaatgggaggaacatgaactaacattccttcaagtcccaagatattaggcctatcctccttgcttccaataaaatccttggttaagtcttcaagttacaaagagtaaacaaacaagaaatagatttatgcaaaataaaacaatgcatatccaacggaaacatgattaacatctccgtcccaagaaatgatagctaaatgctgctcaattttgtattaacataattatagacctaagtttcagtgagtcagaaacaggacacactgaagagtcttacttgatgccaagatcaatgtgctcctggattccgaaaccaaagcaccctgtgtcactgaagttcctccttagcagttcatattccttg

SEQ ID NO: 83115 - DNA, 9016 bp, Zea Mays
ctcgccctcgtcaccacctcccttcccgccatccccagagaagtaacggaggtgcaggagcgtcgtatccgattgggacgaattcggcatcggctccgccgaaggtacgtcatctctcgtgcctcgctccctctcctcctgcgctggtatggtttttgatctagctcgagctcgccgcgccgacgctgtgttgtgtagtttgtcgctggctctaggatttaggaatcgctgccgcgtgcctggtgtatgtctgtttttttttgtgatgctcgtgcaagtgaatttctccctggttcattttttgccttgtttgctatggttctggtcggaccagcagtggggccacgctgggcgaggaagatttggtcgacgtcctggttccgatcgtcgggggaaagcttacaaggaggtggcggaggaaggaggcgtttgcggtgttggactggcagggcgagcagatctgatggctatcgtgaggtccgaaccggaggttgtggattttctgggcgatcgtcgacggcggcgtgctgagggttcatgcggacgtggtgtggcaacacgcccagccacatgcccaactctgccccacgcggacatatctgttgctcatccttgttctgcagttgtatctgttgctcatccttgtttagtaattttttatcctatatatatttctgatgtttgattcctacttaacttaatacctcttatgcattaacatttgcagagatgaacatataatgttcaaggtctttgaagaagagctgaaagattttcctatagatctacagaacgggtcatttgtcatgttacaaactggaatcatgttttctattaactttatcaatgtgaatattataatatgctaatgctaattctttcattaaatggtttgaatttacagatcctaaactggttgtcacattatccaactgatgtgaaaagctatattaagcctggttgtgttattctaactatttaccttcacctccctaattggatgtgggataagcttgatgatgacccagctttgtggacagaaaatcttattagcttgtccaatgatagttctggagaacaggatggttgcatgctagggtacaggactacctaacactgagttgcgatggtccgttcatcttatttggagtaattattcatatattccaggatcagcttcattagtctttctttccttatttttgttaggtagtcttatgtttgcattccctctggcaaccagtatttgtgacaagcataagagaccaccaattgcagttgcttgttcttcgtatataaaattctctgtgaaaggtttcaatatagttcaactaaccagagtatgtatctttttttcacatttaaatgtgtccccgaaactaacttgtattaactaattttgttgtagattactttgtgtgtttggtgaaaaatgtttaattcaagaagacttgcagatgctacatgaagattcaactatgcaacaaggccctcaatgcttaaccttcttttgttcctttccttgtacaagtggaagagaattcatagaggtacatgttccgcgtatttttttatatccattcagttatttactttttaaaaatacaagtttagttttcagcttaagtaaacatgatttggcagtaatatacaagttacaatgtccctgggcgtgctatgctcttgcaaaatattactgctgctaaattgtttcatagtaccaatttcatatgataaatgattagtattttttatcagatttgatgtagtaacatatagcactattttagaattgtattctttctagaacggatggggtacagtttgaacatcctttgatgtagcctctgtttgacaaagtacataattgatggaacttctaattcaattatttgttctttttgtctattaggaagcgtttattcagcattatgagtgatattccttatttcttttagagcattcgcggacaggaaacatgaaagagataggtctgggtactgctaacatgttttatggaccaagatgctggcatgcactcttttggtcattccggaggcactgctaacatatttacatgacactgcctaccagtatatttgaactatcggctacatgttgtagttttgtataaatgtttgtcctttaactaaaactcagaagtaaagatcgatgcatctagctgtgttctgcattctcgaatgactttggagctaaacgcggaaggaagatactgaactacagagtattccccctttgatagcttcttgttctcgcttgagacagccctaccggctctacacacataactttgtggttgttattatattgaacatgctccttacacaatcgagtttagaggagcggatggttaggaagaaatagataactgatatcattttggactactttatgtagtcactccagggcgcccaaaaggcgtcggatgttgtagtcattgcataatatttgttttagctatccataatatttgtttctcgttatcattggtctatatcagttattttggttgtgttgatgagcttctgagagttggtacataaagtaatattttgcatgctctgaagtcttaatcagtgctacaaaaatttaattcttgagaactgtactctatcagtgtggaagaatgatctaggagataaatcttttgtcctatataattcaaatgtttatatatgtgtgttgatacagctaatgtacatattctaaatatttctttgcatcttgatttcagattggggccaacctgccgagaggatgcgagagtattagaactatttctttaattctcatatcaattagattagaaagagtgataagtcaatttaatagaggtccaatgtaaatatcatactatcatagcaaaagttatatgaatacacatatatgatgaataataattgtggatgacactctataaagtgactatttgtttttaaaatagattgatttgtcatattagctcgtggaatggtaaaaggttaccatgcatttccattgtgagtattgttctcatacttggtcaacatcattcttctataactaattgtctttactgagtttaatgttgtcttataccaaatgtacagacttaaatatactgatgactaaattcttggtagaattgatgaaatacatggggaattaatgtaatgacaatattccagaataaatacaaaaaaatattaagcgcatcagtgtttagttggttttcagatatacatatgttatttgtaaatactcgagtttaggataaaaaacaaagattcagaatttttgttctcacttgctattccatcgttttggtatgaattttaatgtgtattcacttcgttacgattacaattactgccttttaggtttgtcgtaacgttaccctggacacgatttatggtaacgtgcggcattgtaatttaagaaattattttttaataatcatattaatacaatttgaacttatgtatgtaacacaaaaaaataagtatatttcgccacacaattgaaaacgaattatttttacaatttacaaggatagtgcacttcgacgttcgtgcctagaaaaaattgagtggtcgttagagatgtatcaaaatatttcttatctagagctcgtatactatatttgtttcataaacttaattttgttgttgtatgactaccacaaagttatagcgatagcttatttttgattattaacacaacatatggctatacatatgttatcgtggtattatatgtttctgttgcaacgcacggacactcacctagtaaacaaatatgtccataaaaaaataggttttcatatgtccagaaatctaaagctttacaggcatacaggatagcccttggataagacacacaacctcttcttttcaacttaggttctaaaaagaaataaaaccaacgaccagaattaccttcacatggtgacaacagcaggttaaaactcttaagggcatgttcggttacaccaatccagagggggattggaggggattaaatcccctcctagtcaatgttcggttacaccaatccagagggggattggtgtaaccgaacaagccctaaagaagcaaacttgtctaatgcatacagctattattgcagttatgtacaggtagagctcaaagatttgctccaaaaaactgtggttcgtgaaaaggcctagctttggtagcactcctcacgtcctaggtctaactcttcgtgggagcgaatttcaagcaggctgctgaagttaaaaaaaatcattgtcatctgtctcacgctaaaatataggtctaaggttgtctgcagccctcgcagtttgccttcccccctcctctcgtgtagcggcatagtagccccctacacggtgcatcacctccctccgtcaatccccctatggccctatcctgaggggagctactctctccccctagttccaggggacgctaccgcccattggtcttccgttcgcgctcctgtagtgaagaagttgaagaccctggcgggccgacgtcgccaccgacgatgcagcgcagcaacctcaagtcgcaaggacccagcggcagtgtggccaatgtcgacgcgcacggatggtcacccacactgcgtccctagaccggtgcggctgcgccagcacccgcgccggcgaggatgaggaggttggagcagcagtcgccgccatggacagggtcgtggatgttaaggcccattaggcccaggcctactgcctatatatataaccaatagtccttagggactgatcatcagttgttaatcccaaggttagtaacatggtaacagagcaagttacgattaggatttctctaaatttctagccatcgtcgcggccttcccacctggttgtcgtctcggttgccgtcaccgccctctatccgccggtgtcgtggcccttctcggccgccatccgcgccgtttgcctcgtccgctccgtcacggctatctcctgcgttgtcacgccaccacctcgtccgcgcccacatcctcgcgcagcccaggatccgcgtgccacccgcgccggccaggattctcccgcgtctgtccacctccagctcgcgccggccagatctgctgggatatgttcgatctgctgggagttcacacggttccgtcaaggctgcagccggcgtatccactgttcatccgccaagtattttggtaccatcaagccagtctttttcagatctgttattcttcagtgttttcatgctcttcaatatgtcgaccaacgctattgttgtcaatattgtgtttgatgggcagaattacccagagtgggctttttgtgttcagattgcattaagaggtcatggtttactattccatttgactgaagattcaccgattttagcagctgatagaagcaatgctgctgcaaccaagacttggcaaatcaatgatggcaaggtaatggctgcaatggtcaatagcactaaaccaactatgattatgagcctgtccaaattcaccactgctaaggctatttggtctcatctgaaggaccggtttgttcaggacagtggtgctcttttacatacccttatgcagtagactcatatcattgagcaacatgatatgtccattgatgaatactattcagcttctgatcgtcttatgagtgcattgacctctatggtgcctgcttgtacagttgtgccttgcctagcccatcagttcattgagaagttctttacctacagatttgttatgggaatttgacctgaatttgattctcttcgtgcaaggttgcttcatagttctgatactctcaccatagaggtttagatcctaatcctaaccttcgacaactttcgcatcgggcgatcccaaggaaagagattttcgctggggcaacgccaccgtttacgtgttgaatcctattgatcttttgccctcctcattgctagaataaattcttcctaggtcaagcaccccgatggtcgggtaagctcaaggatgacgcatgcacatagacatacggaggggatgcacgtccaaagtgagggatgacacaccccctgagaaatatcatgtaacaaacgggattttgcccctcaactatataaaaggacgagagccgaactatagaggcaggctaacttagattgtaacacttctcacacaagcacgagagccaagtgttcagccttgtaacacatgaaagccaacaacaaagagttcagcactatactgaacgtagttctctccgaaccagtaaaaactctcttccttatgctcatccagagcaaagccatcgaaacagtgacgcgctgacccacacctaatctacaaatctacttgttgtgggatcgaaatcacgataggttcgtactttcatccacaacgtgttatcgagcctggctaccccaacgcacgcttcatccttggcagcttgactacatgaactctctcagttgtgtccccgtcttcgacggccctgactacgtcgacctcgccatcgccctcttccacgacaacttcctgaacgcatttccatcaaccccacgacgcatcattgtgcctataccttgacattagttgactcaactgctacattgatcacaactatatccaagacaacatcctcgaccatggttccttcaccctcacgcttggcaacctagacatcgacacaaagggctacaacgtgcataagaacccattgcccattggctactttcatagccaaaacatatgcaattcattgaccgttattagggctggaaacgagccgagctcgactcggtcgcattacaagctcaaaaatgtggctcggatcgggctcgttcaggctcgcgagctgccacactaagtctcatttaaagtataaattgtatattttcattatatataaaataaaaaacatgtaccaaaaatctagtaacttattttaaactatatctagcattgagtccataaaaaataagaaaataaatcaataacataaagatgtaatagtgaaacgacataacatcatgtcattaggttggctcgtgagccgactcaggctcgctgcttgagcgagccacaaaagtaggctcgtctcgagctcgttcaggctcacgagccgagccgaatctgagcgagcccgagccatctcgcgagcctcgagcttttttccagctctaaccgttatgactgtagggtgatgttagcttgttacctagtctcattgtcactttgtgactgcagggcgatgttagagtaagtaggattagtaccatattgtctatccactggggtgttagttctatgtaccatatatcagcccatcagagccaatgcaatacaaagaatattccaccaattatattcttcttacatagatatatgtgatagtagattcatatcccaattactgtcacctagtgaacctagtaatgctgaaccaagagatagacatacctgtttcaaataatcatccatgaacatgattgcatgatcatcttgcccagaactaagtttgaatatccgtaacactttgtctttcttaaatgactgcaaaacaagaagcattccatttttcagtgccatggtgataacgaagaaaacacagtatcttcacaagtttagtttcttttttgtcattatattgaatctatgaatgtgataagcaataaaaactaacatgttaatatggtaattctacaaaccaatgcaataacaaagacaaaaaacatatcgtatataaacaacaataacataagtttaaacaaaacctccaagtctctgtcaacttgtgttctatccttcacactgctatacaattgtgactgcaaaatgaatggctgcgccaaaacctgcaagtgatgccaaaataggatatggtttacccaatgccagaaacagaacacaatgaaataatgaaacaagtagcacgtgattaacatagttcacaacagattttatgatgacatttccacagattcatagtgcaccctcctgttatttgtgtgtgaccaatttttggaatatttgtctcacaagtaaagagttcttattacattttgtctatgcatcaatgattctagagttgtgagttaagattaaggagctgaggagtttcatataatataacagggtaagaacaagctaaacacaataaacagtacagtcaaagtctcagacacagtaaggtgcattaggggcattgcccttcaaactgcaaaaggtaaggtgcagtgtcctgttcaagatacacacttttagcaggaatagacggagtgatatgcaagtaatttgcttctgaatcaatctacctaaagagatcaagatagaaaaaatggtgaaatttttgtttcaggatagagaatttgagaccacacagtagattaagctgtttataaaacatgatatggctaaaccgctggctgcagaatgtattaagccctctgctggctgcacagcgtgactacagtttacgtactctcgccatcagcggtcagccctgattgcacagctgcttcctgcttaacttcagtgtggtgctgtttctgtggctcatgcagtgaaccagcatgccattgactacacataggaagcatggatttcaccttcctgctctctaccatgcaagcactctgtcgccaaaatcccatggtgctctcactgatccagattggaggtctgccatgaaggaaggacgtgatgctctctttgataaacacacctggaatcttgttttgtgcccccacgccccccaccccctaggccaataggccaatactaccattggcaagtcagtctttcccacaagttcactgctgatggtatgttatggttgctagatggtgagggattcgagggggaattggatggttggagctgttggtgggggtggtacagtattgttcatgcgttggagctgttggtcgcggttactgtccacagggcgccagtcaagagcctctacccacagccgagcaagaggggggattttcccttctaattcttgcttaatccaaatgatgtgccagttgcccccttaaat

SEQ ID NO: 83116 - DNA, 1495 bp, Zea Mays
cgtggtttcatcaactcgcaggacagcaaaaacccaggcaatggggaattcgccactgagaatcgagcgaagccatggattatggtgaagaccgccgtcgttgggatcacttcacatcggcgctcgagaactagctagtggtcgaggaagactgctagggcactaggaacctgggcgtggcttcctcaggcgcggtggtggattggtgcgctggaatttctcgtcgactatcgtactccgcatggagccgctttcctccataggccacacttggacacctttacctctgcagtgaggtcgcgagaatctgaagatcatccttgtacctgagaatctcaagtctaaggcaagttgtgcccttggtcacttttctttacccaataatgttccggttaatcaatgtgacatgcacaggttaatctaatgggacctaataggtttccctagacttgtttatcccacaccttgtatgccactgaacttttgggtagttttgctattgctctacctggttttgggattaatattacattatgatcatgttccaattatagtgttttttaattattgttcatgacaagatcattgtgttaattggaacatggagcttaacttgagaaacacgtgctaccacaagggtggaatgggacacccttggctgactaattaggaaagctagtggaggactaccttacccgaaaggggcaagggcactaggggagttacatatagggaggttctcaggtcgatcatgctgcgatggcttttcggacgagggattccaataccctttctagaaactgtagcgggtttcctaaagctagtggaactttgtaaaggcctcgtagtggatccctagccattcacctcgaaagtgtctaagggtctagctaaccctagctagatgggatacacgacttgtggggtaaagggtgcaacctctgcagtgtaaaactggtatattagccgtgctcgcggtcatgagcagctcaggactctcgcataattaatttatggaactaaatttaatctatcatatgcattgcatcgcgagtgttgttatcaatttgatctcatactttttggtttggtatctacttagtaactgctaatacaattttgaccaactttaaaagcaatgttcagctgtaaccatctcctttggtaagccttacacttcacatgagctcctacctttggtgagttcatgctcattattccccacaacttgttgagcgatgaacgtatgtgagctcacctttgctgtactcacatccccaggtccaagaacaggtaccacaagatgaggcgcatgaaggatgccgtgacgagttcgtgagtggtctaggccatcgtctcctagtcaactttggttgctggatcgatgtctgcgtatgatgtaattatttatttaatttgtacagaactcctattgtatagtaaatatgtggcattcatttctataccatgagtaatcatatgtgtgagatttgat

SEQ ID NO: 83117 - DNA, 560 bp, Zea Mays
cgtggtttcatcaactcgcaggacagcaaaaacccaggcaatggggaattcgccactgagaatcgagcgaagccatggattatggtgaagaccgccgtcgttgggatcacttcacatcggcgctcgagaactagctagtggtcgaggaagactgctagggcactaggaacctgggcgtggcttcctcaggcgcggtggtggattggtgcgctggaatttctcgtcgactatcgtactccgcatggagccgctttcctccataggccacacttggacacctttacctctgcagtgaggtcgcgagaatctgaagatcatccttgtacctgagaatctcaagtctaaggtccaagaacaggtaccacaagatgaggcgcatgaaggatgccgtgacgagttcgtgagtggtctaggccatcgtctcctagtcaactttggttgctggatcgatgtctgcgtatgatgtaattatttatttaatttgtacagaactcctattgtatagtaaatatgtggcattcatttctataccatgagtaatcatatgtgtgagatttgat

SEQ ID NO: 83118 - DNA, 1010 bp, Zea Mays
cgaccctccactcatttgttcacattctaaattttatatatttttatagttcctgaatttgatcgctcataaatatcttgtctaaaatctgttacttttttatgcattacacttatagtgaaaatatcaactgccacttggggcatgcctcataaataactgaagttgacctcatgttctgtgcaatattgttttcttcacttggtataagctctatggacacccatggaactgaacttttttggagtccaacttggccacatcatatatttaattattattgactatctgatgttcttttagggcaaccattggaaaatagatcacactgtattattttgaatcacataaatttagtttcatttgtcgattgggatagaaccctttttctactgcaaagaacatgcataattcacatgtttttctttactcaaatcataatctaataattattttaaagcttcacatttatgagttgatgtgattgttgacaaattaacctcattcgtcattactatgagtaggaccacttgatgattcttcgctttcattttcattccttctatttgtgttataagccatgcaggagcacttcacattcattaaggcaggagcgctgcccattcattaagagtttgatgacttgaaagattctgcattgtgggactagcaaaaatgacctgctcaacttcacaatagctggtaggctccttgcgcagagtgcggcactctatgggttatatagtgcagggcacatctctaacagcagttatgaactgatggagagacttcttaaggttttcatatatcatgatggagaacaaacctattttccattccccagagttgaaaggttctatgtgtctcagggatcgtttatgaaattggagacaaaccagaattttgttgtgatcaaattgttagtgctcgtgcatgtgctgattgaaactgaaacaactgttggcggtgatgatatgatgttaagatttaccctagagacagcttgttaa

SEQ ID NO: 83119 - DNA, 1149 bp, Zea Mays
cgaccctccactcatttgttcacattctaaattttatatatttttatagttcctgaatttgatcgctcataaatatcttgtctaaaatctgttacttttttatgcattacacttatagtgaaaatatcaactgccacttggggcatgcctcataaataactgaagttgacctcatgttctgtgcaatattgttttcttcacttggtataagctctatggacacccatggaactgaacttttttggagtccaacttggccacatcatatatttaattattattgactatctgatgttcttttagggcaaccattggaaaatagatcacactgtattattttgaatcacataaatttagtttcatttgtcgattgggatagaaccctttttctactgcaaagaacatgcataattcacatgtttttctttactcaaatcataatctaataattattttaaagcttcacatttatgagttgatgtgattgttgacaaattaacctcattcgtcattactatgagtaggaccacttgatgattcttcgctttcattttcattccttctatttgtgttataagccatgcaggagcacttcacattcattaaggcaggagcgctgcccattcattaagagtttgatgacttgaaagattctgcattgtgggactagcaaaaatgacctgctcaacttcacaatagctggtaggctccttgcgcagagtgcggcactctatgggttatatagtgcagggcacatctctaacaggggacttacacaacaaaattgcatgatgaattgaattgcacgatgaattgcggaagaacactattaaagctctctgcaatgcagatctctctatttgaatttttatccgtggagaagatgtttcccttccggaaacatttcttagatcaccaagaagacctctaagagatattggaggaagacagttgcacagaggactatcctgatcttctttgcagggcagatgcgtggtcgagtttgacctgtacttctcaagtattagggagacaaggatgctcatatgagaatgtataagtaggctgccacactgtactatattatataataccataaagcgtgtaaaagaaagatgatagttactataaataattgatgagtgattg

SEQ ID NO: 83120 - DNA, 973 bp, Zea Mays
ctctttaataattttgttcaacttactacggtattcaaatttactatagcaactatagtctaaaactactcaaattgatcacaaaacacctccaaactgagtacccaacacagcaatttcaggtttcagttctgaataaaaattcagtccaactaacctcacagtccaagttttcggtgggtgcatgaaactgctcgaggaagacatatgttggctggtcgacgaagaaactaaacacaacaacgatttgcggtggcgcgactacggtctggccacagtgaagtggggttttggtggatctggtcattaaactgggtgccgacatgcaagagctctaggacagatcgagcttggtggttgagaggggagctctccagacctgagcaacagaacctctgcactcacatgatgagcacagactcgagcttgggggtgggggaaccttcactggaccatgccctaaagccatccgatgagaagacaggggtatagttttctgaacttgtccagcacatggtggagaggaatttaccagatgccagcactgcatggctgtcacacgtgtccaaccagcatatacaccacactagctcataatttagcacaaatatcccctttgtccatgactgaaaacattaaacaattggacagagaccctcctgctcgcagctcacaaacagccaagactggatatttcttagtagaaagtgggacctctagcacctatgcattacaccccatcttcattcaaatacacaggcaagtgcatcttcttcagttaccaattgcagccctgaactcgagtataatgaagcctgctgctccattccacttctcactgtttaagtccttgcatctcacaattctacatgataacagaccagtcctttttaaccaaagttactccctagatgtagccctactactttggtacataaatccatggttgaaaacatatagaactaaaattgtg

SEQ ID NO: 83121 - DNA, 3233 bp, Zea Mays
cataagtagccacagctgcaggctagctcattcgagaagcagcacagctgaaccaattttcatttccttggcaagctaataaagagttcatcgtcgatcagtcccgctgcatggtttcctctccgcaagcaaataaatttcctctccgcaagcaaatttcctcgccctcctcttcgtgcatgactcctcatgtgctattagtcctagtgattctcctgtacctcgtcagaaccctcaggccgtggcggagccggaggaacagcacatgctgcaccccttcgctcccgccggggcctgtgccatggcccgtcgttggcaacctgccggagatgatgctgagcgacaagccggcgttccactggatccaccatatcatgaaggaggcgggaaccgacatcgcctgcatcaaactgggcggtgtccacgtcatccccatcagctgccccaagatcgcgctcgaggtgctaagcaaccaggatgccaacttcgcttctcgcccgctcaccttcgcctccaagaccttcagcacaggctacagggacgctgcaatgtcccactgcggcgaccactggaagaagatgggccgcgtgctggcctccgagatcgtctgcccctcccgtcacaggtggctccacgacaagcgtgccgacgaggcagacaacctcacccggtacgtctacaacctcgcgacgaaggcggggtcgtccggcgccgttgacgttaggcatattgcgcgccactactgcgggaatgtcgtccgccgcctcatgttcaacacgcgctactttggcaagccacagcctgacagtgggcctggtccactggaggtacagcatgtggacgccgtctttacctccctcggccttctctactccttctgtgtctccgactatctcccgtggctgctgggcctcgacctagacggccacgagaagatggtcaaggaggccaatgagagggtgaccaggctgcacgacgcggtcatcgacgagcggtggaggctgtggaagagcggcgagaggcgggagctcgaggacttcctagacgtgctcatcatgctcaaggacgccgaggccggcagaccggtgctcagcatcgaggaggtcaaagctctgctaatggatatcacgttcgcgtccatggacaacccgtcgaatgcagtggagtgggctctggccgagatggtgaacaacccgacgatgcttaagaaggcagtggacgagatcgacagcgtcgttggccaggaacggctagtgcaggagcacgacatcccacggctaaactacaccaaggcctgcatccgcgaggcgttccgcctgcaccctgtagcgcctttcaacgtcccccacgtcgctgtcgcggacgccaccgttgccggctaccgcatccccaagggcagccacgtcatcctcagtcgcactggcctcggacgcaaccctgatgtatgggacgaccctcttcgcttcgaccccgaacgccacatccctttgagccccgagatggaggtctcactcgttgagcgtgatctacggtttatctccttcagcactggtcgtcgcggctgcatcgctgcagctcttggcactgatatgaccatcatgctcttcgctaggctcctgcaggggttctcttggagcaagatgaccggggtggcggccatcgaccttagcgagtccaggcacaacactttcatggcacggccactcgtgctacaggctaagccacggcttccagcgcacctctaccccgggatcttgctttgtaagtagtcccaaataacggctgagcatgtagaaaatttcaccacttatacatgcttaaaatcgaggaatgagagaaagcgcgagaggaatagaaaaatagatgtgtactgctggttttctgaacggttatatttaagatgtaatgaatactattcatcgcctgaaaaaaaatctgtaaatcaggcatctgaaaaatagcagctcaaaaatttctctacccattattattttttcaatctgacttgctggaggttgccatacccaacactaagagcaactccaagtgaatagctaaaaatagccaaatttactgatttagctactctataaaatagatttaaaaaagtaggttagcccgacaaaaactctataaactaacagattgaatagcgagtgaaaaaagactatccaaaaatagagagcggagatatggatgaatggaaatctactaaatttgaagagccatttacaaagtctattggagacgtttttattctaatagtagctaaatttagctttataaaattatctaactagtccatagagttgctctaaggcattagattctatgtttatcatctatatcaaatgtattgcaaaattacggtatttgaggaaggtcaacacacccaaacattgtacctaagaattatgcttaaaatcactccatcactaatttatactcctaacaatcactaatactctctctgttctaaaatataatttattttagactaaacatacattcattaattaagctgtgatgtagaatgtgaacaaaaaaagaaggctagaaagagttatattttgggatggagagagtataaagcaaaacaaattattggcgtcaatcactaacggcatgtactggcgatggtgctctctggtggcgcagacgatccgaggccctgcggcaggagcgagtcttccctgcattgagtcggacggtccgcgcgtgcgcaggggtagcatcgatcaccaacagcacctggatctcgccccccgggacggaccccattagggaggagagattctagggttgtctggggtgtgcaggccactcaagacgcctccagacgacatagagtcgaagagaggtgaagatggagatggagaaggctacgttattgctactcctaggtcaaaaagtaaagggatgaaagatagattgatttggttcaatttttggtgcgtgcaatcgaccgtaccccttcatatataggggaagctttgaacccgttactaggcgttccccaatagaatccgtggttttagatggataaacacgtacaaaaagggattaaaccgcatggtatggtctaatcgcataccgtccacgtcatgtgtagaccgtccgtagcccagattgtctagtctcactaggtggcacatatggtcctcaacacatgcccccatgccttttgggaaagctgagcgaaccaaaagcacctagtacaaggcattagcaac

SEQ ID NO: 83122 - DNA, 1641 bp, Zea Mays
ccacacagcagcacagatcgctccttccagtgtcccagccagtcctccggaatgcagtccttgcttgcaggaatccccgcgggcggtgccgcggcggcggcagccgtcggtgggctggtcgcggccgccgcgcttgccgagagggccgaccagaagaaccgcctcaacttgcccccagctgttcctggtttacctatcattgggaaccttcatcagctgaaagaaaaaaagcctcatcagacatttgcaagatggtctgaagaatatgggccaatatacagtataagaactggtgcttcttctgtggtggttgtcaattctgcagaagttgccaaagaggctatggttgcaaaatattcatccataaatactcggaagctacctaaggcactttcagtgctcacacgagacaaaaagatcgttgctatgagcgaccagggtgagctttacaaaatggtgaagcgctatattatggtgagcatgttgggtgctgctgcccagaaacagtttcgtgacacaaggaacacgatgattgacaacatgttgagcacttttcacgcattggtggccgatgacccaaaggctcctctcaacttccgggatgtattccagaatgagctattcggcctatccatgactcaggctttaagcgaggacgtaagttccgtctatgtagaagagtttgggaaggctttatcgagggaggaaatctaccagactgctgtggctgacatgatgatgtgtgcaatcgaggtcgactggagggatttcttcccatacctgggctggatcccaaacaggagctttgaaacaagagtattgactacggaagccaggagaactgcacttatgcaagccctgatcaatcagcaaaaggaaaggatcgcacgtggagaggatgtcgtacgtggacttcctgctggctgagaatacactgacggatgaacaattgctaatgctggtgtgggaagcagtcatagaagctgctgatactaccttggtcaccaccgagtgggccatgtatgagattgcgaagcacccagaaaaacaggaatacctttatcaagaaatccgaaaagtctgcggcaacaagacagtcaccgaggatcacctgccagagttaccgtacttgaacgcggtgttccatgagaccctaaggcggcactctccagttccgctggtgcctccaagacttgtccatgagagtaccaacttggctggctacgaagttccagccgggacacagagcgactgggacgcgcccgaggaatggaggccagagaggtttctggacgggagcttcgaagtcgcagatatgtacaagaccatggcattcggcggaggaaggagggcctgtgcgggaagcatccaggcagtgaacatcgcgtgcacagccatcgcgaggttcgtgcaagagtttgcgtggacgctcaaggaaggcgacgaggacaaggacgacaccatccagcttacaaccaacaggctttacccgttgcatgtgtacctcacacctagaggaaggaaatgagcatcacatttatttggtctctggtctgtgagcatatgatcgaataacaatttattttaaatgaaagcagatccggtcgtctcggcgtacatgtcgcgtttaatattaacaca

SEQ ID NO: 83123 - DNA, 1563 bp, Zea Mays
ttctgcgcgttcaagaaaaaaatagtttggccaggcttgaggcaatgattgcaaaattctcatcaatatctactcgaaagctatcgaaggcattgtcagcgctcacccgtgacaaaactatggttgctacaagtgactatggtgacttccacaaaatgattaagcgttatatcatgacattcatgttgggtacttctggccagaaacaatttagggacacaagaaacatgatggttgacaacatgttgaacactttccatacattgttgatggatgatccaaattctcctctgaacttccgggaagttttcaagaatgaattatttcgcttatccctggttcaggctttaggcgaggatgtgagttcaatctatgtggaagagtatggaaaggttatatcaaaggaggaaatctacaaggccactgtggttgacatgatgatgtgtgcaattgaggtcgactggagggatttcttcccgtacctcagctggattccaaataggaccttcgaaacaagagtactgactaccgaagcgaggagaactaccgtgatgcaagccttgatcaagcagcaaaaggaaagaattgcacgtggggagactaggatatcctacctggacttcctgctggcagagaatacactgactgatgaacaattactaatgctggtgtgggaagcagtcatagaagctgctgatactactttggtcacgaccgagtgggctatgtatgagattgcgaagcacccagaaaaacaggaatacctttatcaagaaatccaaaaagtctgcggcaataagacagttaccgaggatcacctgccagagttaccgtacttgaacgcggtgttccatgagaccatgaggcggcattctccagttccattagtgcctccaagattggtccatgagaataccaacttggctggctatgaggttccagccggcacagagataatcatcaatctgtacgggtgcaacatgaacaaaaacgactgggccgagcctgaggaatggaagccagagaggtttctggacgggaggtttgaagcagtggatatgcacaagaccatggcctttggcgcaggaaggagggcctgtgctggcagcatgcaggcgatgaacatctcgtgcaccgccatcggcaggtttgtgcaagagtttgcctggaggctcgaggaaggcgacgaggacaaggttgacaccatccagcttacaaccaacaggctttacccactgcatgtgtacctcgcacctagaggaaggaaatgagcctctactgtaaacgggtttcactgtactaatttaaaaaaataatttgctgttgcctgtgtatgacttttggatgatctctatgctgtgaagttgttggtctgaaattgggttaacaatacgaagtgcatatcatacaggacatgaacaccaacttgcagcatctactactgatactgactaccatataggcaggggcggatccaaggggtgggcaaggtgggccatggcctcacctcaatttttttaaccccttatacctaggtttaggtacacaccaaaataaaacaaa

SEQ ID NO: 83124 - DNA, 1910 bp, Zea Mays
cgcgccgcgctgtccctcatctccagtctccctctccactctgcggcccggtcgatccccattccgatccatcgcacgggcagcgcccagtccggttcactcatggagtctctagtggctgcgctccccgcgggcggcgctgcggcggcggcggccttcggtgggctggtggccgctgccgcgctcgccggaaaggtcggccttgtcgggtccaagaaacacctcaacgcgcccccagctgtctctggtttacccctgattgggaatcttcatcagttgaaagagaagaaacctcaccagacctttacaaagtgggcagaaatttatgggccaatttacactataaggaccggttcttctactgtagttgtgctcaattcagcccaagtagccaaggaggcaatgattgcaaaattctcatcaatatctactcgaaagctatcgaaggcattgtcagcgctcacccgtgacaaaactatggttgctacaagtgactatggtgacttccacaaaatgattaagcgttatatcatgacattcatgttgggtacttctggccagggacacaagaaacatgatggttgacaacatgttgaacactttccatacattgttgatggatgatccaaattctcctctgaacttccgggaagttttcaagaatgaattatttcgcttatccctggttcaggctttaggcgaggatgtgagttcaatctatgtggaagagtatggaaaggttatatcaaaggaggaaatctacaaggccactgtggttgacatgatgatgtgtgcaattgaggtcgactggagggatttcttcccgtacctcagctggattccaaataggaccttcgaaacaagagtactgactaccgaagcgaggagaactaccgtgatgcaagccttgatcaagcagcaaaaggaaagaattgcacgtggggagactaggatatcctacctggacttcctgctggcagagaatacactgactgatgaacaattactaatgctggtgtgggaagcagtcatagaagctgctgatactactttggtcacgaccgagtgggctatgtatgagattgcgaagcacccagaaaaacaggaatacctttatcaagaaatccaaaaagtctgcggcaataagacagttaccgaggatcacctgccagagttaccgtacttgaacgcggtgttccatgagaccatgaggcggcattctccagttccattagtgcctccaagattggtccatgagaataccaacttggctggctatgaggttccagccggcacagagataatcatcaatctgtacgggtgcaacatgaacaaaaacgactgggccgagcctgaggaatggaagccagagaggtttctggacgggaggtttgaagcagtggatatgcacaagaccatggcctttggcgcaggaaggagggcctgtgctggcagcatgcaggcgatgaacatctcgtgcaccgccatcggcaggtttgtgcaagagtttgcctggaggctcgaggaaggcgacgaggacaaggttgacaccatccagcttacaaccaacaggctttacccactgcatgtgtacctcgcacctagaggaaggaaatgagcctctactgtaaacgggtttcactgtactaatttaaaaaaataatttgctgttgcctgtgtatgacttttggatgatctctatgctgtgaagttgttggtctgaaattgggttaacaatacgaagtgcatatcatacaggacatgaacaccaacttgcagcatctactactgatactgactaccatataggcaggggcggatccaaggggtgggcaaggtgggccatggcctcacctcaatttttttaaccccttatacctaggtttaggtacacaccaaaataaaacaaa

SEQ ID NO: 83125 - DNA, 1405 bp, Zea Mays
cgccgaatcctctcccggcaccgcaaccgctgttcctctgcgcggaacgcgcgcgcgccacagccgatcagccaccgcaggattcctcgtccaccgcgaccattcggcttctccccaatcccggcacggcggcacgggacctctccctctctctcccgctggcgggcgatggcctcctcctcctcctcacctgcgcccgccctggccggggaggcgctacgccagaaacgcatcctctccagcaagctctacctcgaggtcccgtcctccaaggcgccggtggtttactcgccggcatacgacatctccttcctcggccttgagaagctgcacccgtttgaatccgccaaatggggccgcatctgtaggtacctcaccagggaagggtacctcgacaagaaacagatggtggagccattggaagcctgcaaggaggatttgctagtggtgcacacggaggcgtatttgaacagtctcaaatgcagcttcagagtttcctccattgtagaggtccctcctgtgtcgcttgtccctaattggattgtgcacagaaagctactacaccccttccggaagcagcagatgaagggggtggattttgtgcatacgctgacatctctctctgcatccagtttgcttttgtccgtctaaatatctcaagtgtattgatcatagacctggatgcccaccaaggaaatggacacgaaaaagattttgctaatgatggaagggtttacattttagacatgtacaatgctggaatttatccctttgatttcactgctaagcaatacattgatcaaaaagttgaattagttagtgggtcaaaaacagatgaatacttggagcaacttgacaaagctctcgagatctgcaatagtagatttgagccccagttgattgtatacaatgctggaacagacatcctcgatggcgatccgttgggcagattgaaggtaagtcctgagggtgtggttaccagagacgagaaggtatttaggttcgcaaaagatcgaaacattcctttgctcatgctgacatcaggaggctacatgaagtcaagtgctcgagtaatagctgattcgatcatcaatctgtccaataaaaacttgataggattaggcagccagctgggttgagcaagaacttgtgacagtatgcttcttatcgggaagcaatatctcgtaagagcttattcgattaggagtggattaaagaggattaaattccttgatggtcaaaattgaatagaaagatatctaatcctactcaatccacatgcaatcgaacaaggtttaaaggtgtagtttttttttttttgtgaaggataacatgtatgccacaaaaatgttctgtacataacacgggatgtttgtgaatctatacaacacaaaaacaaaaacaa

SEQ ID NO: 83126 - DNA, 1954 bp, Zea Mays
cgccgaatcctctcccggcaccgcaaccgctgttcctctgcgcggaacgcgcgcgcgccacagccgatcagccaccgcaggattcctcgtccaccgcgaccattcggcttctccccaatcccggcacggcggcacgggacctctccctctctctcccgctggcgggcgatggcctcctcctcctcctcacctgcgcccgccctggccggggaggcgctacgccagaaacgcatcctctccagcaagctctacctcgaggtcccgtcctccaaggcgccggtggtttactcgccggcatacgacatctccttcctcggccttgagaagctgcacccgtttgaatccgccaaatggggccgcatctgtaggtacctcaccagggaagggtacctcgacaagaaacagatggtggagccattggaagcctgcaaggaggatttgctagtggtgcacacggaggcgtatttgaacagtctcaaatgcagcttcagagtttcctccattgtagaggtccctcctgtgtcgcttgtccctaattggattgtgcacagaaagctactacaccccttccggaagcagatgaagggggtggattttgtgcatacgctgacatctctctctgcatccagtttgcttttgtccgtctaaatatctcaagtgtattgatcatagacctggatgcccaccaaggaaatggacacgaaaaagattttgctaatgatggaagggtttacattttagacatgtacaatgctggaatttatccctttgtaagagtctacatcatcaccctcactccttagatatatgtagtatatgaagctatttttcttttgtgatctgttgctcttatatattgtcattatgaaatgcatattgatggagatattacttatgcggaactttcttatctcacttcttgaacaagttttattgttaaaccctaaatgtacaatcatctttttgaacaagctcttttgtgcagcatttagatgatgtaattgttcacagatcgaaattgaaaaacagcagtttttgtctcgaacgaagtaggagagatacgtgttatttcatatagaagagaaaaaaatagtacaaggagagatcaaaagacctctccaagagaaaaacagcagttccatccaactgttatactgcaatgaattccgacggtatcatgctatcagttttgtaacagtccacgttaatatgatgtagacaccaaaataaaggacgagttttgtatttatggtttcagtttcattggtaccagatatattcctgattcttgttctttgtaaacttacattggtttgtttcaggatttcactgctaagcaatacattgatcaaaaagttgaattagttagtgggtcaaaaacagatgaatacttggagcaacttgacaaagctctcgagatctgcaatagtagatttgagccccagttgattgtatacaatgctggaacagacatcctcgatggcgatccgttgggcagattgaaggtaagtcctgagggtgtggttaccagagacgagaaggtatttaggttcgcaaaagatcgaaacattcctttgctcatgctgacatcaggaggctacatgaagtcaagtgctcgagtaatagctgattcgatcatcaatctgtccaataaaaacttgataggattaggcagccagctgggttgagcaagaacttgtgacagtatgcttcttatcgggaagcaatatctcgtaagagcttattcgattaggagtggattaaagaggattaaattccttgatggtcaaaattgaatagaaagatatctaatcctactcaatccacatgcaatcgaacaaggtttaaaggtgtagtttttttttttttgtgaaggataacatgtatgccacaaaaatgttctgtacataacacgggatgtttgtgaatctatacaacacaaaaacaaaaacaa

SEQ ID NO: 83127 - DNA, 1355 bp, Zea Mays
cgccgaatcctctcccggcaccgcaaccgctgttcctctgcgcggaacgcgcgcgcgccacagccgatcagccaccgcaggattcctcgtccaccgcgaccattcggcttctccccaatcccggcacggcggcacgggacctctccctctctctcccgctggcgggcgatggcctcctcctcctcctcacctgcgcccgccctggccggggaggcgctacgccagaaacgcatcctctccagcaagctctacctcgaggtcccgtcctccaaggcgccggtggtttactcgccggcatacgacatctccttcctcggccttgagaagctgcacccgtttgaatccgccaaatggggccgcatctgtaggtacctcaccagggaagggtacctcgacaagaaacagatggtggagccattggaagcctgcaaggaggatttgctagtggtgcacacggaggcgtatttgaacagtctcaaatgcagcttcagagtttcctccattgtagaggtccctcctgtgtcgcttgtccctaattggattgtgcacagaaagctactacaccccttccggaagcagatgaagggggtggattttgtgcatacgctgacatctctctctgcatccagtttgcttttgtccgtctaaatatctcaagtgtattgatcatagacctggatgcccaccaaggaaatggacacgaaaaagattttgctaatgatggatttcactgctaagcaatacattgatcaaaaagttgaattagttagtgggtcaaaaacagatgaatacttggagcaacttgacaaagctctcgagatctgcaatagtagatttgagccccagttgattgtatacaatgctggaacagacatcctcgatggcgatccgttgggcagattgaaggtaagtcctgagggtgtggttaccagagacgagaaggtatttaggttcgcaaaagatcgaaacattcctttgctcatgctgacatcaggaggctacatgaagtcaagtgctcgagtaatagctgattcgatcatcaatctgtccaataaaaacttgataggattaggcagccagctgggttgagcaagaacttgtgacagtatgcttcttatcgggaagcaatatctcgtaagagcttattcgattaggagtggattaaagaggattaaattccttgatggtcaaaattgaatagaaagatatctaatcctactcaatccacatgcaatcgaacaaggtttaaaggtgtagtttttttttttttgtgaaggataacatgtatgccacaaaaatgttctgtacataacacgggatgtttgtgaatctatacaacacaaaaacaaaaacaa

SEQ ID NO: 83128 - DNA, 1869 bp, Zea Mays
cgccgaatcctctcccggcaccgcaaccgctgttcctctgcgcggaacgcgcgcgcgccacagccgatcagccaccgcaggattcctcgtccaccgcgaccattcggcttctccccaatcccggcacggcggcacgggacctctccctctctctcccgctggcgggcgatggcctcctcctcctcctcacctgcgcccgccctggccggggaggcgctacgccagaaacgcatcctctccagcaagctctacctcgaggtcccgtcctccaaggcgccggtggtttactcgccggcatacgacatctccttcctcggccttgagaagctgcacccgtttgaatccgccaaatggggccgcatctgtaggtacctcaccagggaagggtacctcgacaagaaacagatggtggagccattggaagcctgcaaggaggatttgctagtggtgcacacggaggcgtatttgaacagtctcaaatgcagcttcagagtttcctccattgtagaggtccctcctgtgtcgcttgtccctaattggattgtgcacagaaagctactacaccccttccggaagcaggtgggtgggtccattttatcagccaaacttgcatttgagagaggttgggctattaatgttggtggaggatttcaccattgttcagcagatgaagggggtggattttgtgcatacgctgacatctctctctgcatccagtttgcttttgtccgtctaaatatctcaagtgtattgatcatagacctggatgcccaccaaggaaatggacacgaaaaagattttgctaatgatggaagggtttacattttagacatgtacaatgctggaatttatccctttgatttcactgctaagcaatacattgatcaaaaagttgaattagttagtgggtcaaaaacagatgaatacttggagcaacttgacaaagctctcgaggtacatttacatacctgcagaattttctgtgaaaataaatatttacactgggtactaggttaatgttttgaaatgtcatcttttgcatgatatttatccaaaaaaattcaaatcagtataatatggcaatgtatcatttcaacttgtggtttcaagtgcatgtatcaatgattgaatatcctctttgtatatgtataaatccaaatgagcatgaggtttgaaagggtaaaagtctggttctttctgcataggctgcatgactaaatcctctcaaattaccttatgaggaaatgggtaaatgctaattcattggtgctgcttatttgcttggtttaacaaacttttgatccacattttctcttggaacatattattgcagatctgcaatagtagatttgagccccagttgattgtatacaatgctggaacagacatcctcgatggcgatccgttgggcagattgaaggtaagtcctgagggtgtggttaccagagacgagaaggtatttaggttcgcaaaagatcgaaacattcctttgctcatgctgacatcaggaggctacatgaagtcaagtgctcgagtaatagctgattcgatcatcaatctgtccaataaaaacttgataggattaggcagccagctgggttgagcaagaacttgtgacagtatgcttcttatcgggaagcaatatctcgtaagagcttattcgattaggagtggattaaagaggattaaattccttgatggtcaaaattgaatagaaagatatctaatcctactcaatccacatgcaatcgaacaaggtttaaaggtgtagtttttttttttttgtgaaggataacatgtatgccacaaaaatgttctgtacataacacgggatgtttgtgaatctatacaacacaaaaacaaaaacaa

SEQ ID NO: 83129 - DNA, 2431 bp, Zea Mays
cgccgaatcctctcccggcaccgcaaccgctgttcctctgcgcggaacgcgcgcgcgccacagccgatcagccaccgcaggattcctcgtccaccgcgaccattcggcttctccccaatcccggcacggcggcacgggacctctccctctctctcccgctggcgggcgatggcctcctcctcctcctcacctgcgcccgccctggccggggaggcgctacgccagaaacgcatcctctccagcaagctctacctcgaggtcccgtcctccaaggcgccggtggtttactcgccggcatacgacatctccttcctcggccttgagaagctgcacccgtttgaatccgccaaatggggccgcatctgtaggtacctcaccagggaagggtacctcgacaagaaacagatggtggagccattggaagcctgcaaggaggatttgctagtggtgcacacggaggcgtatttgaacagtctcaaatgcagcttcagagtttcctccattgtagaggtccctcctgtgtcgcttgtccctaattggattgtgcacagaaagctactacaccccttccggaagcagatgaagggggtggattttgtgcatacgctgacatctctctctgcatccagtttgcttttgtccgtctaaatatctcaagtgtattgatcatagacctggatgcccaccaaggaaatggacacgaaaaagattttgctaatgatggaagggtttacattttagacatgtacaatgctggaatttatccctttgtaagagtctacatcatcaccctcactccttagatatatgtagtatatgaagctatttttcttttgtgatctgttgctcttatatattgtcattatgaaatgcatattgatggagatattacttatgcggaactttcttatctcacttcttgaacaagttttattgttaaaccctaaatgtacaatcatctttttgaacaagctcttttgtgcagcatttagatgatgtaattgttcacagatcgaaattgaaaaacagcagtttttgtctcgaacgaagtaggagagatacgtgttatttcatatagaagagaaaaaaatagtacaaggagagatcaaaagacctctccaagagaaaaacagcagttccatccaactgttatactgcaatgaattccgacggtatcatgctatcagttttgtaacagtccacgttaatatgatgtagacaccaaaataaaggacgagttttgtatttatggtttcagtttcattggtaccagatatattcctgattcttgttctttgtaaacttacattggtttgtttcaggatttcactgctaagcaatacattgatcaaaaagttgaattagttgtaagttttatcttgcaaccttttagttatgcattctctccactgcacgtacttcatgtttttagttaaaattcttgttatgtgattgtgcattatagagtgggtcaaaaacagatgaatacttggagcaacttgacaaagctctcgaggtacatttacatacctgcagaattttctgtgaaaataaatatttacactgggtactaggttaatgttttgaaatgtcatcttttgcatgatatttatccaaaaaaattcaaatcagtataatatggcaatgtatcatttcaacttgtggtttcaagtgcatgtatcaatgattgaatatcctctttgtatatgtataaatccaaatgagcatgaggtttgaaagggtaaaagtctggttctttctgcataggctgcatgactaaatcctctcaaattaccttatgaggaaatgggtaaatgctaattcattggtgctgcttatttgcttggtttaacaaacttttgatccacattttctcttggaacatattattgcagatctgcaatagtagatttgagccccagttgattgtatacaatgctggaacagacatcctcgatggcgatccgttgggcagattgaaggtaagtcctgagggtgtggttaccagagacgagaaggtatttaggttcgcaaaagatcgaaacattcctttgctcatgctgacatcaggaggctacatgaagtcaagtgctcgagtaatagctgattcgatcatcaatctgtccaataaaaacttgataggattaggcagccagctgggttgagcaagaacttgtgacagtatgcttcttatcgggaagcaatatctcgtaagagcttattcgattaggagtggattaaagaggattaaattccttgatggtcaaaattgaatagaaagatatctaatcctactcaatccacatgcaatcgaacaaggtttaaaggtgtagtttttttttttttgtgaaggataacatgtatgccacaaaaatgttctgtacataacacgggatgtttgtgaatctatacaacacaaaaacaaaaacaa

SEQ ID NO: 83130 - DNA, 2029 bp, Zea Mays
cgccgaatcctctcccggcaccgcaaccgctgttcctctgcgcggaacgcgcgcgcgccacagccgatcagccaccgcaggattcctcgtccaccgcgaccattcggcttctccccaatcccggcacggcggcacgggacctctccctctctctcccgctggcgggcgatggcctcctcctcctcctcacctgcgcccgccctggccggggaggcgctacgccagaaacgcatcctctccagcaagctctacctcgaggtcccgtcctccaaggcgccggtggtttactcgccggcatacgacatctccttcctcggccttgagaagctgcacccgtttgaatccgccaaatggggccgcatctgtaggtacctcaccagggaagggtacctcgacaagaaacagatggtggagccattggaagcctgcaaggaggatttgctagtggtgcacacggaggcgtatttgaacagtctcaaatgcagcttcagagtttcctccattgtagaggtccctcctgtgtcgcttgtccctaattggattgtgcacagaaagctactacaccccttccggaagcagcagatgaagggggtggattttgtgcatacgctgacatctctctctgcatccagtttgcttttgtccgtctaaatatctcaagtgtattgatcatagacctggatgcccaccaaggaaatggacacgaaaaagattttgctaatgatggtacatattttaattttctttggattttggttctttatatttgtcaatttgataccagtttatcgctcacaggaagggtttacattttagacatgtacaatgctggaatttatccctttgtaagagtctacatcatcaccctcactccttagatatatgtagtatatgaagctatttttcttttgtgatctgttgctcttatatattgtcattatgaaatgcatattgatggagatattacttatgcggaactttcttatctcacttcttgaacaagttttattgttaaaccctaaatgtacaatcatctttttgaacaagctcttttgtgcagcatttagatgatgtaattgttcacagatcgaaattgaaaaacagcagtttttgtctcgaacgaagtaggagagatacgtgttatttcatatagaagagaaaaaaatagtacaaggagagatcaaaagacctctccaagagaaaaacagcagttccatccaactgttatactgcaatgaattccgacggtatcatgctatcagttttgtaacagtccacgttaatatgatgtagacaccaaaataaaggacgagttttgtatttatggtttcagtttcattggtaccagatatattcctgattcttgttctttgtaaacttacattggtttgtttcaggatttcactgctaagcaatacattgatcaaaaagttgaattagttagtgggtcaaaaacagatgaatacttggagcaacttgacaaagctctcgagatctgcaatagtagatttgagccccagttgattgtatacaatgctggaacagacatcctcgatggcgatccgttgggcagattgaaggtaagtcctgagggtgtggttaccagagacgagaaggtatttaggttcgcaaaagatcgaaacattcctttgctcatgctgacatcaggaggctacatgaagtcaagtgctcgagtaatagctgattcgatcatcaatctgtccaataaaaacttgataggattaggcagccagctgggttgagcaagaacttgtgacagtatgcttcttatcgggaagcaatatctcgtaagagcttattcgattaggagtggattaaagaggattaaattccttgatggtcaaaattgaatagaaagatatctaatcctactcaatccacatgcaatcgaacaaggtttaaaggtgtagtttttttttttttgtgaaggataacatgtatgccacaaaaatgttctgtacataacacgggatgtttgtgaatctatacaacacaaaaacaaaaacaa

SEQ ID NO: 83131 - DNA, 1458 bp, Zea Mays
aaatggtacacagtacgccgaatcctctcccggcaccgcaaccgctgttcctctgcgcggaacgcgcgcgcgccacagccgatcagccaccgcaggattcctcgtccaccgcgaccattcggcttctccccaatcccggcacggcggcacgggacctctccctctctctcccgctggcgggcgatggcctcctcctcctcctcacctgcgcccgccctggccggggaggcgctacgccagaaacgcatcctctccagcaagctctacctcgaggtcccgtcctccaaggcgccggtggtttactcgccggcatacgacatctccttcctcggccttgagaagctgcacccgtttgaatccgccaaatggggccgcatctgtaggtacctcaccagggaagggtacctcgacaagaaacagatggtggagccattggaagcctgcaaggaggatttgctagtggtgcacacggaggcgtatttgaacagtctcaaatgcagcttcagagtttcctccattgtagaggtccctcctgtgtcgcttgtccctaattggattgtgcacagaaagctactacaccccttccggaagcaggtgggtgggtccattttatcagccaaacttgcatttgagagaggttgggctattaatgttggtggaggatttcaccattgttcagcagatgaagggggtggattttgtgcatacgctgacatctctctctgcatccagtttgcttttgtccgtctaaatatctcaagtgtattgatcatagacctggatgcccaccaaggaaatggacacgaaaaagattttgctaatgatggatttcactgctaagcaatacattgatcaaaaagttgaattagttagtgggtcaaaaacagatgaatacttggagcaacttgacaaagctctcgagatctgcaatagtagatttgagccccagttgattgtatacaatgctggaacagacatcctcgatggcgatccgttgggcagattgaaggtaagtcctgagggtgtggttaccagagacgagaaggtatttaggttcgcaaaagatcgaaacattcctttgctcatgctgacatcaggaggctacatgaagtcaagtgctcgagtaatagctgattcgatcatcaatctgtccaataaaaacttgataggattaggcagccagctgggttgagcaagaacttgtgacagtatgcttcttatcgggaagcaatatctcgtaagagcttattcgattaggagtggattaaagaggattaaattccttgatggtcaaaattgaatagaaagatatctaatcctactcaatccacatgcaatcgaacaaggtttaaaggtgtagtttttttttttttgtgaaggataacatgtatgccacaaaaatgttctgtacataacacgggatgtttgtgaatctatacaacacaaaaacaaaaacaa

SEQ ID NO: 83132 - DNA, 2057 bp, Zea Mays
aaatggtacacagtacgccgaatcctctcccggcaccgcaaccgctgttcctctgcgcggaacgcgcgcgcgccacagccgatcagccaccgcaggattcctcgtccaccgcgaccattcggcttctccccaatcccggcacggcggcacgggacctctccctctctctcccgctggcgggcgatggcctcctcctcctcctcacctgcgcccgccctggccggggaggcgctacgccagaaacgcatcctctccagcaagctctacctcgaggtcccgtcctccaaggcgccggtggtttactcgccggcatacgacatctccttcctcggccttgagaagctgcacccgtttgaatccgccaaatggggccgcatctgtaggtacctcaccagggaagggtacctcgacaagaaacagatggtggagccattggaagcctgcaaggaggatttgctagtggtgcacacggaggcgtatttgaacagtctcaaatgcagcttcagagtttcctccattgtagaggtccctcctgtgtcgcttgtccctaattggattgtgcacagaaagctactacaccccttccggaagcaggtgggtgggtccattttatcagccaaacttgcatttgagagaggttgggctattaatgttggtggaggatttcaccattgttcagcagatgaagggggtggattttgtgcatacgctgacatctctctctgcatccagtttgcttttgtccgtctaaatatctcaagtgtattgatcatagacctggatgcccaccaaggaaatggacacgaaaaagattttgctaatgatggaagggtttacattttagacatgtacaatgctggaatttatccctttgtaagagtctacatcatcaccctcactccttagatatatgtagtatatgaagctatttttcttttgtgatctgttgctcttatatattgtcattatgaaatgcatattgatggagatattacttatgcggaactttcttatctcacttcttgaacaagttttattgttaaaccctaaatgtacaatcatctttttgaacaagctcttttgtgcagcatttagatgatgtaattgttcacagatcgaaattgaaaaacagcagtttttgtctcgaacgaagtaggagagatacgtgttatttcatatagaagagaaaaaaatagtacaaggagagatcaaaagacctctccaagagaaaaacagcagttccatccaactgttatactgcaatgaattccgacggtatcatgctatcagttttgtaacagtccacgttaatatgatgtagacaccaaaataaaggacgagttttgtatttatggtttcagtttcattggtaccagatatattcctgattcttgttctttgtaaacttacattggtttgtttcaggatttcactgctaagcaatacattgatcaaaaagttgaattagttagtgggtcaaaaacagatgaatacttggagcaacttgacaaagctctcgagatctgcaatagtagatttgagccccagttgattgtatacaatgctggaacagacatcctcgatggcgatccgttgggcagattgaaggtaagtcctgagggtgtggttaccagagacgagaaggtatttaggttcgcaaaagatcgaaacattcctttgctcatgctgacatcaggaggctacatgaagtcaagtgctcgagtaatagctgattcgatcatcaatctgtccaataaaaacttgataggattaggcagccagctgggttgagcaagaacttgtgacagtatgcttcttatcgggaagcaatatctcgtaagagcttattcgattaggagtggattaaagaggattaaattccttgatggtcaaaattgaatagaaagatatctaatcctactcaatccacatgcaatcgaacaaggtttaaaggtgtagtttttttttttttgtgaaggataacatgtatgccacaaaaatgttctgtacataacacgggatgtttgtgaatctatacaacacaaaaacaaaaacaa

SEQ ID NO: 83133 - DNA, 1571 bp, Zea Mays
atcttgcgcttaatccagtccgttcaattcttgacatccgaacaccccgccgacgcagccctagattccgcattcctctgtcacctccgcggcgccgccagcccgccatcacataacttcggcttctatcccttcgtaaacccttctctcttcttcccgcggcctgctcgttctatctgtccagcagacttgaggttccgagcggccggaaaccagcggcaaccgtcggcatggcgctcgtattgcattctggggctggaaacaaaaatgccttcaaggcacttattgctgcagaatacagtggggtcaaggttgagttgaccaaggattttgagatgggtgtctccaacaagacccctgagtttctaaagatgaacccccttgggaaggttcctgttctggagactcctgatggccctgtttttgagagtaatgctattgcgcgctatgttgctcgcttgaaggatgacaaccctcttttcgggtcttcccgtattgaacaagcccacgttgagcagtggatggactttgctgcaacagaagttgatcctggtgttggatggtacttgtatccaaggcttgggtacatcccttatgctcacacgactgaggaaacagctattgcttcattgaagagatcccttggtgctctgaacacacatcttgccttgaacacataccttgttggacattctgttactctagctgacattgtattgacatgcaacctctaccatggaattgcacggatcttgaccaaaagcttcacttctgatttccctcatgttgagaggagtcaaaggcaaaggatgtgaagaaagaaactccaaaggaggcccccaagccaaaggtggttgaggtaccagcagaagaggaagcaccaaagccaaagccaaagaatcctcttgacttgctgccaccaagcaagatggtccttgatgactggaagaggctatactcaaacacaaagaccaacttccgggaggttgccatcaaaggtttctgggacatgtatgacccagagggctactctctgtggttctgtgactacaagtacaatgacgagaacaccgtctcctttgtgaccctgaacaaggttggtggattcctgcagcggatggacctgtgccgcaagtacgcctttggcaagatgctcgtggtaggttctgagccacccttcaagctgaagggcctttggctcttccgtggccaggaggttcccaagtttgtaatggatgaggtctatgacatggagctctacgagtggaccaaggtggacatctctgatgaggcccagaaggagcgtgtcaatgccatgatcgaggaccaggaacccttcgagggcgaggccttgcttgacgcgaaatgcttcaagtgagtgtgctgtatccagagctgtttagccctctaattggatgtctatgttgatctggtatatcttgctatgaactggttaaagtttgtgctggtttgagaatttttgtttaccttgtcatcatttaagtgtttcgccgtaacaattttggtcatgtttttgaatgcctgtttgtattcgcgtcgtaaaaaataaa

SEQ ID NO: 83134 - DNA, 2112 bp, Zea Mays
atcttgcgcttaatccagtccgttcaattcttgacatccgaacaccccgccgacgcagccctagattccgcattcctctgtcacctccgcggcgccgccagcccgccatcacataacttcggcttctatcccttcgtaaacccttctctcttcttcccgcggcctgctcgttctatctgtccagcagacttgaggttccgagcggccggaaaccagcggcaaccgtcggcatggcgctcgtattgcattctggggctggaaacaaaaatgccttcaaggcacttattgctgcagaatacagtggggtcaaggttgagttgaccaaggattttgagatgggtgtctccaacaagacccctgagtttctaaagatgaacccccttgggaaggttcctgttctggagactcctgatggccctgtttttgagagtaatgctattgcgcgctatgttgctcgcttgaaggatgacaaccctcttttcgggtcttcccgtattgaacaagcccacgttgagcagtggatggactttgctgcaacagaagttgatcctggtgttggatggtacttgtatccaaggcttgggtacatcccttatgctcacacgactgaggaaacagctattgcttcattgaagagatcccttggtgctctgaacacacatcttgccttgaacacataccttgttggacattctgttactctagctgacattgtattgacatgcaacctctaccatggaattgcacggatcttgaccaaaagcttcacttctgatttccctcatgttgagaggtatttctggaccatggttaaccaacctaatttcaagaaggtcattggtgaggtcaagcaggcagagtctgtacctcctgttcttaaaaagggtgttcctcctaaggagtcaaaggcaaaggatgtgaagaaagaaactccaaaggaggcccccaagccaaaggtggttgaggtaccagcagaagaggaagcaccaaagccaaagccaaagaatcctcttgacttgctgccaccaagcaagatggtccttgatgactggaagaggctatactcaaacacaaagaccaacttccgggaggttgccatcaaaggtttctgggacatgtatgacccagagggctactctctgtggttctgtgactacaagtacaatgacgagaacaccgtctcctttgtgaccctgaacaaggttggtggattcctgcagcggatggacctgtgccgcaagtacgcctttggcaagatgctcgtggtaggttctgagccacccttcaagctgaagggcctttggctcttccgtggccaggaggttcccaagtttgtaatggatgaggtctatgacatggagctctacgagtggaccaaggtggacatctctgatgaggcccagaaggagcgtgtcaatgccatgatcgaggaccaggaacccttcgagggcgaggccttgcttgacgcgaaatgcttcaaggtccggaatgaagctagtgaagacacaattgaaaaataaattagataatatggaaaaagattatacccagttcatggaattgaagaatgctgccactggattaagatggaatgaagcaaatcaaactgttgattgcgataatacatggtgggatgaacatcttaagagatgcaacatttagctatgaacatgataagttgaaagaagatcatttctggccttatttcaaagaatttacttgcgatatgtgactttggcatgaggtttacgtttgtggttgctggatggacgggttctgcacatgacacacggatccttagtcatacattggcaacattttcttcttttcccgtccctcttaaagataagtactaccttgtggactccggatatccaaaccgaactggataccttgcacctttcaagggaactacgtaccatataccggaatttcgccatcgccgtggatgtccaccgcaagggaaggatgagacattcaacttcttgcactactctctctgcaatgtcattgagcgagcatttagggtcctcaagcaaaaaatgacacatattgaaaaacatgccgaatttctcagttgaacgacagaaagagatcattatagcattgtcg

SEQ ID NO: 83135 - DNA, 1867 bp, Zea Mays
atcttgcgcttaatccagtccgttcaattcttgacatccgaacaccccgccgacgcagccctagattccgcattcctctgtcacctccgcggcgccgccagcccgccatcacataacttcggcttctatcccttcgtaaacccttctctcttcttcccgcggcctgctcgttctatctgtccagcagacttgaggttccgagcggccggaaaccagcggcaaccgtcggcatggcgctcgtgagttccttcgcctttctctctctcttttttttatcactctttcagaagtgctgtgtagctcatcacttatcggactgtctgtgaggaagttttgttatgcgcggcagtttggtttatagggttttgtgattcatgtattgcattctggggctggaaacaaaaatgccttcaaggcacttattgctgcagaatacagtggggtcaaggttgagttgaccaaggattttgagatgggtgtctccaacaagacccctgagtttctaaagatgaacccccttgggaaggttcctgttctggagactcctgatggccctgtttttgagagtaatgctattgcgcgctatgttgctcgcttgaaggatgacaaccctcttttcgggtcttcccgtattgaacaagcccacgttgagcagtggatggactttgctgcaacagaagttgatcctggtgttggatggtacttgtatccaaggcttgggtacatcccttatgctcacacgactgaggaaacagctattgcttcattgaagagatcccttggtgctctgaacacacatcttgccttgaacacataccttgttggacattctgttactctagctgacattgtattgacatgcaacctctaccatggaattgcacggatcttgaccaaaagcttcacttctgatttccctcatgttgagaggtatttctggaccatggttaaccaacctaatttcaagaaggtcattggtgaggtcaagcaggcagagtctgtacctcctgttcttaaaaagggtgttcctcctaaggagtcaaaggcaaaggatgtgaagaaagaaactccaaaggaggcccccaagccaaaggtggttgaggtaccagcagaagaggaagcaccaaagccaaagccaaagaatcctcttgacttgctgccaccaagcaagatggtccttgatgactggaagaggctatactcaaacacaaagaccaacttccgggaggttgccatcaaaggtttctgggacatgtatgacccagagggctactctctgtggttctgtgactacaagtacaatgacgagaacaccgtctcctttgtgaccctgaacaaggttggtggattcctgcagcggatggacctgtgccgcaagtacgcctttggcaagatgctcgtggtaggttctgagccacccttcaagctgaagggcctttggctcttccgtggccaggaggttcccaagtttgtaatggatgaggtctatgacatggagctctacgagtggaccaaggtggacatctctgatgaggcccagaaggagcgtgtcaatgccatgatcgaggaccaggaacccttcgagggcgaggccttgcttgacgcgaaatgcttcaagtgagtgtgctgtatccagagctgtttagccctctaattggatgtctatgttgatctggtatatcttgctatgaactggttaaagtttgtgctggtttgagaatttttgtttaccttgtcatcatttaagtgtttcgccgtaacaattttggtcatgtttttgaatgcctgtttgtattcgcgtcgtagttggggctatttatgcagactatccgatttaagtagattcaagtggcattattctctagta

SEQ ID NO: 83136 - DNA, 1675 bp, Zea Mays
atcttgcgcttaatccagtccgttcaattcttgacatccgaacaccccgccgacgcagccctagattccgcattcctctgtcacctccgcggcgccgccagcccgccatcacataacttcggcttctatcccttcgtaaacccttctctcttcttcccgcggcctgctcgttctatctgtccagcagacttgaggttccgagcggccggaaaccagcggcaaccgtcggcatggcgctcaatacagtggggtcaaggttgagttgaccaaggattttgagatgggtgtctccaacaagacccctgagtttctaaagatgaacccccttgggaaggttcctgttctggagactcctgatggccctgtttttgagagtaatgctattgcgcgctatgttgctcgcttgaaggatgacaaccctcttttcgggtcttcccgtattgaacaagcccacgttgagcagtggatggactttgctgcaacagaagttgatcctggtgttggatggtacttgtatccaaggcttgggtacatcccttatgctcacacgactgaggaaacagctattgcttcattgaagagatcccttggtgctctgaacacacatcttgccttgaacacataccttgttggacattctgttactctagctgacattgtattgacatgcaacctctaccatggaattgcacggatcttgaccaaaagcttcacttctgatttccctcatgttgagaggtatttctggaccatggttaaccaacctaatttcaagaaggtcattggtgaggtcaagcaggcagagtctgtacctcctgttcttaaaaagggtgttcctcctaaggagtcaaaggcaaaggatgtgaagaaagaaactccaaaggaggcccccaagccaaaggtggttgaggtaccagcagaagaggaagcaccaaagccaaagccaaagaatcctcttgacttgctgccaccaagcaagatggtccttgatgactggaagaggctatactcaaacacaaagaccaacttccgggaggttgccatcaaaggtttctgggacatgtatgacccagagggctactctctgtggttctgtgactacaagtacaatgacgagaacaccgtctcctttgtgaccctgaacaaggttggtggattcctgcagcggatggacctgtgccgcaagtacgcctttggcaagatgctcgtggtaggttctgagccacccttcaagctgaagggcctttggctcttccgtggccaggaggttcccaagtttgtaatggatgaggtctatgacatggagctctacgagtggaccaaggtggacatctctgatgaggcccagaaggagcgtgtcaatgccatgatcgaggaccaggaacccttcgagggcgaggccttgcttgacgcgaaatgcttcaagtgagtgtgctgtatccagagctgtttagccctctaattggatgtctatgttgatctggtatatcttgctatgaactggttaaagtttgtgctggtttgagaatttttgtttaccttgtcatcatttaagtgtttcgccgtaacaattttggtcatgtttttgaatgcctgtttgtattcgcgtcgtagttggggctatttatgcagactatccgatttaagtagattcaagtggcattattctctagta

SEQ ID NO: 83137 - DNA, 2294 bp, Zea Mays
attttacgactccaagatgtgccttttacaattctgaaaaccgtaccaagttcgtgcaacatatttgtcgtgtcccggcgcaggttaacaataaaaattgcaaatcaggctcgaagtagcaagccgaacgcttctattcggattcagtcaataagtcataaagcatttgatcaaatacagagggactggctacaagacaaacaggctttgaataatctggctgatgatgagataccaaaatattctgaaaattctatttcaggctcattctctcaagtctgcagttctataagcacttcttccatcgccgttaaaagttcagaaagtcatagaagaggtttcttaggaagtttaggacgaaggacacctgggagagaaaggaacaaagattttgatgctatcggccaattgaaggaagttcattatgttgccttaagctcagttgaagagtaccaacatatagatgaagaagaaaaactgaggaaggagctgaaggatactttgatgatgtatgacagagcttgtggaaatctcgcccatgctagtaaaaagattcagttattttctagtgactgctgtgaagatgtgaataaggtgcaagacgcactacagagagaggaagtattgaaacagacggttccagatgagaaaaacaaacatttagaagcaattggagcagttgagatggcaaaaaatgcatttacacacgagacctattccaagcaccaggctgagaatgctaaggctgtggatgcccttttatcaacaggcaaaagttgcaggcggtactcgaaacatgaaatagagctcgccactgattacttttctgatgcaaagaagattggtgagggtggctatgggaatgtatacaggtgtacccttgaccacaccgaagtagctgttaaagttgttgaacaagattcgatcaacaagattgatgagttcttgagagaggtggagattctcggccaacttcaccatcccaacttggttttactgcttggcttttgtcctgaaattggatgccttgtgtatgaatacatggagaacgggagtttagaagatctacttatcaacgataaagggcagccactccattggtttcttcggttccaaattatctttgatgtggcttgtgggcttgctttcttgcatgggacgaaaccagagcccattgtccatcgtgacctaaagcctgggaacatcttgctggacaagaactacgtaagcaaaattggtgatgttggttttgcaaagcccatatcagatcttgtgccagaagggctcacagagtacagagacactgtcatcgctggcacactgtattacatggatcctgagtaccaattaactgggactgttcgaccaaaatcagatctttatgctttgggtattatcattcttcaactcctaactggcaaacgtccacctgggctggtaaatagtgtagaagaagggattaaaagggggatattatcagacatcctcgacaagtctcaacctgattggccaattgctgaggctgagatgttggcaaaacttgggttgtggtgtactgccttaaaatgcagggacagacctaaccttgagtcagtggtgcttccagagctcgaaaatatcctgagcagggttactgtttctctcaaactcgaaaatatccttgcaccaagccacttcttctgtccgatattgcagatgggcacacctatgaacacagggcaatcaaagcttggctcgaaaaacacaagatatccccaatgacaaatcagaggcttccacatctatccataattcccaaccattccttgcatgcagcaatacagcaatggaagttacgagcatcttaaggcccgttcgttttaatcttaatctatatggattgaacgggattgagtgggtttaaatccataacgaatcaaaattctttctaatttcttccaatgtcatcttatcaacatggaatgagaataaccgaataaggcctaataaaggcatgaggtgactggtttattcgttgtatatagtttgattcattactgtctgtttgagttaagatgtaaataaagagcaatagttctataatgtagcagtgaaagaagatagtattgtaggaataagttgtgttactagtctagatttgttagagctggtttaggctactcagacaatttaagttacaacggaattaagttttgcaatgctgtatgattttgtagttatagcctacaaggcattatcttggagggtctgattacaattttcagtgtgatttctctgagatcatgtatcttggc

SEQ ID NO: 83138 - DNA, 2839 bp, Zea Mays
ccgcggcccgcccgttgcttgcccgcaagaccgcagcagctcagttgagttgacctcgcgacctcccccggccggcgccgcagggatggaggagggtgcgtcctcgccgggcgacggcgggggcatgcagttccaggtcgcggtggccgtgcgcggggacggccgcgccagccgccgagccgcgcggtgggccgccgccagcctggtcccgcccggcggccgcgtcgcgctcgtccacgtcatcccgcccgtctccttcgtgccgtctccatccggggagagggtgccggtggacaagatggagccggaggtggtggagatgtacgcgcaggacaaccgcgcgctcgcgcaggagatcttcctccccttccgccgcctcgtcggccgcggcaaaagcgtggagacggtggttctggaaggggacagcgtcgccgaggcgctggtgaggtacgcggcggagtccggcgtccgcagcctcgtgctcggatccgcctccctcagctggttccggaggattttacgactccaagatgtgccttttacaattctgaaaaccgtaccaagttcgtgcaacatatttgtcgtgtcccggcgcaggttaacaataaaaattgcaaatcaggctcgaagtagcaagccgaacgcttctattcggattcagtcaataagtcataaagcatttgatcaaatacagagggactggctacaagacaaacaggctttgaataatctggctgatgatgagataccaaaatattctgaaaattctatttcaggctcattctctcaagtctgcagttctataagcacttcttccatcgccgttaaaagttcagaaagtcatagaagaggtttcttaggaagtttaggacgaaggacacctgggagagaaaggaacaaagattttgatgctatcggccaattgaaggaagttcattatgttgccttaagctcagttgaagagtaccaacatatagatgaagaagaaaaactgaggaaggagctgaaggatactttgatgatgtatgacagagcttgtggaaatctcgcccatgctagtaaaaagattcagttattttctagtgactgctgtgaagatgtgaataaggtgcaagacgcactacagagagaggaagtattgaaacagacggttccagatgagaaaaacaaacatttagaagcaattggagcagttgagatggcaaaaaatgcatttacacacgagacctattccaagcaccaggctgagaatgctaaggctgtggatgcccttttatcaacaggcaaaagttgcaggcggtactcgaaacatgaaatagagctcgccactgattacttttctgatgcaaagaagattggtgagggtggctatgggaatgtatacaggtgtacccttgaccacaccgaagtagctgttaaagttgttgaacaagattcgatcaacaagattgatgagttcttgagagaggtggagattctcggccaacttcaccatcccaacttggttttactgcttggcttttgtcctgaaattggatgccttgtgtatgaatacatggagaacgggagtttagaagatctacttatcaacgataaagggcagccactccattggtttcttcggttccaaattatctttgatgtggcttgtgggcttgctttcttgcatgggacgaaaccagagcccattgtccatcgtgacctaaagcctgggaacatcttgctggacaagaactacgtaagcaaaattggtgatgttggttttgcaaagcccatatcagatcttgtgccagaagggctcacagagtacagagacactgtcatcgctggcacactgtattacatggatcctgagtaccaattaactgggactgttcgaccaaaatcagatctttatgctttgggtattatcattcttcaactcctaactggcaaacgtccacctgggctggtaaatagtgtagaagaagggattaaaagggggatattatcagacatcctcgacaagtctcaacctgattggccaattgctgaggctgagatgttggcaaaacttgggttgtggtgtactgccttaaaatgcagggacagacctaaccttgagtcagtggtgcttccagagctcgaaaatatcctgagcagggttactgtttctctcaaactcgaaaatatccttgcaccaagccacttcttctgtccgatattgcaggaggtaatggaaaatccttacgttgctgcagatgggcacacctatgaacacagggcaatcaaagcttggctcgaaaaacacaagatatccccaatgacaaatcagaggcttccacatctatccataattcccaaccattccttgcatgcagcaatacagcaatggaagttacgagcatcttaaggcccgttcgttttaatcttaatctatatggattgaacgggattgagtgggtttaaatccataacgaatcaaaattctttctaatttcttccaatgtcatcttatcaacatggaatgagaataaccgaataaggcctaataaaggcatgaggtgactggtttattcgttgtatatagtttgattcattactgtctgtttgagttaagatgtaaataaagagcaatagttctataatgtagcagtgaaagaagatagtattgtaggaataagttgtgttactagtctagatttgttagagctggtttaggctactcagacaatttaagttacaacggaattaagttttgcaatgctgtatgattttgtagttatagcctacaaggcattatcttggagggtctgattacaattttcagtgtgatttctctgagatcatgtatcttggc

SEQ ID NO: 83139 - DNA, 4766 bp, Zea Mays
aaaccatacaggctcacaccaaaagcggcatagcagtatagcaccataacccctctcttccccgatggacgcgacgacgaagcggcggcaccagcccggcggcgcgcagcccacacgccgtaaggtcgtggaggaacccttccacaccgcaccccctacacctgccgcggcgtccccctcccgcctcgtcggcgccatcgtcgagaagggctactccgccgccgcaccctcctcggcgccccgaccttccgtcctccccttccccgtcgcccgccaccgctcccacggcccccactgggttcccttggtgaaggacgcccccaaggatgagaccgcggacaacgacgacgagatggacatggatgagacagactaccatcctgtggcagctgctgcagctggtcctgtgaggaggaaggagaagaagggcatggattttagccggtggcgtgagtttgttggcgatgctccccccaagcggaggcaggggaagccagtgcaggccaagaaacagagcgatcagagaattgatgctggggctgtagcttctaaggtaggtggtgtggcagctgaggggagaggattggagggaggtgctatgcggcttgacagtggaaatgctagcgaagggccaggtcccgtgcttttggtttctgatgtcgtgtccaagaagccaatgagtcaggttgaatcgagagatgaattggtgaacacaagtgaggctaggaatttggcatcacaagcagagagtatggacctcgacggcagggagtcatctatggaagcagagatcagcgcagagaacatggctaggttggctgggatgtctgcaggggagattgcagaggcccaagcagatattgtaaataagctgaaccctgcattgctggagatgctgaggcggcggggaagggagaagtctggaggcacgaaggatgtgggtaaggacaagggtctgaaaaactcagggctgcagaagaataaaagggctacaccaggggattggttgactgctggtgaacatactgggcactcctggaaggtgtggagcgaaagagtggagcggatcaggtcttgtaggttcacattagatggagacatattggggttccaatcttctcacgagcaacaagatggcaagaagatgccttcagaaagtgttgctgagcgtgatttccttagaacagaaggtgatcctgcagctgttgggtacacaatcaatgaggcagtggcacttaccaggagcatggttccggggcagcgtgtgcttgcactgcaacttcttgcttctattctgaatagggcattgcagagccttcataagaccgatctaatggataatgttaaaggaatgaattccaaggataacattgatgactggcaagcagtttggtcctatgcccttgggcctgaaccagaattggtactctccctaaggatggctttggatgataaccatgattctgtagttttgagttgtactaaagtagttaatgttatgctgagctgtgagttcaatgaatcctattttgaattttcagagaaagtaggtaatggaaaagatatctgcacagctcctgtgtttcgtagcaaacctgacttagatggaggctttcttgaaggtgggttctggaaatacaacacaaaaccttcaaatatactcccacattgtggtgataatgacgaagacgaagctgatgagaagcatacaattcaggatgatgttgttgtgtctggccaagatgttgctgctggttttgttaggatgggaatacttccacgaatctgttttctgttggagatggatccatctcctgctttagaagattatcttgtatcggttcttgtagcactagccaggcactccccacaatctgctgatgcaatcttgaattgtccaagacttattcaaagtgttactaagctgttgataaatcaaggatcaatggaaattcgctcctcacagatcagaggggttactctcttgaaggttttgtccaaatacaacagacaaacctgcttgaattttgtgaatcatggagttttccagcaggcattgtggcactggtacagaaaagctggtactattgaggactgggtaagatctggaaaggaaaaatgcaagcttagttcagcaatgatggttgagcagctgcggttttggagaacctgcatctcctatgggttttgcatgcttaattcaattttggaaagaatatcaccagatgtcactcctgaggataaaagttacagcttgccctggatacctgattttgtccccaaaattggcctgggcataattagtaatggttttttcagctgttcgaccactgttgctggtagaaatgcagaacatcagcctttttgctgtgcatctttggtgcagggactttgttatatgagatgccatggtaatgttgatgtatcattgtcttccattagctgccttcaaagattggtgcagctatcctggtctgtcgacagagtgatccagggagccacaaaatgttgttccgagtgtttcaatgagtctggaacaggtgaagctggcaaactactagctgaaggtatctccagtttatggcataatgatttgctacacttgctgacttcgcttttgccaatgatttcatcacaatggtccatatcacagaacatagagatgtttggtagaggaggaccagctcctggtgttgggtttggctgggggacatgtggtggagggttttggtctcttaaatgcctacttgcacaattggattcacaattggttgtagaattgatcaaatgtttctcttcagttcaaggaagtcctatcatcctcgatgaaggtgtgaagttagataatgtgactaacacagttgtgacagcttcaaattggatcagttctaccctagggttgtctctgattgctggacctggacaaatctatatgttggagaaggttttcgatatgatttttgaaccttccattctgaagtatctcaaatcatctatacataaatttacctctgacatggaattactgaaaccttttgaatgggacttaaatgaagatgaatatatgctcttcagcagtgttctcaaatcacatttcagatccagatggttagccatcaagaagaagcattcagataaatatgcaggagataatagcagcaccaagatttcaaaaacaccagagatattggagacaattcaagaagaaacagagttgtcagaagctgtaaatcaaccttgcaacacattaatggtagagtgggcgcatcagagactgcctcttcctatccactggattctaagtgcagtttgctgcattgatgatccaaaaggcacactctcaacatcagccaactatattcttgatgtctcaagggctggtcttatcttccttttaggtctggaggccatttcagctaccccgtgccttcatgctcctttgatctggaaaattcatgcactttcggtctctatccgctctagcatgcatttgctacaggaagacagaagtagggatattttctgtgctttacaggaactgtatggcctgcatctgaacaggttataccaaaaattctgtaaaccaaactctatcgaggaagttaagggcgttgtagtgggcacttcagaggaagcgatggagatcagtagccttgaaattctcaggtttcaggagaaaattcatggaagctatactacttttgttgagagcctggttgatcaatttgcagctgtctcatatggagattttgtttttggtcggcaagtggccatttatctgcatagaaaggctgagccagcagtacgtcttgcagcatggaatgcactgtctagtgcgtatgtgcttgaactgttacccccgctagacaattgcattggcaacgccccaggatacttggagcctcttgaggatgatgaaaaaattttggaatcttatgctaaatcatggacgtctggtgtcctggacaaagctttacagcgtgattccatggccttcacattggcaaagcatcacctttcaggctttgtcttccagtccagcgattctggcacaatgctgcgaaaaaaactggtcaaatcgcttatccggtgctatgcacagaagcggcatcatgaggttatgcttaagtgcttcgttcagcaaggcatcgcacaggattccaagagcagtgagcttgaccggagatttgaaatcttgaaggatgcttgtgagatgaactccaacctcgtaggtgaagtccagagactgaaggcatgtcttggccaatgaagccagatatttaagtgtgtcattaacttggcagcgttagttgttgggaaagctcgacaaagtggcccaaaatatgcaactgaggaaactcacggtcggggctagtggttacttttaattttgatgaagggaacgccgagcacgcagcaaccctgagtctaacctggctatggttaggctgctcttagcagagcatgcatatggtcatgtaaacagtagaccacactgtctattgagtgaagtttgaaatagactttatatatagcattaggcttcctttgattcctcttccgcttctcatagtcggtggcgttcagccatctttcactatcgtggtttcaacatctaaagacgcttaagtcaggacaaaggcatcacgtataagaatagaaggcatgagatggggatatcataaaccttgataggcgagacaaggctatgggcttctggagttccaaaaatgagagttttgcagtatagtgagatgaacttttcc

SEQ ID NO: 83140 - DNA, 5067 bp, Zea Mays
cgaccacaaaaccatacaggctcacaccaaaagcggcatagcagtatagcaccataacccctctcttccccgatggacgcgacgacgaagcggcggcaccagcccggcggcgcgcagcccacacgccgtaaggtcgtggaggaacccttccacaccgcaccccctacacctgccgcggcgtccccctcccgcctcgtcggcgccatcgtcgagaagggctactccgccgccgcaccctcctcggcgccccgaccttccgtcctccccttccccgtcgcccgccaccgctcccacggcccccactgggttcccttggtgaaggacgcccccaaggatgagaccgcggacaacgacgacgagatggacatggatgagacagactaccatcctgtggcagctgctgcagctggtcctgtgaggaggaaggagaagaagggcatggattttagccggtggcgtgagtttgttggcgatgctccccccaagcggaggcaggggaagccagtgcaggccaagaaacagagcgatcagagaattgatgctggggctgtagcttctaaggtaggtggtgtggcagctgaggggagaggattggagggaggtgctatgcggcttgacagtggaaatgctagcgaagggccaggtcccgtgcttttggtttctgatgtcgtgtccaagaagccaatgagtcaggttgaatcgagagatgaattggtgaacacaagtgaggctaggaatttggcatcacaagcagagagtatggacctcgacggcagggagtcatctatggaagcagagatcagcgcagagaacatggctaggttggctgggatgtctgcaggggagattgcagaggcccaagcagatattgtaaataagctgaaccctgcattgctggagatgctgaggcggcggggaagggagaagtctggaggcacgaaggatgtgggtaaggacaagggtctgaaaaactcagggctgcagaagaataaaagggctacaccaggggattggttgactgctggtgaacatactgggcactcctggaaggtgtggagcgaaagagtggagcggatcaggtcttgtaggttcacattagatggagacatattggggttccaatcttctcacgagcaacaagatggcaagaagatgccttcagaaagtgttgctgagcgtgatttccttagaacagaaggtgatcctgcagctgttgggtacacaatcaatgaggcagtggcacttaccaggagcatggttccggggcagcgtgtgcttgcactgcaacttcttgcttctattctgaatagggcattgcagagccttcataagaccgatctaatggataatgttaaaggaatgaattccaaggataacattgatgactggcaagcagtttggtcctatgcccttgggcctgaaccagaattggtactctccctaaggatggctttggatgataaccatgattctgtagttttgagttgtactaaagtagttaatgttatgctgagctgtgagttcaatgaatcctattttgaattttcagagaaagtaggtaatggaaaagatatctgcacagctcctgtgtttcgtagcaaacctgacttagatggaggctttcttgaaggtgggttctggaaatacaacacaaaaccttcaaatatactcccacattgtggtgataatgacgaagacgaagctgatgagaagcatacaattcaggatgatgttgttgtgtctggccaagatgttgctgctggttttgttaggatgggaatacttccacgaatctgttttctgttggagatggatccatctcctgctttagaagattatcttgtatcggttcttgtagcactagccaggcactccccacaatctgctgatgcaatcttgaattgtccaagacttattcaaagtgttactaagctgttgataaatcaaggatcaatggaaattcgctcctcacagatcagaggggttactctcttgaaggttttgtccaaatacaacagacaaacctgcttgaattttgtgaatcatggagttttccagcaggcattgtggcactggtacagaaaagctggtactattgaggactgggtaagatctggaaaggaaaaatgcaagcttagttcagcaatgatggttgagcagctgcggttttggagaacctgcatctcctatgggttttgtatagctcactttgctgatttctttcctgttttgtgtctgtggcttagtcgtcctgattttaagaaactaagtgaacacaatgttcttgttgagtttagttccgttgctagagagtcatatcttgtcttagctgctctggcacaaaggttaccacttcttcattcagtggagcagcttgccaatcaagatctgggagtttctgccagttatattgagacatgttcttggagccatgttgtcccgatggttgacttagctttatcttggttacatcttaatgatattccctatgcatgcttaattcaattttggaaagaatatcaccagatgtcactcctgaggataaaagttacagcttgccctggatacctgattttgtccccaaaattggcctgggcataattagtaatggttttttcagctgttcgaccactgttgctggtagaaatgcagaacatcagcctttttgctgtgcatctttggtgcagggactttgttatatgagatgccatggtaatgttgatgtatcattgtcttccattagctgccttcaaagattggtgcagctatcctggtctgtcgacagagtgatccagggagccacaaaatgttgttccgagtgtttcaatgagtctggaacaggtgaagctggcaaactactagctgaaggtatctccagtttatggcataatgatttgctacacttgctgacttcgcttttgccaatgatttcatcacaatggtccatatcacagaacatagagatgtttggtagaggaggaccagctcctggtgttgggtttggctgggggacatgtggtggagggttttggtctcttaaatgcctacttgcacaattggattcacaattggttgtagaattgatcaaatgtttctcttcagttcaaggaagtcctatcatcctcgatgaaggtgtgaagttagataatgtgactaacacagttgtgacagcttcaaattggatcagttctaccctagggttgtctctgattgctggacctggacaaatctatatgttggagaaggttttcgatatgatttttgaaccttccattctgaagtatctcaaatcatctatacataaatttacctctgacatggaattactgaaaccttttgaatgggacttaaatgaagatgaatatatgctcttcagcagtgttctcaaatcacatttcagatccagatggttagccatcaagaagaagcattcagataaatatgcaggagataatagcagcaccaagatttcaaaaacaccagagatattggagacaattcaagaagaaacagagttgtcagaagctgtaaatcaaccttgcaacacattaatggtagagtgggcgcatcagagactgcctcttcctatccactggattctaagtgcagtttgctgcattgatgatccaaaaggcacactctcaacatcagccaactatattcttgatgtctcaagggctggtcttatcttccttttaggtctggaggccatttcagctaccccgtgccttcatgctcctttgatctggaaaattcatgcactttcggtctctatccgctctagcatgcatttgctacaggaagacagaagtagggatattttctgtgctttacaggaactgtatggcctgcatctgaacaggttataccaaaaattctgtaaaccaaactctatcgaggaagttaagggcgttgtagtgggcacttcagaggaagcgatggagatcagtagccttgaaattctcaggtttcaggagaaaattcatggaagctatactacttttgttgagagcctggttgatcaatttgcagctgtctcatatggagattttgtttttggtcggcaagtggccatttatctgcatagaaaggctgagccagcagtacgtcttgcagcatggaatgcactgtctagtgcgtatgtgcttgaactgttacccccgctagacaattgcattggcaacgccccaggatacttggagcctcttgaggatgatgaaaaaattttggaatcttatgctaaatcatggacgtctggtgtcctggacaaagctttacagcgtgattccatggccttcacattggcaaagcatcacctttcaggctttgtcttccagtccagcgattctggcacaatgctgcgaaaaaaactggtcaaatcgcttatccggtgctatgcacagaagcggcatcatgaggttatgcttaagtgcttcgttcagcaaggcatcgcacaggattccaagagcagtgagcttgaccggagatttgaaatcttgaaggatgcttgtgagatgaactccaacctcgtaggtgaagtccagagactgaaggcatgtcttggccaatgaagccagatatttaagtgtgtcattaacttggcagcgttagttgttgggaaagctcgacaaagtggcccaaaatatgcaactgaggaaactcacggtcggggctagtggttacttttaattttgatgaagggaacgccgagcacgcagcaaccctgagtctaacctggctatggttaggctgctcttagcagagcatgcatatggtcatgtaaacagtagaccacactgtctattgagtgaagtttgaaatagactttatatatagcattaggcttcctttgattcctcttccgcttctcatagtcggtggcgttcagccatctttcactatcgtggtttcaacatctaaagacgcttaagtcaggacaaaggcatcacgtataagaatagaaggcatgagatggggatatcataaaccttgataggcgagacaaggctatgggcttctggagttccaaaaatgagagttttgcagtatagtgagatgaacttttcc

SEQ ID NO: 83141 - DNA, 2445 bp, Zea Mays
acttcagcacacatcacacagaggtagtgcctacccgcacggccgcacggcagttcgtcaccgtggtggcgtatccgccacaagcccactgcccacaggcccactgctgccgtctcgcctcagggctcaggctgcaggctgacgacgccaacgccgcccctcccggccttggcccaagtcgtcacctcctcgcccctcgcccacggctgcggccacattgtcgccggcttgccaacacgcccgtgtagatcggccgccgcatcgcgccacgccgccgtttcgatcccccgccagggcagcaggcaggaatctggcgatgaagagtaagaaaagtgtgcacggatcatcatgcaagaaggctaagttgtttgacggcctaattggtagacatggttctgaaatagatccatgttataaactttttcttgaacatttaagcaaagatcggaatacatatgtccttgatgtaccaaagggtgaccacggcttgcctttttctgtacgttatgaggaggactatacgtcctatggaaatactaagagcagaagtagtccaaattttcccaaccattcacggcgcacaagttggggcattccagatggcaaacagcctgatgtaaaagctgtcaaggctgccagcagaaatatgtgttgctccttttcaccaaagagatcatatgtgaagaagaagaccacgacctcactagtagatgaatcttatgagttatttctgagccttgtgaagttcaaggatggtttcatggttattgaaccagaaccaggtgtcaccattgtatatgagcgagaagaagatatgccagctggctatgatgaatggagaactggcagttccacaaatgaactgtctttggtgtctccacttgaaaacacggagggagactacaccatgcaaagatatgattatggccttgcaccggctaacaaaatttcttctgaacatgaaatggctgcaccttcttcagagaacattgctggtcaggatattatttgcacagatgagcatggccttgtactttatgctgaaccatctgatttaaatgcatgtgaagatgaacaagcaacacctcttgctatcagctacggtggttcatctacatttgatgaaaaactcaatgctgttttaagtcaaccatatgatcaaaacgaatacgaagagttgtggagaaaagcgactgaccggaagcctgtgagcagacaaagacacttgcgaagtgcatcaaagcgctatgttacagaggcaatcgggctgtcatatctcgattattaccctggtatagttacaaagcttggtaggggaacttgtttgtcctaacgtgttaattgaacacctttctatccatctccggccactaattcctgctatttgaatgagttgtaataagtagtcttagtttacaaaaggaaaaggcagattcctgtaatttaaccaggtggttaacaagcatttagtaaccaattgttcattttccagtgaactgcatcagccaagtgacatatgctttcatcatataactcttaccacaaaaggaaactctagaggcctcagtctttcctccatcatatgaatcctttcatccatttgaaaatgaactaagtcccacaataacatgatatatagcaaccacagagaatatgaccttgaacttttaggtagctttatcttcgtcctagttttatttaccatagtgtttttatggtatacatgtaatggagatacgagtggcctttctgctcgcaactgagatctagatttttatatatgtgatgccttggctcatgcattttgtaatgcatcatgtcatgattctatagcagtattgaaggccatgctttcaatgttgtgatgcagaactttgtattaagtttccaccaatgaaatagattgatagatttcattttagtacttctccagttgatagatttctttttagtacttctccatctagactcatctttagttaatcatgcagatctagccgtacaaataaagtcatctgatcgtgataagagactgagcctactacgaaggttcttcttctggttggagaacttgtgccatgagggagcctacatgccctggatctccaaacctctagcttgcaaccccatttcaccggatggatgaatatgaaccgacgcccactctcatcctcaagacacacgaagatgagccctaggggtgagcggttagcagagatttgcttgcagcatccctgcatctctgatgctacttgactgctccttgtttcgatgcgatgcaaagctgagtctgtaatcttcagtgtctatgcagtactgcagttatttttctgcaggctaaattatacaacatggcaacaaatacagcacggatattgcaaaaatggtactgctagcgttttatcgttacatggatacagcacggatattaccacacggatactg

SEQ ID NO: 83142 - DNA, 1890 bp, Zea Mays
acttcagcacacatcacacagaggtagtgcctacccgcacggccgcacggcagttcgtcaccgtggtggcgtatccgccacaagcccactgcccacaggcccactgctgccgtctcgcctcagggctcaggctgcaggctgacgacgccaacgccgcccctcccggccttggcccaagtcgtcacctcctcgcccctcgcccacggctgcggccacattgtcgccggcttgccaacacgcccgtgtagatcggccgccgcatcgcgccacgccgccgtttcgatcccccgccagggcagcaggcaggaatctggcgatgaagagtaagaaaagtgtgcacggatcatcatgcaagaaggctaagttgtttgacggcctaattggtagacatggttctgaaatagatccatgttataaactttttcttgaacatttaagcaaagatcggaatacatatgtccttgatgtaccaaagggtgaccacggcttgcctttttctgtacgttatgaggaggactatacgtcctatggaaatactaagagcagaagtagtccaaattttcccaaccattcacggcgcacaagttggggcattccagatggcaaacagcctgatgtaaaagctgtcaaggctgccagcagaaatatgtgttgctccttttcaccaaagagatcatatgtgaagaagaagaccacgacctcactagtagatgaatcttatgagttatttctgagccttgtgaagttcaaggatggtttcatggttattgaaccagaaccaggtgtcaccattgtatatgagcgagaagaagatatgccagctggctatgatgaatggagaactggcagttccacaaatgaactgtctttggtgtctccacttgaaaacacggagggagactacaccatgcaaagatatgattatggccttgcaccggctaacaaaatttcttctgaacatgaaatggctgcaccttcttcagagaacattgctggtcaggatattatttgcacagatgagcatggccttgtactttatgctgaaccatctgatttaaatgcatgtgaagatgaacaagcaacacctcttgctatcagctacggtggttcatctacatttgatgaaaaactcaatgctgttttaagtcaaccatatgatcaaaacgaatacgaagagttgtggagaaaagcgactgaccggaagcctgtgagcagacaaagacacttgcgaagtgcatcaaagcgctatgttacagaggcaatcgggctgtcatatctcgattattaccctgatctagccgtacaaataaagtcatctgatcgtgataagagactgagcctactacgaaggttcttcttctggttggagcaaaatgctgtgaagagatttcacccaatcagtgaaaaaatatgtttcttgctgatggctacagtggtttgaaaacaaatcgtccataatatgttggtttagtggtttgcctgcttcatggtgctgtgtaagggaggtcaggagaacttgtgccatgagggagcctacatgccctggatctccaaacctctagcttgcaaccccatttcaccggatggatgaatatgaaccgacgcccactctcatcctcaagacacacgaagatgagccctaggggtgagcggttagcagagatttgcttgcagcatccctgcatctctgatgctacttgactgctccttgtttcgatgcgatgcaaagctgagtctgtaatcttcagtgtctatgcagtactgcagttatttttctgcaggctaaattatacaacatggcaacaaatacagcacggatattgcaaaaatggtactgctagcgttttatcgttacatggatacagcacggatattaccacacggatactg

SEQ ID NO: 83143 - DNA, 2593 bp, Zea Mays
acttcagcacacatcacacagaggtagtgcctacccgcacggccgcacggcagttcgtcaccgtggtggcgtatccgccacaagcccactgcccacaggcccactgctgccgtctcgcctcagggctcaggctgcaggctgacgacgccaacgccgcccctcccggccttggcccaagtcgtcacctcctcgcccctcgcccacggctgcggccacattgtcgccggcttgccaacacgcccgtgtagatcggccgccgcatcgcgccacgccgccgtttcgatcccccgccagggcagcaggcaggcaggaatctggcgatgaagagtaagaaaagtgtgcacggatcatcatgcaagaaggctaagttgtttgacggcctaattggtagacatggttctgaaatagatccatgttataaactttttcttgaacatttaagcaaagatcggaatacatatgtccttgatgtaccaaagggtgaccacggcttgcctttttctgtacgttatgaggaggactatacgtcctatggaaatactaagagcagaagtagtccaaattttcccaaccattcacggcgcacaagttggggcattccagatggcaaacagcctgatgtaaaagctgtcaaggctgccagcagaaatatgtgttgctccttttcaccaaagagatcatatgtgaagaagaagaccacgacctcactagtagatgaatcttatgagttatttctgagccttgtgaagttcaaggatggtttcatggttattgaaccagaaccaggtgtcaccattgtatatgagcgagaagaagatatgccagctggctatgatgaatggagaactggcagttccacaaatgaactgtctttggtgtctccacttgaaaacacggagggagactacaccatgcaaagatatgattatggccttgcaccggctaacaaaatttcttctgaacatgaaatggctgcaccttcttcagagaacattgctggtcaggatattatttgcacagatgagcatggccttgtactttatgctgaaccatctgatttaaatgcatgtgaagatgaacaagcaacacctcttgctatcagctacggtggttcatctacatttgatgaaaaactcaatgctgttttaagtcaaccatatgatcaaaacgaatacgaagagttgtggagaaaagcgactgaccggaagcctgtgagcagacaaagacacttgcgaagtgcatcaaagcgctatgttacagaggcaatcgggctgtcatatctcgattattaccctggtatagttacaaagcttggtaggggaacttgtttgtcctaacgtgttaattgaacacctttctatccatctccggccactaattcctgctatttgaatgagttgtaataagtagtcttagtttacaaaaggaaaaggcagattcctgtaatttaaccaggtggttaacaagcatttagtaaccaattgttcattttccagtgaactgcatcagccaagtgacatatgctttcatcatataactcttaccacaaaaggaaactctagaggcctcagtctttcctccatcatatgaatcctttcatccatttgaaaatgaactaagtcccacaataacatgatatatagcaaccacagagaatatgaccttgaacttttaggtagctttatcttcgtcctagttttatttaccatagtgtttttatggtatacatgtaatggagatacgagtggcctttctgctcgcaactgagatctagatttttatatatgtgatgccttggctcatgcattttgtaatgcatcatgtcatgattctatagcagtattgaaggccatgctttcaatgttgtgatgcagaactttgtattaagtttccaccaatgaaatagattgatagatttcattttagtacttctccagttgatagatttctttttagtacttctccatctagactcatctttagttaatcatgcagatctagccgtacaaataaagtcatctgatcgtgataagagactgagcctactacgaaggttcttcttctggttggagcaaaatgctgtgaagagatttcacccaatcagtgaaaaaatatgtttcttgctgatggctacagtggtttgaaaacaaatcgtccataatatgttggtttagtggtttgcctgcttcatggtgctgtgtaagggaggtcaggagaacttgtgccatgagggagcctacatgccctggatctccaaacctctagcttgcaaccccatttcaccggatggatgaatatgaaccgacgcccactctcatcctcaagacacacgaagatgagccctaggggtgagcggttagcagagatttgcttgcagcatccctgcatctctgatgctacttgactgctccttgtttcgatgcgatgcaaagctgagtctgtaatcttcagtgtctatgcagtactgcagttatttttctgcaggctaaattatacaacatggcaacaaatacagcacggatattgcaaaaatggtactgctagcgttttatcgttacatggatacagcacggatattaccacacggatactg

SEQ ID NO: 83144 - DNA, 2306 bp, Zea Mays
acttcagcacacatcacacagaggtagtgcctacccgcacggccgcacggcagttcgtcaccgtggtggcgtatccgccacaagcccactgcccacaggcccactgctgccgtctcgcctcagggctcaggctgcaggctgacgacgccaacgccgcccctcccggccttggcccaagtcgtcacctcctcgcccctcgcccacggctgcggccacattgtcgccggcttgccaacacgcccgtgtagatcggccgccgcatcgcgccacgccgccgtttcgatcccccgccagggcagcaggcaggcaggtgccctgctcttccagcgcccaggcagaatcacttgcatttttatcttttctcattcaagttctgatcttgcgtttctttagtgactttactatgccacctgttgacggcctcaagcgtaatgttggttaaccactgaatgcttctgtttcctacagaaatccctgtcctagaaattcatttcgtacaaacaaaataactgaaacggaaagaagtggtaacttaggttccgtttttcataatatttctatgcttaataaattcgctccaatttacctcccccagctcagggtagcatgtgtcagttatgatacattgaggtttacgttctcatcacattatttggtaacattggatcgtctgttgctgttggctaccaatatacgtaagaaacattgggtgatctgttagatcacctcagtcactggggaatcattgttggcccttataagaaacccatcttgaatataggaatctggcgatgaagagtaagaaaagtgtgcacggatcatcatgcaagaaggctaagttgtttgacggcctaattggtagacatggttctgaaatagatccatgttataaactttttcttgaacatttaagcaaagatcggaatacatatgtccttgatgtaccaaagggtgaccacggcttgcctttttctgtacgttatgaggaggactatacgtcctatggaaatactaagagcagaagtagtccaaattttcccaaccattcacggcgcacaagttggggcattccagatggcaaacagcctgatgtaaaagctgtcaaggctgccagcagaaatatgtgttgctccttttcaccaaagagatcatatgtgaagaagaagaccacgacctcactagtagatgaatcttatgagttatttctgagccttgtgaagttcaaggatggtttcatggttattgaaccagaaccaggtgtcaccattgtatatgagcgagaagaagatatgccagctggctatgatgaatggagaactggcagttccacaaatgaactgtctttggtgtctccacttgaaaacacggagggagactacaccatgcaaagatatgattatggccttgcaccggctaacaaaatttcttctgaacatgaaatggctgcaccttcttcagagaacattgctggtcaggatattatttgcacagatgagcatggccttgtactttatgctgaaccatctgatttaaatgtaagattcttttgcataatttctggtcctcttcaaatgctgctgcctgttatatagctgcctttttgcccaggcatgtgaagatgaacaagcaacacctcttgctatcagctacggtggttcatctacatttgatgaaaaactcaatgctgttttaagtcaaccatatgatcaaaacgaatacgaagagttgtggagaaaagcgactgaccggaagcctgtgagcagacaaagacacttgcgaagtgcatcaaagcgctatgttacagaggcaatcgggctgtcatatctcgattattaccctgttaatcatgcagatctagccgtacaaataaagtcatctgatcgtgataagagactgagcctactacgaaggttcttcttctggttggagaacttgtgccatgagggagcctacatgccctggatctccaaacctctagcttgcaaccccatttcaccggatggatgaatatgaaccgacgcccactctcatcctcaagacacacgaagatgagccctaggggtgagcggttagcagagatttgcttgcagcatccctgcatctctgatgctacttgactgctccttgtttcgatgcgatgcaaagctgagtctgtaatcttcagtgtctatgcagtactgcagttatttttctgcaggctaaattatacaacatggcaacaaatacagcacggatattgcaaaaatggtactgctagcgttttatcgttacatggatacagcacggatattaccacacggatactg

SEQ ID NO: 83145 - DNA, 654 bp, Zea Mays
ctcaaggttttgctgtcaccctttcctcgttcgtattccctcgatcgcgactggtcatatctgagtgttcggtctgaagtcgtcttgaggatccttgctcctccatctgagcaccttgaagaagaatttgaagttgaagtagaaggggagcctgttcctccatctgaaacttcttcaactgaagctgtcactgaaggtcctccggagggtgtcccatttggatttcctgctaactgcaatatcctggtagaagagccccgactctcctcctcaccaaggcaagccccgatgcatttgccacctcccttgtgtttacaaaattttatcacttatatgctgcattaggtgatagaagttgattgattaaacacttgatgcattaccatccttgaaaggttgattaccacaccttgtcacccgttttataaaagctagagatgcttagtcttgctgatagattaagaaaaatatttttcatctatgactcatgtttttacaaaaaagtaaatgggcttgggataatgaaggcatcaagacgttgataaattaattattcaggcatggcccctctgtcaggcgccaaatttttgaaatagtttaaaatgggaccagacgttgagcaggaaaagtcgcccgtctgtgtcgattaaggac

SEQ ID NO: 83146 - DNA, 1671 bp, Zea Mays
gtggtccaaacaaccaaacagccgctatatagcggactaggggctcgttggagagaaaacttattacaaccgaccaacgcgctttgtaacgcctccgctgcaatcagcccccgcggcgagcttgccctgcccctgattgctagttctcgccgttacgtaaggcttcttggccttgcgtcctccgtctttcgttgctgatacatcgaggcatggcgatttatcggtccaacggtgacgccggctccgtcgctttcgtcgtggtatcttatctcgacctggtggccctgttcgcctgcttgcgctactacgagcagttggatcagcagcactcccaaaagcgcgcgagggtcaaggctggggtttggagcctcacgaccctccttactatcatgttcagttacaaggtggctgagattatgcccctgccagtcaaacttgttgtctggtcgatggcagccgctaccacctgtggcggcttctacgctttcttcgtccacagcgagaagcctgtcatgccagcggtggcgccacggcccgccgcggccaaggatgcagcctccaactagctgtcgcctcggttgttttagcttgccggcgtggacagactggcagatctggagctcggcgcgaccagatccggtgctgctgtgcccgatggcagaggagatctctctggtttactctgctaagagtcaaagaggagctgatgacgacaactaagcttgggttaccgataattgagcctgttctctgcacgagaagaaatttccggcctcacctagtactaataagtatgctggatagtcccccagcacgggagttaattgtatcaagagaagtggagaccaagggcagagtagaactacagaggatatctttgtatatggaggctacatgtgaacaagaaaggagaggaggaagactgtatagatctgaagaacctaaggagaaacaatcagagtacttgctggaacacatatatcttccatgataaaagttagatttcttgtttggtgctcatgcatgggttccatatgttcttcccgtcttattagaacatatctattggactaccatgcataaaaagccgtcgtttcataaactattgggactatacggcaccaatgaagctattgatgctggccggcaagctgacagcgaggtgaaagcttttcaaaacgatattccgagtggaagagaaaagaaaataaaagaaatagcaggttattttagaaaaaaatagttggcccatatgtaacgcgcggtagctttaagattattatgtccagcagcttattcatatattatacatatattcaaatttcactctgtgaatagtagtctaaaatacagtagtgttttgagtaaactatggataaactgctggacaaggtctaagataagtgctgcgtggtggcaacaaacgacacttagtcttgtttggtggcaatgatattggaggggctaaagttttttcgctcctaaacaagctcctaaacaagctcctaagaatcttacgtgttatgttgcattatggaatatctatgtatctgcaaactctctgtagtctgtatgtacctcggatgtgctctatgtggctttgtaattctgaacggaggaagtaataataagataaatggatggcgtaacaagataagttgctttgtgcaa

SEQ ID NO: 83147 - DNA, 1650 bp, Zea Mays
gtggtccaaacaaccaaacagccgctatatagcggactaggggctcgttggagagaaaacttattacaaccgaccaacgcgctttgtaacgcctccgctgcaatcagcccccgcggcgagcttgccctgcccctgattgctagttctcgccgttacgtaaggcttcttggccttgcgtcctccgtctttcgttgctgatacatcgaggcatggcgatttatcggtccaacggtgacgccggctccgtcgctttcgtcgtggtatcttatctcgacctggtggccctgttcgcctgcttgcgctactacgagcagttggatcagcagcactcccaaaagcgcgcgagggtcaaggctggggtttggagcctcacgaccctccttactatcatgttcagttacaaggtggctgagattatgcccctgccagtcaaacttgttgtctggtcgatggcagccgctaccacctgtggcggcttctacgctttcttcgtccacagcgagaagcctgtcatgccagcggtggcgccacggcccgccgcggccaaggatgcagcctccaactagcttgccggcgtggacagactggcagatctggagctcggcgcgaccagatccggtgctgctgtgcccgatggcagaggagatctctctggtttactctgctaagagtcaaagaggagctgatgacgacaactaagcttgggttaccgataattgagcctgttctctgcacgagaagaaatttccggcctcacctagtactaataagtatgctggatagtcccccagcacgggagttaattgtatcaagagaagtggagaccaagggcagagtagaactacagaggatatctttgtatatggaggctacatgtgaacaagaaaggagaggaggaagactgtatagatctgaagaacctaaggagaaacaatcagagtacttgctggaacacatatatcttccatgataaaagttagatttcttgtttggtgctcatgcatgggttccatatgttcttcccgtcttattagaacatatctattggactaccatgcataaaaagccgtcgtttcataaactattgggactatacggcaccaatgaagctattgatgctggccggcaagctgacagcgaggtgaaagcttttcaaaacgatattccgagtggaagagaaaagaaaataaaagaaatagcaggttattttagaaaaaaatagttggcccatatgtaacgcgcggtagctttaagattattatgtccagcagcttattcatatattatacatatattcaaatttcactctgtgaatagtagtctaaaatacagtagtgttttgagtaaactatggataaactgctggacaaggtctaagataagtgctgcgtggtggcaacaaacgacacttagtcttgtttggtggcaatgatattggaggggctaaagttttttcgctcctaaacaagctcctaaacaagctcctaagaatcttacgtgttatgttgcattatggaatatctatgtatctgcaaactctctgtagtctgtatgtacctcggatgtgctctatgtggctttgtaattctgaacggaggaagtaataataagataaatggatggcgtaacaagataagttgctttgtgcaa

SEQ ID NO: 83148 - DNA, 1606 bp, Zea Mays
ctcggactgcccctgctccttgttcctccagctcgctcctgtcagcggttggtatgtatggacgaagaaaagtgaagcccatgcggtgctcgttagatgattgacgaaaagcctaaagccagcatcgtcatgccatcgtctatattgttcggaaatcgtcgtgccggcatgtcagggttgtcgttcgccatcctcgtcctcgccacaagaaactcttggcattctctagcgaagaagcgaggcccgtgtgcatcgctcgtcaagtgttcaatcgaagactttattcagagactcagcgttctcacaagcttaacttaccttggatgagaaatccctgatgttcgagggaagcgaggccggtaagcgttctcgtagggctcgacaaagcacttgaacatcatcgttcttacaaatatcgtgtcgattcggtcatggtaagctggttattaattatgttatttggatttataagtggagaaattagatatatagtaatcgtgatgatcctcgtatttagcgcaggcacgttgtggtggtgttaaatatatgtgaagcacgatggagttagtaatgcgaaaggtagattaattcatgtgatatttgggcgagctagagacgtaaaagataggtttagtatttctatcggctagttaataggtattctagtgttattatgtcgatttggttaattgatgtagtcgatgccctgcttaattaattagcttattctaggtttggtgtttagttcgatatcatgaggaatgtactaattacttcgaataggtttggtgtttagttcgatatcatgaggaatgtactaattacttcgagtaattaacagtgaatggcatcgacctatttaattagtgtggaattcaagataattgggaaatgtgatttaaaagggtaattagattgttcatatgctgattttaagacttcagctttcaataatggtgagtctaactttattagacttccgatgatatattgtaactaaggatgatagtgtgtgtttataatttattcttgcttgataatagaattagatatggttaaacaggaaaaatacgaatgctatagttagtatgtatagtttattattttgtgattattgcgcttagtcgtatgtcgataactggtgtttctgtatgaaatggtacaacgcctcgccgctagttgtttaattcgctatcgtgtagcactatttagttttgtgatattcctgtctatatgcattcatgtgcatcatgtatttcaattaggtacgataattaatcacgtgatgcggaagacgagccaagtcgacccaagatgacgtaacgggtggactaattcgcaaggtgatgcggatggacgaacctgaagatggacagacggagcaagtatcaagacaaaggatggtcgtcaagtggatgtcatctaacaaacattaacgtagtgtttattccaggcaagtcctggtgtatttgccacctccttgctattttaaaatctttatcaccttgtttgatgcattaggtgataggagttgtgtgctaaacaattgttgcatttccttccttagaaaattgaatacccttccttgacacccttttatgaaaag

SEQ ID NO: 83149 - DNA, 1103 bp, Zea Mays
ccggtaccgaccaccatctcccatggcgcccagctcggactgcccctgctccttgttcctccagctcgctcctgtcaggttggttgttggtcgcgttggccgtcgacctcacttaaccctgcgtcgtcgggccagtctcgccgcactcgccagcaccggagcacacgcactgcttctgttcccatggtcgctcgccaggatgctgtccccctgctctatgccgccagcttctgcgtcattgcctacttcgccatcgcgtccgcgctcctcgttcttgccccttgtctttgaattctgaaatgtctaagtcactggagagaagatctcaggtgttttgagtgataggataaagctcctaggtgatggctgtcagctgctcggagatatatttgagccgagatcgttatggtatttgtgaatagttagtcagtcttaatgtggtatgcagcggttggtatgtatggacgaagaaaagtgaagcccatgcggtgctcgttagatgattgacgaaaagcctaaagccagcatcgtcatgccatcgtctatattgttcggaaatcgtcgtgccggcatgtcagggttgtcgttcgccatcctcgtcctcgccacaagaaactcttggcattctctagcgaagaagcgaggcccgtgtgcatcgctcgtcaagtgttcaatcgaagactttattcagagactcagcgttctcacaagcttaacttaccttggatgagaaatccctgatgttcgagggaagcgaggccggtacgataattaatcacgtgatgcggaagacgagccaagtcgacccaagatgacgtaacgggtggactaattcgcaaggtgatgcggatggacgaacctgaagatggacagacggagcaagtatcaagacaaaggatggtcgtcaagtggatgtcatctaacaaacattaacgtagtgtttattccaggcaagtcctggtgtatttgccacctccttgctattttaaaatctttatcaccttgtttgatgcattaggtgataggagttgtgtgctaaacaattgttgcatttccttccttagaaaattgaatacccttccttgacacccttttatgaaaag

SEQ ID NO: 83150 - DNA, 1977 bp, Zea Mays
gtcccatctcctgctcctccacggcgctgagctccaccagttgctggttctaaacgccggtaccgaccaccatctcccatggcgcccagctcggactgcccctgctccttgttcctccagctcgctcctgtcaggttggttgttggtcgcgttggccgtcgacctcacttaaccctgcgtcgtcgggccagtctcgccgcactcgccagcaccggagcacacgcactgcttctgttcccatggtcgctcgccaggatgctgtccccctgctctatgccgccagcttctgcgtcattgcctacttcgccatcgcgtccgcgctcctcgttcttgccccttgtctttgaattctgaaatgtctaagtcactggagagaagatctcaggtgttttgagtgataggataaagctcctaggtgatggctgtcagctgctcggagatatatttgagccgagatcgttatggtatttgtgaatagttagtcagtcttaatgtggtatgcagcggttggtatgtatggacgaagaaaagtgaagcccatgcggtgctcgttagatgattgacgaaaagcctaaagccagcatcgtcatgccatcgtctatattgttcggaaatcgtcgtgccggcatgtcagggttgtcgttcgccatcctcgtcctcgccacaagaaactcttggcattctctagcgaagaagcgaggcccgtgtgcatcgctcgtcaagtgttcaatcgaagactttattcagagactcagcgttctcacaagcttaacttaccttggatgagaaatccctgatgttcgagggaagcgaggccggtaagcgttctcgtagggctcgacaaagcacttgaacatcatcgttcttacaaatatcgtgtcgattcggtcatggcacgttgtggtggtgttaaatatatgtgaagcacgatggagttagtaatgcgaaaggtagattaattcatgtgatatttgggcgagctagagacgtaaaagataggtttagtatttctatcggctagttaataggtattctagtgttattatgtcgatttggttaattgatgtagtcgatgccctgcttaattaattagcttattctaggtttggtgtttagttcgatatcatgaggaatgtactaattacttcgaataggtttggtgtttagttcgatatcatgaggaatgtactaattacttcgagtaattaacagtgaatggcatcgacctatttaattagtgtggaattcaagataattgggaaatgtgatttaaaagggtaattagattgttcatatgctgattttaagacttcagctttcaataatggtgagtctaactttattagacttccgatgatatattgtaactaaggatgatagtgtgtgtttataatttattcttgcttgataatagaattagatatggttaaacaggaaaaatacgaatgctatagttagtatgtatagtttattattttgtgattattgcgcttagtcgtatgtcgataactggtgtttctgtatgaaatggtacaacgcctcgccgctagttgtttaattcgctatcgtgtagcactatttagttttgtgatattcctgtctatatgcattcatgtgcatcatgtatttcaattaggtacgataattaatcacgtgatgcggaagacgagccaagtcgacccaagatgacgtaacgggtggactaattcgcaaggtgatgcggatggacgaacctgaagatggacagacggagcaagtatcaagacaaaggatggtcgtcaagtggatgtcatctaacaaacattaacgtagtgtttattccaggcaagtcctggtgtatttgccacctccttgctattttaaaatctttatcaccttgtttgatgcattaggtgataggagttgtgtgctaaacaattgttgcatttccttccttagaaaattgaatacccttccttgacacccttttatgaaaag

SEQ ID NO: 83151 - DNA, 2476 bp, Zea Mays
atggtcacacggcggctcccaaaccctaaacagcggtggtgcccctacgcttcagcctcgactcagtattcccccttccccgcttcgacaagtctcgtcccccgcccccttattccattacaagcaactccgccggtgccaccgctgctggtgggacaggccgccgccgccgctgctggtgggacctaccgcctcgcgctccgcatccagcgccgcctcatcccgcccaaccaccccaggatacgggacttcgtctacaggtactgccttcgccgagccccgctgtcgtgcgtccgcgctcaggacgccgtcggtcactgccagccaaacaggatcagcgcgagcagccagtgcaggcacatctcctactcctacgccccgttcccgtcggtcactgccaggaggaagggtgtcttccgcgaggacattgcacagctgatggtatcagatgtctgatgtgtcttggtttaataataaagaagcgagcgagcgcagaggaaattgtcactgctgctgcggtttaggatggagtaatattttagccttgattttgacatccttttttgcagagtagtggatcaacattattcaaaattttgctcatgacgtctgatatgtggacagttgccattcaagttttactctatcatcaataggtgaagattcctgatccagaatacttgtgtaagattattaacatgttacccaataataatcttacataatttggcccaacccaaagatacgttaatttaaactccctagattattttgtggaatcccaacagagtttattcatttgcttgtactctatgaagtggaagttcttgagatgccaaaaagcagggaagtgcggacataacagtcaagatgagctacttaaaagtgaggataattcaaaggagcgtggtatcccgagaatatgaacactccagagatgcaatatttgagtggtacttccaaacagtggccactaaccatcatggtgaggatgcatcatcagtagcagtcagaattattttggtgttttgatggcatatggaggcctccaagatgaaccggattctcccattatattctttggatccttgcagcccatatttgatttcaatggctaattgggttattggtcagcttgcgatatgcctaccagaggacatgagttctagtatttatcagtccttaatgaaggcgttgaccatggagtatgtggaggacataacttgttatccggtttgtgcctctgcttctggtgctattgcagaactcatcgagaatagttatgttccacctgactggctcattcttctgcaagtggttctgaaaagaataagtactggagatgaaaatgagtctgctcttctgttcaagcttctgggcacaatagttgagggtggacaggaaaaagttgtttcatattcctgaaattgtatccaacattgcgagtactataatggagctcctgccccctgtcccagatccttggcctcaggttgttgaacagggtttcacagccctcgtagcaatggtgcaagcttgggagagctctgcaccagatgaaaacaagacacctaaaaagaggttctggcagtcaggccagtctgctattgcccaaacaatttcattactgttacaaaaagcttggttgtttcaagctgacaatatggagggctctgcattaccacctctgtcatgcgtaaacgatgcttctgtgttacttgagtttgtcatgagttctgtcacttgcatggaagaaactgaaagtctgaaggtctttgagctggtagctacatgggctaacgctgttgccaactgggactcctgggagatggaggatcagggtgttttcaacacaattaaagaagctgtcaatttccaccagagatttgacctcgacggtctcttcctgaaaacgcactttgtgagatgtcattccactaggtattcattctgtcatggttctgttttaatacacgcaggtcactcaagcagatctaaagttattcttagtccatatatggtgaggttggtcgttctttactccaaacacaatctcccttctgtatagctaaaagtttgcagaaatggcaccatcaagatcggtctggagaccaacaagatcatggacttcatcaagtttgatgtcggcaacgtggtcatgatgaccggtgggaggaacaccaggcgtgtaggagtgatcaagaacagggagaagcacaagggcaacttcgagaccatccacgtgctgcttagagctttttgctatgtctagttttctcctatttgttgtataggaaaacatagaatggaattcaaatttggtggccgcaaaatatggagacttgaattcatataaagttaggcttaacattagtgcaaacaattgtattttagtttagatttagagtacacttatgtatgtgttgtttgacaatgcttatttatgatatattgaatggtacttatttatattata

SEQ ID NO: 83152 - DNA, 2055 bp, Zea Mays
atggtcacacggcggctcccaaaccctaaacagcggtggtgcccctacgcttcagcctcgactcagtattcccccttccccgcttcgacaagtctcgtcccccgcccccttattccattacaagcaactccgccggtgccaccgctgctggtgggacaggccgccgccgccgctgctggtgggacctaccgcctcgcgctccgcatccagcgccgcctcatcccgcccaaccaccccaggatacgggacttcgtctacaggtactgccttcgccgagccccgctgtcgtgcgtccgcgctcaggacgccgtcggtcactgccagccaaacaggatcagcgcgagcagccagtgcaggcacatctcctactcctacgccccgttcccgtcggtcactgccaggaggaagggtgtcttccgcgaggacattgcacagctgatgggaagtgcggacataacagtcaagatgagctacttaaaagtgaggataattcaaaggagcgtggtatcccgagaatatgaacactccagagatgcaatatttgagtggccactaaccatcatggtgaggatgcatcatcagtagcagtcagaattattttggtgttttgatggcatatggaggcctccaagatgaaccggattctcccattatattctttggatccttgcagcccatatttgatttcaatggctaattgggttattggtcagcttgcgatatgcctaccagaggacatgagttctagtatttatcagtccttaatgaaggcgttgaccatggagtatgtggaggacataacttgttatccggtttgtgcctctgcttctggtgctattgcagaactcatcgagaatagttatgttccacctgactggctcattcttctgcaagtggttctgaaaagaataagtactggagatgaaaatgagtctgctcttctgttcaagcttctgggcacaatagttgagggtggacaggaaaaagttgtttcatattcctgaaattgtatccaacattgcgagtactataatggagctcctgccccctgtcccagatccttggcctcaggttgttgaacagggtttcacagccctcgtagcaatggtgcaagcttgggagagctctgcaccagatgaaaacaagacacctaaaaagaggttctggcagtcaggccagtctgctattgcccaaacaatttcattactgttacaaaaagcttggttgtttcaagctgacaatatggagggctctgcattaccacctctgtcatgcgtaaacgatgcttctgtgttacttgagtttgtcatgagttctgtcacttgcatggaagaaactgaaagtctgaaggtctttgagctggtagctacatgggctaacgctgttgccaactgggactcctgggagatggaggatcagggtgttttcaacacaattaaagaagctgtcaatttccaccagagatttgacctcgacggtctcttcctgaaaacgcactttgtgagatgtcattccactaggtattcattctgtcatggttctgttttaatacacgcaggtcactcaagcagatctaaagttattcttagtccatatatggtgaggttggtcgttctttactccaaacacaatctcccttctgtatagctaaaagtttgcagaaatggcaccatcaagatcggtctggagaccaacaagatcatggacttcatcaagtttgatgtcggcaacgtggtcatgatgaccggtgggaggaacaccaggcgtgtaggagtgatcaagaacagggagaagcacaagggcaacttcgagaccatccacgtgctgcttagagctttttgctatgtctagttttctcctatttgttgtataggaaaacatagaatggaattcaaatttggtggccgcaaaatatggagacttgaattcatataaagttaggcttaacattagtgcaaacaattgtattttagtttagatttagagtacacttatgtatgtgttgtttgacaatgcttatttatgatatattgaatggtacttatttatattata

SEQ ID NO: 83153 - DNA, 1944 bp, Zea Mays
atggtcacacggcggctcccaaaccctaaacagcggtggtgcccctacgcttcagcctcgactcagtattcccccttccccgcttcgacaagtctcgtcccccgcccccttattccattacaagcaactccgccggtgccaccgctgctggtgggacaggccgccgccgccgctgctggtgggacctaccgcctcgcgctccgcatccagcgccgcctcatcccgcccaaccaccccaggatacgggacttcgtctacaggtactgccttcgccgagccccgctgtcgtgcgtccgcgctcaggacgccgtcggtcactgccagccaaacaggatcagcgcgagcagccagtgcaggcacatctcctactcctacgccccgttcccgtcggtcactgccaggaggaagggtgtcttccgcgaggacattgcacagctgatgggaagtgcggacataacagtcaagatgagctacttaaaagtgaggataattcaaaggagcgtggtatcccgagaatatgaacactccagagatgcaatatttgagtggtacttccaaacagtggccactaaccatcatggtgaggatgcatcatcagtagcagtcagaattattttggtgttttgatggcatatggaggcctccaagatgaaccggattctcccattatattctttggatccttgcagcccatatttgatttcaatggctaattgggttattggtcagcttgcgatatgcctaccagaggacatgagttctagtatttatcagtccttaatgaaggcgttgaccatggagtatgtggaggacataacttgttatccggtttgtgcctctgcttctggtgctattgcagaactcatcgagaatagttatgttccacctgactggctcattcttctgcaagtggttctgaaaagaataagtactggagatgaaaatgagtctgctcttctgttcaagcttctgggcacaatagttgagggtggacaggaaaaagttgtttcatattcctgaaattgtatccaacattgcgagtactataatggagctcctgccccctgtcccagatccttggcctcaggttgttgaacagggtttcacagccctcgtagcaatggtgcaagcttgggagagctctgcaccagatgaaaacaagacacctaaaaagaggttctggcagtcaggccagtctgctattgcccaaacaatttcattactgttacaaaaagcttggttgtttcaagctgacaatatggagggctctgcattaccacctctgtcatgcgtaaacgatgcttctgtgttacttgagtttgtcatgagttctgtcacttgcatggaagaaactgaaagtctgaaggtctttgagctggtagctacatgggctaacgctgttgccaactgggactcctgggagatggaggatcagggtgttttcaacacaattaaagaagctgtcaatttccaccagagatttgacctcgacggtctcttcctgaaaacgcactttgtgagatgtcattccactagctaaaagtttgcagaaatggcaccatcaagatcggtctggagaccaacaagatcatggacttcatcaagtttgatgtcggcaacgtggtcatgatgaccggtgggaggaacaccaggcgtgtaggagtgatcaagaacagggagaagcacaagggcaacttcgagaccatccacgtgctgcttagagctttttgctatgtctagttttctcctatttgttgtataggaaaacatagaatggaattcaaatttggtggccgcaaaatatggagacttgaattcatataaagttaggcttaacattagtgcaaacaattgtattttagtttagatttagagtacacttatgtatgtgttgtttgacaatgcttatttatgatatattgaatggtacttatttatattata

SEQ ID NO: 83154 - DNA, 1960 bp, Zea Mays
tcacaatggtcacacggcggctcccaaaccctaaacagcggtggtgcccctacgcttcagcctcgactcagtattcccccttccccgcttcgacaagtctcgtcccccgcccccttattccattacaagcaactccgccggtgccaccgctgctggtgggacaggccgccgccgccgctgctggtgggacctaccgcctcgcgctccgcatccagcgccgcctcatcccgcccaaccaccccaggatacgggacttcgtctacaggtactgccttcgccgagccccgctgtcgtgcgtccgcgctcaggacgccgtcggtcactgccagccaaacaggatcagcgcgagcagccagtgcaggcacatctcctactcctacgccccgttcccgtcggtcactgccaggaggaagggtgtcttccgcgaggacattgcacagctgatgagtagtggatcaacattattcaaaattttgctcatgacgtctgatatgtggacagttgccattcaagttttactctatcatcaatagtggaagttcttgagatgccaaaaagcagggaagtgcggacataacagtcaagatgagctacttaaaagtgaggataattcaaaggagcgtggtatcccgagaatatgaacactccagagatgcaatatttgaggaaccggattctcccattatattctttggatccttgcagcccatatttgatttcaatggctaattgggttattggtcagcttgcgatatgcctaccagaggacatgagttctagtatttatcagtccttaatgaaggcgttgaccatggagtatgtggaggacataacttgttatccggtttgtgcctctgcttctggtgctattgcagaactcatcgagaatagttatgttccacctgactggctcattcttctgcaagtggttctgaaaagaataagtactggagatgaaaatgagtctgctcttctgttcaagcttctgggcacaatagttgagggtggacaggaaaaagttgtttcatattcctgaaattgtatccaacattgcgagtactataatggagctcctgccccctgtcccagatccttggcctcaggttgttgaacagggtttcacagccctcgtagcaatggtgcaagcttgggagagctctgcaccagatgaaaacaagacacctaaaaagaggttctggcagtcaggccagtctgctattgcccaaacaatttcattactgttacaaaaagcttggttgtttcaagctgacaatatggagggctctgcattaccacctctgtcatgcgtaaacgatgcttctgtgttacttgagtttgtcatgagttctgtcacttgcatggaagaaactgaaagtctgaaggtctttgagctggtagctacatgggctaacgctgttgccaactgggactcctgggagatggaggatcagggtgttttcaacacaattaaagaagctgtcaatttccaccagagatttgacctcgacggtctcttcctgaaaacgcactttgtgagatgtcattccactagctaaaagtttgcagaaatggcaccatcaagatcggtctggagaccaacaagatcatggacttcatcaagtttgatgtcggcaacgtggtcatgatgaccggtgggaggaacaccaggcgtgtaggagtgatcaagaacagggagaagcacaagggcaacttcgagaccatccacgtgctgcttagagctttttgctatgtctagttttctcctatttgttgtataggaaaacatagaatggaattcaaatttggtggccgcaaaatatggagacttgaattcatataaagttaggcttaacattagtgcaaacaattgtattttagtttagatttagagtacacttatgtatgtgttgtttgacaatgcttatttatgatatattgaatggtacttatttatattata

SEQ ID NO: 83155 - DNA, 2233 bp, Zea Mays
tccatccgtcacaatggtcacacggcggctcccaaaccctaaacagcggtggtgcccctacgcttcagcctcgactcagtattcccccttccccgcttcgacaagtctcgtcccccgcccccttattccattacaagcaactccgccggtgccaccgctgctggtgggacaggccgccgccgccgctgctggtgggacctaccgcctcgcgctccgcatccagcgccgcctcatcccgcccaaccaccccaggatacgggacttcgtctacaggtactgccttcgccgagccccgctgtcgtgcgtccgcgctcaggacgccgtcggtcactgccagccaaacaggatcagcgcgagcagccagtgcaggcacatctcctactcctacgccccgttcccgtcggtcactgccaggaggaagggtgtcttccgcgaggacattgcacagctgatgagtagtggatcaacattattcaaaattttgctcatgacgtctgatatgtggacagttgccattcaagttttactctatcatcaataggtgaagattcctgatccagaatacttgtgtaagattattaacatgttacccaataataatcttacataatttggcccaacccaaagatacgttaatttaaactccctagattattttgtggaatcccaacagagtttattcatttgcttgtactctatgaagtggaagttcttgagatgccaaaaagcagggaagtgcggacataacagtcaagatgagctacttaaaagtgaggataattcaaaggagcgtggtatcccgagaatatgaacactccagagatgcaatatttgagtggccactaaccatcatggtgaggatgcatcatcagtagcagtcagaatatccatcttgcagtttttgactgaaaagaaagatttaacaattacattgatcaggaaccggattctcccattatattctttggatccttgcagcccatatttgatttcaatggctaattgggttattggtcagcttgcgatatgcctaccagaggacatgagttctagtatttatcagtccttaatgaaggcgttgaccatggagtatgtggaggacataacttgttatccggtttgtgcctctgcttctggtgctattgcagaactcatcgagaatagttatgttccacctgactggctcattcttctgcaagtggttctgaaaagaataagtactggagatgaaaatgagtctgctcttctgttcaagcttctgggcacaatagttgagggtggacaggaaaaagttgtttcatattcctgaaattgtatccaacattgcgagtactataatggagctcctgccccctgtcccagatccttggcctcaggttgttgaacagggtttcacagccctcgtagcaatggtgcaagcttgggagagctctgcaccagatgaaaacaagacacctaaaaagaggttctggcagtcaggccagtctgctattgcccaaacaatttcattactgttacaaaaagcttggttgtttcaagctgacaatatggagggctctgcattaccacctctgtcatgcgtaaacgatgcttctgtgttacttgagtttgtcatgagttctgtcacttgcatggaagaaactgaaagtctgaaggtctttgagctggtagctacatgggctaacgctgttgccaactgggactcctgggagatggaggatcagggtgttttcaacacaattaaagaagctgtcaatttccaccagagatttgacctcgacggtctcttcctgaaaacgcactttgtgagatgtcattccactagctaaaagtttgcagaaatggcaccatcaagatcggtctggagaccaacaagatcatggacttcatcaagtttgatgtcggcaacgtggtcatgatgaccggtgggaggaacaccaggcgtgtaggagtgatcaagaacagggagaagcacaagggcaacttcgagaccatccacgtgctgcttagagctttttgctatgtctagttttctcctatttgttgtataggaaaacatagaatggaattcaaatttggtggccgcaaaatatggagacttgaattcatataaagttaggcttaacattagtgcaaacaattgtattttagtttagatttagagtacacttatgtatgtgttgtttgacaatgcttatttatgatatattgaatggtacttatttatattata

SEQ ID NO: 83156 - DNA, 3812 bp, Zea Mays
ctcccttgttcgtccatccgtcacaatggtcacacggcggctcccaaaccctaaacagcggtggtgcccctacgcttcagcctcgactcagtattcccccttccccgcttcgacaagtctcgtcccccgcccccttattccattacaagcaactccgccggtgccaccgctgctggtgggacaggccgccgccgccgctgctggtgggacctaccgcctcgcgctccgcatccagcgccgcctcatcccgcccaaccaccccaggatacgggacttcgtctacaggtactgccttcgccgagccccgctgtcgtgcgtccgcgctcaggacgccgtcggtcactgccagccaaacaggatcagcgcgagcagccagtgcaggcacatctcctactcctacgccccgttcccgtcggtcactgccaggaggaagggtgtcttccgcgaggacattgcacagctgatggtatgtctgatgtgtcttggtttaataataaagaagcgagcgagcgcagaggaaattgtcactgctgctgcggtttaggatggagtaatattttagccttgattttgacatccttttttgcagagtagtggatcaacattattcaaaattttgctcatgacgtctgatatgtggacagttgccattcaagttttactctatcatcaataggtgaagattcctgatccagaatacttgtgtaagattattaacatgttacccaataataatcttacataatttggcccaacccaaagatacgttaatttaaactccctagattattttgtggaatcccaacagagtttattcatttgcttgtactctatgaagtggaagttcttgagatgccaaaaagcagggaagtgcggacataacagtcaagatgagctacttaaaagtgaggataattcaaaggagcgtggtatcccgagaatatgaacactccagagatgcaatatttgaggttagtatgcagtagtcgagcctgttcatagtttattgttcctgttttctaatcttggtcttatgactaataatttttaatgagtggttctaactggactgcatccaaatgtagtcattggctaagccaaaatttgaatttcataaagtaactaagatcggtgtttgtccggattgtgacaaggctgtagctttccccttaatcgatcagaccatatcctaggattaaggatgtgcaacagaacccttttgttgtcgacgatatcaatgagcttcggtttttttcacatccataactatataccaagcctttctgccacatttgcaagccacaccatcgctatgaatagaaaaactattatgctagatccatcttctatccgcatatcataaccataacgggtccttcaaaatttatttgtgacctttatgctttgatatttgattggtaagggtctacaggatcttatgaccttatttaccatcgctctgagttcgcaaggcataaatattatggttcttgtgaactcatcctcctacatgtaacatgtcgagtgaagcccaagcctggcccaacaaggagtcatgttctttgcagaacaacaatagatagatgccatttaaactaagttgatggttgtttcaatataacacttgaaagaacagacccaaggatgtaaactcaagtgttactacccctcatgcaaaactcaaactaacaagaagatggtctccccaaaggcagttgctcacagaaaatttttgggcaactcaatctggtataccatcacatgtcaccaaggtgctatttcaaatcaaaacaagttaaaaatgtacatctaacaaagataccattgtcagatctttatacaacacaacacaccaatgttgctattcaaaaactgttgctacctgcctagagcccagttctccaacctttccatgtccggggctgggtgcctgggtctgcgttaatgctggacagcagcttgtgattgtttagtgtctgaaaactctagcaaaagtctggtggcaaacaaggttctcaatttagacatatcactgtgtggtagcgtttgctccttaattctatttctaaaacatctgcttattggtgtccatgtgctggttcatatgcaatgatgttctttgtttgtgatggaatcttatgattttgctaaaatgtgcattgttttagtggtacttccaaacagtggccactaaccatcatggtgaggatgcatcatcagtagcagtcagaagtaagaaaggcttaaagacgattagacataccactatgtttatttactatactattattttgatgtactaaatgatttcatttgagttattttggtgttttgatggcatatggaggcctccaagattttttgactgaaaagaaagatttaacaattacattgatcaggaaccggattctcccattatattctttggatccttgcagcccatatttgatttcaatggctaattgggttattggtcagcttgcgatatgcctaccagaggacatgagttctagtatttatcagtccttaatgaaggcgttgaccatggagtatgtggaggacataacttgttatccggtttgtgcctctgcttctggtgctattgcagaactcatcgagaatagttatgttccacctgactggctcattcttctgcaagtggttctgaaaagaataagtactggagatgaaaatgagtctgctcttctgttcaagcttctgggcacaatagttgagggtggacaggaaaaagttgtttcatattcctgaaattgtatccaacattgcgagtactataatggagctcctgccccctgtcccagatccttggcctcagaaatgcatgtttccccagtcatgcttggacgatcacctttcatcatatcccattattcctggtgtattttattccttgaggaaatcccaaccacactatttaatatatctgccatgtaggttgttgaacagggtttcacagccctcgtagcaatggtgcaagcttgggagagctctgcaccagatgaaaacaagacacctaaaaagaggttctggcagtcaggccagtctgctattgcccaaacaatttcattactgttacaaaaagcttggttgtttcaagctgacaatatggagggctctgcattaccacctctgtcatgcgtaaacgatgcttctgtgttacttgagtttgtcatgagttctgtcacttgcatggaagaaactgaaagtctgaaggtctttgagctggtagctacatgggctaacgctgttgccaactgggactcctgggagatggaggatcagggtgttttcaacacaattaaagaagctgtcaatttccaccagagatttgacctcgacggtctcttcctgaaaacgcactttgtgagatgtcattccactagctaaaagtttgcagaaatggcaccatcaagatcggtctggagaccaacaagatcatggacttcatcaagtttgatgtcggcaacgtggtcatgatgaccggtgggaggaacaccaggcgtgtaggagtgatcaagaacagggagaagcacaagggcaacttcgagaccatccacgtgctgcttagagctttttgctatgtctagttttctcctatttgttgtataggaaaacatagaatggaattcaaatttggtggccgcaaaatatggagacttgaattcatataaagttaggcttaacattagtgcaaacaattgtattttagtttagatttagagtacacttatgtatgtgttgtttgacaatgcttatttatgatatattgaatggtacttatttatattata

SEQ ID NO: 83157 - DNA, 2363 bp, Zea Mays
cttccctcccttgttcgtccatccgtcacaatggtcacacggcggctcccaaaccctaaacagcggtggtgcccctacgcttcagcctcgactcagtattcccccttccccgcttcgacaagtctcgtcccccgcccccttattccattacaagcaactccgccggtgccaccgctgctggtgggacaggccgccgccgccgctgctggtgggacctaccgcctcgcgctccgcatccagcgccgcctcatcccgcccaaccaccccaggatacgggacttcgtctacaggtactgccttcgccgagccccgctgtcgtgcgtccgcgctcaggacgccgtcggtcactgccagccaaacaggatcagcgcgagcagccagtgcaggcacatctcctactcctacgccccgttcccgtcggtcactgccaggaggaagggtgtcttccgcgaggacattgcacagctgatggtatcagatgtctgatgtgtcttggtttaataataaagaagcgagcgagcgcagaggaaattgtcactgctgctgcggtttaggatggagtaatattttagccttgattttgacatccttttttgcagagtagtggatcaacattattcaaaattttgctcatgacgtctgatatgtggacagttgccattcaagttttactctatcatcaataggtgaagattcctgatccagaatacttgtgtaagattattaacatgttacccaataataatcttacataatttggcccaacccaaagatacgttaatttaaactccctagattattttgtggaatcccaacagagtttattcatttgcttgtactctatgaagtggaagttcttgagatgccaaaaagcagggaagtgcggacataacagtcaagatgagctacttaaaagtgaggataattcaaaggagcgtggtatcccgagaatatgaacactccagagatgcaatatttgagtggccactaaccatcatggtgaggatgcatcatcagtagcagtcagaattattttggtgttttgatggcatatggaggcctccaagatgaaccggattctcccattatattctttggatccttgcagcccatatttgatttcaatggctaattgggttattggtcagcttgcgatatgcctaccagaggacatgagttctagtatttatcagtccttaatgaaggcgttgaccatggagtatgtggaggacataacttgttatccggtttgtgcctctgcttctggtgctattgcagaactcatcgagaatagttatgttccacctgactggctcattcttctgcaagtggttctgaaaagaataagtactggagatgaaaatgagtctgctcttctgttcaagcttctgggcacaatagttgagggtggacaggaaaaagttgtttcatattcctgaaattgtatccaacattgcgagtactataatggagctcctgccccctgtcccagatccttggcctcaggttgttgaacagggtttcacagccctcgtagcaatggtgcaagcttgggagagctctgcaccagatgaaaacaagacacctaaaaagaggttctggcagtcaggccagtctgctattgcccaaacaatttcattactgttacaaaaagcttggttgtttcaagctgacaatatggagggctctgcattaccacctctgtcatgcgtaaacgatgcttctgtgttacttgagtttgtcatgagttctgtcacttgcatggaagaaactgaaagtctgaaggtctttgagctggtagctacatgggctaacgctgttgccaactgggactcctgggagatggaggatcagggtgttttcaacacaattaaagaagctgtcaatttccaccagagatttgacctcgacggtctcttcctgaaaacgcactttgtgagatgtcattccactagctaaaagtttgcagaaatggcaccatcaagatcggtctggagaccaacaagatcatggacttcatcaagtttgatgtcggcaacgtggtcatgatgaccggtgggaggaacaccaggcgtgtaggagtgatcaagaacagggagaagcacaagggcaacttcgagaccatccacgtgctgcttagagctttttgctatgtctagttttctcctatttgttgtataggaaaacatagaatggaattcaaatttggtggccgcaaaatatggagacttgaattcatataaagttaggcttaacattagtgcaaacaattgtattttagtttagatttagagtacacttatgtatgtgttgtttgacaatgcttatttatgatatattgaatggtacttatttatattata

SEQ ID NO: 83158 - DNA, 2614 bp, Zea Mays
cgcttccctcccttgttcgtccatccgtcacaatggtcacacggcggctcccaaaccctaaacagcggtggtgcccctacgcttcagcctcgactcagtattcccccttccccgcttcgacaagtctcgtcccccgcccccttattccattacaagcaactccgccggtgccaccgctgctggtgggacaggccgccgccgccgctgctggtgggacctaccgcctcgcgctccgcatccagcgccgcctcatcccgcccaaccaccccaggatacgggacttcgtctacaggtactgccttcgccgagccccgctgtcgtgcgtccgcgctcaggacgccgtcggtcactgccagccaaacaggatcagcgcgagcagccagtgcaggcacatctcctactcctacgccccgttcccgtcggtcactgccaggaggaagggtgtcttccgcgaggacattgcacagctgatggtatgtctgatgtgtcttggtttaataataaagaagcgagcgagcgcagaggaaattgtcactgctgctgcggtttaggatggagtaatattttagccttgattttgacatccttttttgcagagtagtggatcaacattattcaaaattttgctcatgacgtctgatatgtggacagttgccattcaagttttactctatcatcaataggtgaagattcctgatccagaatacttgtgtaagattattaacatgttacccaataataatcttacataatttggcccaacccaaagatacgttaatttaaactccctagattattttgtggaatcccaacagagtttattcatttgcttgtactctatgaagtggaagttcttgagatgccaaaaagcagggaagtgcggacataacagtcaagatgagctacttaaaagtgaggataattcaaaggagcgtggtatcccgagaatatgaacactccagagatgcaatatttgagtggccactaaccatcatggtgaggatgcatcatcagtagcagtcagaagtaagaaaggcttaaagacgattagacataccactatgtttatttactatactattattttgatgtactaaatgatttcatttgagttattttggtgttttgatggcatatggaggcctccaagattttttgactgaaaagaaagatttaacaattacattgatcaggaaccggattctcccattatattctttggatccttgcagcccatatttgatttcaatggctaattgggttattggtcagcttgcgatatgcctaccagaggacatgagttctagtatttatcagtccttaatgaaggcgttgaccatggagtatgtggaggacataacttgttatccggtttgtgcctctgcttctggtgctattgcagaactcatcgagaatagttatgttccacctgactggctcattcttctgcaagtggttctgaaaagaataagtactggagatgaaaatgagtctgctcttctgttcaagcttctgggcacaatagttgagggtggacaggaaaaagttgtttcatattcctgaaattgtatccaacattgcgagtactataatggagctcctgccccctgtcccagatccttggcctcaggttgttgaacagggtttcacagccctcgtagcaatggtgcaagcttgggagagctctgcaccagatgaaaacaagacacctaaaaagaggttctggcagtcaggccagtctgctattgcccaaacaatttcattactgttacaaaaagcttggttgtttcaagctgacaatatggagggctctgcattaccacctctgtcatgcgtaaacgatgcttctgtgttacttgagtttgtcatgagttctgtcacttgcatggaagaaactgaaagtctgaaggtctttgagctggtagctacatgggctaacgctgttgccaactgggactcctgggagatggaggatcagggtgttttcaacacaattaaagaagctgtcaatttccaccagagatttgacctcgacggtctcttcctgaaaacgcactttgtgagatgtcattccactaggtattcattctgtcatggttctgttttaatacacgcaggtcactcaagcagatctaaagttattcttagtccatatatggtgaggttggtcgttctttactccaaacacaatctcccttctgtatagctaaaagtttgcagaaatggcaccatcaagatcggtctggagaccaacaagatcatggacttcatcaagtttgatgtcggcaacgtggtcatgatgaccggtgggaggaacaccaggcgtgtaggagtgatcaagaacagggagaagcacaagggcaacttcgagaccatccacgtgctgcttagagctttttgctatgtctagttttctcctatttgttgtataggaaaacatagaatggaattcaaatttggtggccgcaaaatatggagacttgaattcatataaagttaggcttaacattagtgcaaacaattgtattttagtttagatttagagtacacttatgtatgtgttgtttgacaatgcttatttatgatatattgaatggtacttatttatattata

SEQ ID NO: 83159 - DNA, 3778 bp, Zea Mays
cgcttccctcccttgttcgtccatccgtcacaatggtcacacggcggctcccaaaccctaaacagcggtggtgcccctacgcttcagcctcgactcagtattcccccttccccgcttcgacaagtctcgtcccccgcccccttattccattacaagcaactccgccggtgccaccgctgctggtgggacaggccgccgccgccgctgctggtgggacctaccgcctcgcgctccgcatccagcgccgcctcatcccgcccaaccaccccaggatacgggacttcgtctacaggtactgccttcgccgagccccgctgtcgtgcgtccgcgctcaggacgccgtcggtcactgccagccaaacaggatcagcgcgagcagccagtgcaggcacatctcctactcctacgccccgttcccgtcggtcactgccaggaggaagggtgtcttccgcgaggacattgcacagctgatggtatgtctgatgtgtcttggtttaataataaagaagcgagcgagcgcagaggaaattgtcactgctgctgcggtttaggatggagtaatattttagccttgattttgacatccttttttgcagagtagtggatcaacattattcaaaattttgctcatgacgtctgatatgtggacagttgccattcaagttttactctatcatcaataggtgaagattcctgatccagaatacttgtgtaagattattaacatgttacccaataataatcttacataatttggcccaacccaaagatacgttaatttaaactccctagattattttgtggaatcccaacagagtttattcatttgcttgtactctatgaagtggaagttcttgagatgccaaaaagcagggaagtgcggacataacagtcaagatgagctacttaaaagtgaggataattcaaaggagcgtggtatcccgagaatatgaacactccagagatgcaatatttgaggttagtatgcagtagtcgagcctgttcatagtttattgttcctgttttctaatcttggtcttatgactaataatttttaatgagtggttctaactggactgcatccaaatgtagtcattggctaagccaaaatttgaatttcataaagtaactaagatcggtgtttgtccggattgtgacaaggctgtagctttccccttaatcgatcagaccatatcctaggattaaggatgtgcaacagaacccttttgttgtcgacgatatcaatgagcttcggtttttttcacatccataactatataccaagcctttctgccacatttgcaagccacaccatcgctatgaatagaaaaactattatgctagatccatcttctatccgcatatcataaccataacgggtccttcaaaatttatttgtgacctttatgctttgatatttgattggtaagggtctacaggatcttatgaccttatttaccatcgctctgagttcgcaaggcataaatattatggttcttgtgaactcatcctcctacatgtaacatgtcgagtgaagcccaagcctggcccaacaaggagtcatgttctttgcagaacaacaatagatagatgccatttaaactaagttgatggttgtttcaatataacacttgaaagaacagacccaaggatgtaaactcaagtgttactacccctcatgcaaaactcaaactaacaagaagatggtctccccaaaggcagttgctcacagaaaatttttgggcaactcaatctggtataccatcacatgtcaccaaggtgctatttcaaatcaaaacaagttaaaaatgtacatctaacaaagataccattgtcagatctttatacaacacaacacaccaatgttgctattcaaaaactgttgctacctgcctagagcccagttctccaacctttccatgtccggggctgggtgcctgggtctgcgttaatgctggacagcagcttgtgattgtttagtgtctgaaaactctagcaaaagtctggtggcaaacaaggttctcaatttagacatatcactgtgtggtagcgtttgctccttaattctatttctaaaacatctgcttattggtgtccatgtgctggttcatatgcaatgatgttctttgtttgtgatggaatcttatgattttgctaaaatgtgcattgttttagtggtacttccaaacagtggccactaaccatcatggtgaggatgcatcatcagtagcagtcagaagtaagaaaggcttaaagacgattagacataccactatgtttatttactatactattattttgatgtactaaatgatttcatttgagttattttggtgttttgatggcatatggaggcctccaagatgaaccggattctcccattatattctttggatccttgcagcccatatttgatttcaatggctaattgggttattggtcagcttgcgatatgcctaccagaggacatgagttctagtatttatcagtccttaatgaaggcgttgaccatggagtatgtggaggacataacttgttatccggtttgtgcctctgcttctggtgctattgcagaactcatcgagaatagttatgttccacctgactggctcattcttctgcaagtggttctgaaaagaataagtactggagatgaaaatgagtctgctcttctgttcaagcttctgggcacaatagttgagggtggacaggaaaaagttgtttcatattcctgaaattgtatccaacattgcgagtactataatggagctcctgccccctgtcccagatccttggcctcagaaatgcatgtttccccagtcatgcttggacgatcacctttcatcatatcccattattcctggtgtattttattccttgaggaaatcccaaccacactatttaatatatctgccatgtaggttgttgaacagggtttcacagccctcgtagcaatggtgcaagcttgggagagctctgcaccagatgaaaacaagacacctaaaaagaggttctggcagtcaggccagtctgctattgcccaaacaatttcattactgttacaaaaagcttggttgtttcaagctgacaatatggagggctctgcattaccacctctgtcatgcgtaaacgatgcttctgtgttacttgagtttgtcatgagttctgtcacttgcatggaagaaactgaaagtctgaaggtctttgagctggtagctacatgggctaacgctgttgccaactgggactcctgggagatggaggatcagggtgttttcaacacaattaaagaagctgtcaatttccaccagagatttgacctcgacggtctcttcctgaaaacgcactttgtgagatgtcattccactagctaaaagtttgcagaaatggcaccatcaagatcggtctggagaccaacaagatcatggacttcatcaagtttgatgtcggcaacgtggtcatgatgaccggtgggaggaacaccaggcgtgtaggagtgatcaagaacagggagaagcacaagggcaacttcgagaccatccacgtgctgcttagagctttttgctatgtctagttttctcctatttgttgtataggaaaacatagaatggaattcaaatttggtggccgcaaaatatggagacttgaattcatataaagttaggcttaacattagtgcaaacaattgtattttagtttagatttagagtacacttatgtatgtgttgtttgacaatgcttatttatgatatattgaatggtacttatttatattata

SEQ ID NO: 83160 - DNA, 3524 bp, Zea Mays
ccgcttccctcccttgttcgtccatccgtcacaatggtcacacggcggctcccaaaccctaaacagcggtggtgcccctacgcttcagcctcgactcagtattcccccttccccgcttcgacaagtctcgtcccccgcccccttattccattacaagcaactccgccggtgccaccgctgctggtgggacaggccgccgccgccgctgctggtgggacctaccgcctcgcgctccgcatccagcgccgcctcatcccgcccaaccaccccaggatacgggacttcgtctacaggtactgccttcgccgagccccgctgtcgtgcgtccgcgctcaggacgccgtcggtcactgccagccaaacaggatcagcgcgagcagccagtgcaggcacatctcctactcctacgccccgttcccgtcggtcactgccaggaggaagggtgtcttccgcgaggacattgcacagctgatgagtagtggatcaacattattcaaaattttgctcatgacgtctgatatgtggacagttgccattcaagttttactctatcatcaatagagtttattcatttgcttgtactctatgaagtggaagttcttgagatgccaaaaagcagggaagtgcggacataacagtcaagatgagctacttaaaagtgaggataattcaaaggagcgtggtatcccgagaatatgaacactccagagatgcaatatttgaggttagtatgcagtagtcgagcctgttcatagtttattgttcctgttttctaatcttggtcttatgactaataatttttaatgagtggttctaactggactgcatccaaatgtagtcattggctaagccaaaatttgaatttcataaagtaactaagatcggtgtttgtccggattgtgacaaggctgtagctttccccttaatcgatcagaccatatcctaggattaaggatgtgcaacagaacccttttgttgtcgacgatatcaatgagcttcggtttttttcacatccataactatataccaagcctttctgccacatttgcaagccacaccatcgctatgaatagaaaaactattatgctagatccatcttctatccgcatatcataaccataacgggtccttcaaaatttatttgtgacctttatgctttgatatttgattggtaagggtctacaggatcttatgaccttatttaccatcgctctgagttcgcaaggcataaatattatggttcttgtgaactcatcctcctacatgtaacatgtcgagtgaagcccaagcctggcccaacaaggagtcatgttctttgcagaacaacaatagatagatgccatttaaactaagttgatggttgtttcaatataacacttgaaagaacagacccaaggatgtaaactcaagtgttactacccctcatgcaaaactcaaactaacaagaagatggtctccccaaaggcagttgctcacagaaaatttttgggcaactcaatctggtataccatcacatgtcaccaaggtgctatttcaaatcaaaacaagttaaaaatgtacatctaacaaagataccattgtcagatctttatacaacacaacacaccaatgttgctattcaaaaactgttgctacctgcctagagcccagttctccaacctttccatgtccggggctgggtgcctgggtctgcgttaatgctggacagcagcttgtgattgtttagtgtctgaaaactctagcaaaagtctggtggcaaacaaggttctcaatttagacatatcactgtgtggtagcgtttgctccttaattctatttctaaaacatctgcttattggtgtccatgtgctggttcatatgcaatgatgttctttgtttgtgatggaatcttatgattttgctaaaatgtgcattgttttagtggtacttccaaacagtggccactaaccatcatggtgaggatgcatcatcagtagcagtcagaagtaagaaaggcttaaagacgattagacataccactatgtttatttactatactattattttgatgtactaaatgatttcatttgagttattttggtgttttgatggcatatggaggcctccaagatgaaccggattctcccattatattctttggatccttgcagcccatatttgatttcaatggctaattgggttattggtcagcttgcgatatgcctaccagaggacatgagttctagtatttatcagtccttaatgaaggcgttgaccatggagtatgtggaggacataacttgttatccggtttgtgcctctgcttctggtgctattgcagaactcatcgagaatagttatgttccacctgactggctcattcttctgcaagtggttctgaaaagaataagtactggagatgaaaatgagtctgctcttctgttcaagcttctgggcacaatagttgagggtggacaggaaaaagttgtttcatattcctgaaattgtatccaacattgcgagtactataatggagctcctgccccctgtcccagatccttggcctcagaaatgcatgtttccccagtcatgcttggacgatcacctttcatcatatcccattattcctggtgtattttattccttgaggaaatcccaaccacactatttaatatatctgccatgtaggttgttgaacagggtttcacagccctcgtagcaatggtgcaagcttgggagagctctgcaccagatgaaaacaagacacctaaaaagaggttctggcagtcaggccagtctgctattgcccaaacaatttcattactgttacaaaaagcttggttgtttcaagctgacaatatggagggctctgcattaccacctctgtcatgcgtaaacgatgcttctgtgttacttgagtttgtcatgagttctgtcacttgcatggaagaaactgaaagtctgaaggtctttgagctggtagctacatgggctaacgctgttgccaactgggactcctgggagatggaggatcagggtgttttcaacacaattaaagaagctgtcaatttccaccagagatttgacctcgacggtctcttcctgaaaacgcactttgtgagatgtcattccactagctaaaagtttgcagaaatggcaccatcaagatcggtctggagaccaacaagatcatggacttcatcaagtttgatgtcggcaacgtggtcatgatgaccggtgggaggaacaccaggcgtgtaggagtgatcaagaacagggagaagcacaagggcaacttcgagaccatccacgtgctgcttagagctttttgctatgtctagttttctcctatttgttgtataggaaaacatagaatggaattcaaatttggtggccgcaaaatatggagacttgaattcatataaagttaggcttaacattagtgcaaacaattgtattttagtttagatttagagtacacttatgtatgtgttgtttgacaatgcttatttatgatatattgaatggtacttatttatattata

SEQ ID NO: 83161 - DNA, 3531 bp, Zea Mays
ggaccccgcttccctcccttgttcgtccatccgtcacaatggtcacacggcggctcccaaaccctaaacagcggtggtgcccctacgcttcagcctcgactcagtattcccccttccccgcttcgacaagtctcgtcccccgcccccttattccattacaagcaactccgccggtgccaccgctgctggtgggacaggccgccgccgccgctgctggtgggacctaccgcctcgcgctccgcatccagcgccgcctcatcccgcccaaccaccccaggatacgggacttcgtctacaggtactgccttcgccgagccccgctgtcgtgcgtccgcgctcaggacgccgtcggtcactgccagccaaacaggatcagcgcgagcagccagtgcaggcacatctcctactcctacgccccgttcccgtcggtcactgccaggaggaagggtgtcttccgcgaggacattgcacagctgatggtatgtctgatgtgtcttggtttaataataaagaagcgagcgagcgcagaggaaattgtcactgctgctgcggtttaggatggagtaatattttagccttgattttgacatccttttttgcagagtagtggatcaacattattcaaaattttgctcatgacgtctgatatgtggacagttgccattcaagttttactctatcatcaataggtgaagattcctgatccagaatacttgttggaagttcttgagatgccaaaaagcagggaagtgcggacataacagtcaagatgagctacttaaaagtgaggataattcaaaggagcgtggtatcccgagaatatgaacactccagagatgcaatatttgaggttagtatgcagtagtcgagcctgttcatagtttattgttcctgttttctaatcttggtcttatgactaataatttttaatgagtggttctaactggactgcatccaaatgtagtcattggctaagccaaaatttgaatttcataaagtaactaagatcggtgtttgtccggattgtgacaaggctgtagctttccccttaatcgatcagaccatatcctaggattaaggatgtgcaacagaacccttttgttgtcgacgatatcaatgagcttcggtttttttcacatccataactatataccaagcctttctgccacatttgcaagccacaccatcgctatgaatagaaaaactattatgctagatccatcttctatccgcatatcataaccataacgggtccttcaaaatttatttgtgacctttatgctttgatatttgattggtaagggtctacaggatcttatgaccttatttaccatcgctctgagttcgcaaggcataaatattatggttcttgtgaactcatcctcctacatgtaacatgtcgagtgaagcccaagcctggcccaacaaggagtcatgttctttgcagaacaacaatagatagatgccatttaaactaagttgatggttgtttcaatataacacttgaaagaacagacccaaggatgtaaactcaagtgttactacccctcatgcaaaactcaaactaacaagaagatggtctccccaaaggcagttgctcacagaaaatttttgggcaactcaatctggtataccatcacatgtcaccaaggtgctatttcaaatcaaaacaagttaaaaatgtacatctaacaaagataccattgtcagatctttatacaacacaacacaccaatgttgctattcaaaaactgttgctacctgcctagagcccagttctccaacctttccatgtccggggctgggtgcctgggtctgcgttaatgctggacagcagcttgtgattgtttagtgtctgaaaactctagcaaaagtctggtggcaaacaaggttctcaatttagacatatcactgtgtggtagcgtttgctccttaattctatttctaaaacatctgcttattggtgtccatgtgctggttcatatgcaatgatgttctttgtttgtgatggaatcttatgattttgctaaaatgtgcattgttttagtggtacttccaaacagtggccactaaccatcatggtgaggatgcatcatcagtagcagtcagaagtaagaaaggcttaaagacgattagacataccactatgtttatttactatactattattttgatgtactaaatgatttcatttgagttattttggtgttttgatggcatatggaggcctccaagatgaaccggattctcccattatattctttggatccttgcagcccatatttgatttcaatggctaattgggttattggtcagcttgcgatatgcctaccagaggacatgagttctagtatttatcagtccttaatgaaggcgttgaccatggagtatgtggaggacataacttgttatccggtttgtgcctctgcttctggtgctattgcagaactcatcgagaatagttatgttccacctgactggctcattcttctgcaagtggttctgaaaagaataagtactggagatgaaaatgagtctgctcttctgttcaagcttctgggcacaatagttgagggtggacaggaaaaagttgtttcatattcctgaaattgtatccaacattgcgagtactataatggagctcctgccccctgtcccagatccttggcctcaggttgttgaacagggtttcacagccctcgtagcaatggtgcaagcttgggagagctctgcaccagatgaaaacaagacacctaaaaagaggttctggcagtcaggccagtctgctattgcccaaacaatttcattactgttacaaaaagcttggttgtttcaagctgacaatatggagggctctgcattaccacctctgtcatgcgtaaacgatgcttctgtgttacttgagtttgtcatgagttctgtcacttgcatggaagaaactgaaagtctgaaggtctttgagctggtagctacatgggctaacgctgttgccaactgggactcctgggagatggaggatcagggtgttttcaacacaattaaagaagctgtcaatttccaccagagatttgacctcgacggtctcttcctgaaaacgcactttgtgagatgtcattccactagctaaaagtttgcagaaatggcaccatcaagatcggtctggagaccaacaagatcatggacttcatcaagtttgatgtcggcaacgtggtcatgatgaccggtgggaggaacaccaggcgtgtaggagtgatcaagaacagggagaagcacaagggcaacttcgagaccatccacgtgctgcttagagctttttgctatgtctagttttctcctatttgttgtataggaaaacatagaatggaattcaaatttggtggccgcaaaatatggagacttgaattcatataaagttaggcttaacattagtgcaaacaattgtattttagtttagatttagagtacacttatgtatgtgttgtttgacaatgcttatttatgatatattgaatggtacttatttatattata

SEQ ID NO: 83162 - DNA, 3381 bp, Zea Mays
ggaccccgcttccctcccttgttcgtccatccgtcacaatggtcacacggcggctcccaaaccctaaacagcggtggtgcccctacgcttcagcctcgactcagtattcccccttccccgcttcgacaagtctcgtcccccgcccccttattccattacaagcaactccgccggtgccaccgctgctggtgggacaggccgccgccgccgctgctggtgggacctaccgcctcgcgctccgcatccagcgccgcctcatcccgcccaaccaccccaggatacgggacttcgtctacaggtactgccttcgccgagccccgctgtcgtgcgtccgcgctcaggacgccgtcggtcactgccagccaaacaggatcagcgcgagcagccagtgcaggcacatctcctactcctacgccccgttcccgtcggtcactgccaggaggaagggtgtcttccgcgaggacattgcacagctgatgagtagtggatcaacattattcaaaattttgctcatgacgtctgatatgtggacagttgccattcaagttttactctatcatcaatagtggaagttcttgagatgccaaaaagcagggaagtgcggacataacagtcaagatgagctacttaaaagtgaggataattcaaaggagcgtggtatcccgagaatatgaacactccagagatgcaatatttgaggttagtatgcagtagtcgagcctgttcatagtttattgttcctgttttctaatcttggtcttatgactaataatttttaatgagtggttctaactggactgcatccaaatgtagtcattggctaagccaaaatttgaatttcataaagtaactaagatcggtgtttgtccggattgtgacaaggctgtagctttccccttaatcgatcagaccatatcctaggattaaggatgtgcaacagaacccttttgttgtcgacgatatcaatgagcttcggtttttttcacatccataactatataccaagcctttctgccacatttgcaagccacaccatcgctatgaatagaaaaactattatgctagatccatcttctatccgcatatcataaccataacgggtccttcaaaatttatttgtgacctttatgctttgatatttgattggtaagggtctacaggatcttatgaccttatttaccatcgctctgagttcgcaaggcataaatattatggttcttgtgaactcatcctcctacatgtaacatgtcgagtgaagcccaagcctggcccaacaaggagtcatgttctttgcagaacaacaatagatagatgccatttaaactaagttgatggttgtttcaatataacacttgaaagaacagacccaaggatgtaaactcaagtgttactacccctcatgcaaaactcaaactaacaagaagatggtctccccaaaggcagttgctcacagaaaatttttgggcaactcaatctggtataccatcacatgtcaccaaggtgctatttcaaatcaaaacaagttaaaaatgtacatctaacaaagataccattgtcagatctttatacaacacaacacaccaatgttgctattcaaaaactgttgctacctgcctagagcccagttctccaacctttccatgtccggggctgggtgcctgggtctgcgttaatgctggacagcagcttgtgattgtttagtgtctgaaaactctagcaaaagtctggtggcaaacaaggttctcaatttagacatatcactgtgtggtagcgtttgctccttaattctatttctaaaacatctgcttattggtgtccatgtgctggttcatatgcaatgatgttctttgtttgtgatggaatcttatgattttgctaaaatgtgcattgttttagtggtacttccaaacagtggccactaaccatcatggtgaggatgcatcatcagtagcagtcagaagaaccggattctcccattatattctttggatccttgcagcccatatttgatttcaatggctaattgggttattggtcagcttgcgatatgcctaccagaggacatgagttctagtatttatcagtccttaatgaaggcgttgaccatggagtatgtggaggacataacttgttatccggtttgtgcctctgcttctggtgctattgcagaactcatcgagaatagttatgttccacctgactggctcattcttctgcaagtggttctgaaaagaataagtactggagatgaaaatgagtctgctcttctgttcaagcttctgggcacaatagttgagggtggacaggaaaaagttgtttcatattcctgaaattgtatccaacattgcgagtactataatggagctcctgccccctgtcccagatccttggcctcaggttgttgaacagggtttcacagccctcgtagcaatggtgcaagcttgggagagctctgcaccagatgaaaacaagacacctaaaaagaggttctggcagtcaggccagtctgctattgcccaaacaatttcattactgttacaaaaagcttggttgtttcaagctgacaatatggagggctctgcattaccacctctgtcatgcgtaaacgatgcttctgtgttacttgagtttgtcatgagttctgtcacttgcatggaagaaactgaaagtctgaaggtctttgagctggtagctacatgggctaacgctgttgccaactgggactcctgggagatggaggatcagggtgttttcaacacaattaaagaagctgtcaatttccaccagagatttgacctcgacggtctcttcctgaaaacgcactttgtgagatgtcattccactaggtattcattctgtcatggttctgttttaatacacgcaggtcactcaagcagatctaaagttattcttagtccatatatggtgaggttggtcgttctttactccaaacacaatctcccttctgtatagctaaaagtttgcagaaatggcaccatcaagatcggtctggagaccaacaagatcatggacttcatcaagtttgatgtcggcaacgtggtcatgatgaccggtgggaggaacaccaggcgtgtaggagtgatcaagaacagggagaagcacaagggcaacttcgagaccatccacgtgctgcttagagctttttgctatgtctagttttctcctatttgttgtataggaaaacatagaatggaattcaaatttggtggccgcaaaatatggagacttgaattcatataaagttaggcttaacattagtgcaaacaattgtattttagtttagatttagagtacacttatgtatgtgttgtttgacaatgcttatttatgatatattgaatggtacttatttatattata

SEQ ID NO: 83163 - DNA, 3553 bp, Zea Mays
gtttggaccccgcttccctcccttgttcgtccatccgtcacaatggtcacacggcggctcccaaaccctaaacagcggtggtgcccctacgcttcagcctcgactcagtattcccccttccccgcttcgacaagtctcgtcccccgcccccttattccattacaagcaactccgccggtgccaccgctgctggtgggacaggccgccgccgccgctgctggtgggacctaccgcctcgcgctccgcatccagcgccgcctcatcccgcccaaccaccccaggatacgggacttcgtctacaggtactgccttcgccgagccccgctgtcgtgcgtccgcgctcaggacgccgtcggtcactgccagccaaacaggatcagcgcgagcagccagtgcaggcacatctcctactcctacgccccgttcccgtcggtcactgccaggaggaagggtgtcttccgcgaggacattgcacagctgatggtatcagatgtctgatgtgtcttggtttaataataaagaagcgagcgagcgcagaggaaattgtcactgctgctgcggtttaggatggagtaatattttagccttgattttgacatccttttttgcagagtagtggatcaacattattcaaaattttgctcatgacgtctgatatgtggacagttgccattcaagttttactctatcatcaatagtggaagttcttgagatgccaaaaagcagggaagtgcggacataacagtcaagatgagctacttaaaagtgaggataattcaaaggagcgtggtatcccgagaatatgaacactccagagatgcaatatttgaggttagtatgcagtagtcgagcctgttcatagtttattgttcctgttttctaatcttggtcttatgactaataatttttaatgagtggttctaactggactgcatccaaatgtagtcattggctaagccaaaatttgaatttcataaagtaactaagatcggtgtttgtccggattgtgacaaggctgtagctttccccttaatcgatcagaccatatcctaggattaaggatgtgcaacagaacccttttgttgtcgacgatatcaatgagcttcggtttttttcacatccataactatataccaagcctttctgccacatttgcaagccacaccatcgctatgaatagaaaaactattatgctagatccatcttctatccgcatatcataaccataacgggtccttcaaaatttatttgtgacctttatgctttgatatttgattggtaagggtctacaggatcttatgaccttatttaccatcgctctgagttcgcaaggcataaatattatggttcttgtgaactcatcctcctacatgtaacatgtcgagtgaagcccaagcctggcccaacaaggagtcatgttctttgcagaacaacaatagatagatgccatttaaactaagttgatggttgtttcaatataacacttgaaagaacagacccaaggatgtaaactcaagtgttactacccctcatgcaaaactcaaactaacaagaagatggtctccccaaaggcagttgctcacagaaaatttttgggcaactcaatctggtataccatcacatgtcaccaaggtgctatttcaaatcaaaacaagttaaaaatgtacatctaacaaagataccattgtcagatctttatacaacacaacacaccaatgttgctattcaaaaactgttgctacctgcctagagcccagttctccaacctttccatgtccggggctgggtgcctgggtctgcgttaatgctggacagcagcttgtgattgtttagtgtctgaaaactctagcaaaagtctggtggcaaacaaggttctcaatttagacatatcactgtgtggtagcgtttgctccttaattctatttctaaaacatctgcttattggtgtccatgtgctggttcatatgcaatgatgttctttgtttgtgatggaatcttatgattttgctaaaatgtgcattgttttagtggtacttccaaacagtggccactaaccatcatggtgaggatgcatcatcagtagcagtcagaagtaagaaaggcttaaagacgattagacataccactatgtttatttactatactattattttgatgtactaaatgatttcatttgagttattttggtgttttgatggcatatggaggcctccaagattttttgactgaaaagaaagatttaacaattacattgatcaggaaccggattctcccattatattctttggatccttgcagcccatatttgatttcaatggctaattgggttattggtcagcttgcgatatgcctaccagaggacatgagttctagtatttatcagtccttaatgaaggcgttgaccatggagtatgtggaggacataacttgttatccggtttgtgcctctgcttctggtgctattgcagaactcatcgagaatagttatgttccacctgactggctcattcttctgcaagtggttctgaaaagaataagtactggagatgaaaatgagtctgctcttctgttcaagcttctgggcacaatagttgagggtggacaggaaaaagttgtttcatattcctgaaattgtatccaacattgcgagtactataatggagctcctgccccctgtcccagatccttggcctcaggttgttgaacagggtttcacagccctcgtagcaatggtgcaagcttgggagagctctgcaccagatgaaaacaagacacctaaaaagaggttctggcagtcaggccagtctgctattgcccaaacaatttcattactgttacaaaaagcttggttgtttcaagctgacaatatggagggctctgcattaccacctctgtcatgcgtaaacgatgcttctgtgttacttgagtttgtcatgagttctgtcacttgcatggaagaaactgaaagtctgaaggtctttgagctggtagctacatgggctaacgctgttgccaactgggactcctgggagatggaggatcagggtgttttcaacacaattaaagaagctgtcaatttccaccagagatttgacctcgacggtctcttcctgaaaacgcactttgtgagatgtcattccactagctaaaagtttgcagaaatggcaccatcaagatcggtctggagaccaacaagatcatggacttcatcaagtttgatgtcggcaacgtggtcatgatgaccggtgggaggaacaccaggcgtgtaggagtgatcaagaacagggagaagcacaagggcaacttcgagaccatccacgtgctgcttagagctttttgctatgtctagttttctcctatttgttgtataggaaaacatagaatggaattcaaatttggtggccgcaaaatatggagacttgaattcatataaagttaggcttaacattagtgcaaacaattgtattttagtttagatttagagtacacttatgtatgtgttgtttgacaatgcttatttatgatatattgaatggtacttatttatattata

SEQ ID NO: 83164 - DNA, 2276 bp, Zea Mays
gtttggaccccgcttccctcccttgttcgtccatccgtcacaatggtcacacggcggctcccaaaccctaaacagcggtggtgcccctacgcttcagcctcgactcagtattcccccttccccgcttcgacaagtctcgtcccccgcccccttattccattacaagcaactccgccggtgccaccgctgctggtgggacaggccgccgccgccgctgctggtgggacctaccgcctcgcgctccgcatccagcgccgcctcatcccgcccaaccaccccaggatacgggacttcgtctacaggtactgccttcgccgagccccgctgtcgtgcgtccgcgctcaggacgccgtcggtcactgccagccaaacaggatcagcgcgagcagccagtgcaggcacatctcctactcctacgccccgttcccgtcggtcactgccaggaggaagggtgtcttccgcgaggacattgcacagctgatgagtagtggatcaacattattcaaaattttgctcatgacgtctgatatgtggacagttgccattcaagttttactctatcatcaataggtgaagattcctgatccagaatacttgtgtaagattattaacatgttacccaataataatcttacataatttggcccaacccaaagatacgttaatttaaactccctagattattttgtggaatcccaacagagtttattcatttgcttgtactctatgaagtggaagttcttgagatgccaaaaagcagggaagtgcggacataacagtcaagatgagctacttaaaagtgaggataattcaaaggagcgtggtatcccgagaatatgaacactccagagatgcaatatttgagtggtacttccaaacagtggccactaaccatcatggtgaggatgcatcatcagtagcagtcagtatccatcttgcagtttttgactgaaaagaaagatttaacaattacattgatcaggaaccggattctcccattatattctttggatccttgcagcccatatttgatttcaatggctaattgggttattggtcagcttgcgatatgcctaccagaggacatgagttctagtatttatcagtccttaatgaaggcgttgaccatggagtatgtggaggacataacttgttatccggtttgtgcctctgcttctggtgctattgcagaactcatcgagaatagttatgttccacctgactggctcattcttctgcaagtggttctgaaaagaataagtactggagatgaaaatgagtctgctcttctgttcaagcttctgggcacaatagttgagggtggacaggaaaaagttgtttcatattcctgaaattgtatccaacattgcgagtactataatggagctcctgccccctgtcccagatccttggcctcaggttgttgaacagggtttcacagccctcgtagcaatggtgcaagcttgggagagctctgcaccagatgaaaacaagacacctaaaaagaggttctggcagtcaggccagtctgctattgcccaaacaatttcattactgttacaaaaagcttggttgtttcaagctgacaatatggagggctctgcattaccacctctgtcatgcgtaaacgatgcttctgtgttacttgagtttgtcatgagttctgtcacttgcatggaagaaactgaaagtctgaaggtctttgagctggtagctacatgggctaacgctgttgccaactgggactcctgggagatggaggatcagggtgttttcaacacaattaaagaagctgtcaatttccaccagagatttgacctcgacggtctcttcctgaaaacgcactttgtgagatgtcattccactagctaaaagtttgcagaaatggcaccatcaagatcggtctggagaccaacaagatcatggacttcatcaagtttgatgtcggcaacgtggtcatgatgaccggtgggaggaacaccaggcgtgtaggagtgatcaagaacagggagaagcacaagggcaacttcgagaccatccacgtgctgcttagagctttttgctatgtctagttttctcctatttgttgtataggaaaacatagaatggaattcaaatttggtggccgcaaaatatggagacttgaattcatataaagttaggcttaacattagtgcaaacaattgtattttagtttagatttagagtacacttatgtatgtgttgtttgacaatgcttatttatgatatattgaatggtacttatttatattata

SEQ ID NO: 83165 - DNA, 3802 bp, Zea Mays
gtttggaccccgcttccctcccttgttcgtccatccgtcacaatggtcacacggcggctcccaaaccctaaacagcggtggtgcccctacgcttcagcctcgactcagtattcccccttccccgcttcgacaagtctcgtcccccgcccccttattccattacaagcaactccgccggtgccaccgctgctggtgggacaggccgccgccgccgctgctggtgggacctaccgcctcgcgctccgcatccagcgccgcctcatcccgcccaaccaccccaggatacgggacttcgtctacaggtactgccttcgccgagccccgctgtcgtgcgtccgcgctcaggacgccgtcggtcactgccagccaaacaggatcagcgcgagcagccagtgcaggcacatctcctactcctacgccccgttcccgtcggtcactgccaggaggaagggtgtcttccgcgaggacattgcacagctgatgagtagtggatcaacattattcaaaattttgctcatgacgtctgatatgtggacagttgccattcaagttttactctatcatcaataggtgaagattcctgatccagaatacttgtgtaagattattaacatgttacccaataataatcttacataatttggcccaacccaaagatacgttaatttaaactccctagattattttgtggaatcccaacagagtttattcatttgcttgtactctatgaagtggaagttcttgagatgccaaaaagcagggaagtgcggacataacagtcaagatgagctacttaaaagtgaggataattcaaaggagcgtggtatcccgagaatatgaacactccagagatgcaatatttgaggttagtatgcagtagtcgagcctgttcatagtttattgttcctgttttctaatcttggtcttatgactaataatttttaatgagtggttctaactggactgcatccaaatgtagtcattggctaagccaaaatttgaatttcataaagtaactaagatcggtgtttgtccggattgtgacaaggctgtagctttccccttaatcgatcagaccatatcctaggattaaggatgtgcaacagaacccttttgttgtcgacgatatcaatgagcttcggtttttttcacatccataactatataccaagcctttctgccacatttgcaagccacaccatcgctatgaatagaaaaactattatgctagatccatcttctatccgcatatcataaccataacgggtccttcaaaatttatttgtgacctttatgctttgatatttgattggtaagggtctacaggatcttatgaccttatttaccatcgctctgagttcgcaaggcataaatattatggttcttgtgaactcatcctcctacatgtaacatgtcgagtgaagcccaagcctggcccaacaaggagtcatgttctttgcagaacaacaatagatagatgccatttaaactaagttgatggttgtttcaatataacacttgaaagaacagacccaaggatgtaaactcaagtgttactacccctcatgcaaaactcaaactaacaagaagatggtctccccaaaggcagttgctcacagaaaatttttgggcaactcaatctggtataccatcacatgtcaccaaggtgctatttcaaatcaaaacaagttaaaaatgtacatctaacaaagataccattgtcagatctttatacaacacaacacaccaatgttgctattcaaaaactgttgctacctgcctagagcccagttctccaacctttccatgtccggggctgggtgcctgggtctgcgttaatgctggacagcagcttgtgattgtttagtgtctgaaaactctagcaaaagtctggtggcaaacaaggttctcaatttagacatatcactgtgtggtagcgtttgctccttaattctatttctaaaacatctgcttattggtgtccatgtgctggttcatatgcaatgatgttctttgtttgtgatggaatcttatgattttgctaaaatgtgcattgttttagtggtacttccaaacagtggccactaaccatcatggtgaggatgcatcatcagtagcagtcagaagtaagaaaggcttaaagacgattagacataccactatgtttatttactatactattattttgatgtactaaatgatttcatttgagttattttggtgttttgatggcatatggaggcctccaagatgtaagatattcaaaatttacccttctagtgtgtcttattttatgaattggttttataagaaaatgctgattcatttcagtatccatcttgcagtttttgactgaaaagaaagatttaacaattacattgatcaggaaccggattctcccattatattctttggatccttgcagcccatatttgatttcaatggctaattgggttattggtcagcttgcgatatgcctaccagaggacatgagttctagtatttatcagtccttaatgaaggcgttgaccatggagtatgtggaggacataacttgttatccggtttgtgcctctgcttctggtgctattgcagaactcatcgagaatagttatgttccacctgactggctcattcttctgcaagtggttctgaaaagaataagtactggagatgaaaatgagtctgctcttctgttcaagcttctgggcacaatagttgagggtggacaggaaaaagttgtttcatattcctgaaattgtatccaacattgcgagtactataatggagctcctgccccctgtcccagatccttggcctcaggtaaaatgcatgtttccccagtcatgcttggacgatcacctttcatcatatcccattattcctggtgtattttattccttgaggaaatcccaaccacactatttaatatatctgccatgtaggttgttgaacagggtttcacagccctcgtagcaatggtgcaagcttgggagagctctgcaccagatgaaaacaagacacctaaaaagaggttctggcagtcaggccagtctgctattgcccaaacaatttcattactgttacaaaaagcttggttgtttcaagctgacaatatggagggctctgcattaccacctctgtcatgcgtaaacgatgcttctgtgttacttgagtttgtcatgagttctgtcacttgcatggaagaaactgaaagtctgaaggtctttgagctggtagctacatgggctaacgctgttgccaactgggactcctgggagatggaggatcagggtgttttcaacacaattaaagaagctgtcaatttccaccagagatttgacctcgacggtctcttcctgaaaacgcactttgtgagatgtcattccactagctaaaagtttgcagaaatggcaccatcaagatcggtctggagaccaacaagatcatggacttcatcaagtttgatgtcggcaacgtggtcatgatgaccggtgggaggaacaccaggcgtgtaggagtgatcaagaacagggagaagcacaagggcaacttcgagaccatccacgtgctgcttagagctttttgctatgtctagttttctcctatttgttgtataggaaaacatagaatggaattcaaatttggtggccgcaaaatatggagacttgaattcatataaagttaggcttaacattagtgcaaacaattgtattttagtttagatttagagtacacttatgtatgtgttgtttgacaatgcttatttatgatatattgaatggtacttatttatattata

SEQ ID NO: 83166 - DNA, 3381 bp, Zea Mays
gtttggaccccgcttccctcccttgttcgtccatccgtcacaatggtcacacggcggctcccaaaccctaaacagcggtggtgcccctacgcttcagcctcgactcagtattcccccttccccgcttcgacaagtctcgtcccccgcccccttattccattacaagcaactccgccggtgccaccgctgctggtgggacaggccgccgccgccgctgctggtgggacctaccgcctcgcgctccgcatccagcgccgcctcatcccgcccaaccaccccaggatacgggacttcgtctacaggtactgccttcgccgagccccgctgtcgtgcgtccgcgctcaggacgccgtcggtcactgccagccaaacaggatcagcgcgagcagccagtgcaggcacatctcctactcctacgccccgttcccgtcggtcactgccaggaggaagggtgtcttccgcgaggacattgcacagctgatggttggatcaacattattcaaaattttgctcatgacgtctgatatgtggacagttgccattcaagttttactctatcatcaatagtggaagttcttgagatgccaaaaagcagggaagtgcggacataacagtcaagatgagctacttaaaagtgaggataattcaaaggagcgtggtatcccgagaatatgaacactccagagatgcaatatttgaggttagtatgcagtagtcgagcctgttcatagtttattgttcctgttttctaatcttggtcttatgactaataatttttaatgagtggttctaactggactgcatccaaatgtagtcattggctaagccaaaatttgaatttcataaagtaactaagatcggtgtttgtccggattgtgacaaggctgtagctttccccttaatcgatcagaccatatcctaggattaaggatgtgcaacagaacccttttgttgtcgacgatatcaatgagcttcggtttttttcacatccataactatataccaagcctttctgccacatttgcaagccacaccatcgctatgaatagaaaaactattatgctagatccatcttctatccgcatatcataaccataacgggtccttcaaaatttatttgtgacctttatgctttgatatttgattggtaagggtctacaggatcttatgaccttatttaccatcgctctgagttcgcaaggcataaatattatggttcttgtgaactcatcctcctacatgtaacatgtcgagtgaagcccaagcctggcccaacaaggagtcatgttctttgcagaacaacaatagatagatgccatttaaactaagttgatggttgtttcaatataacacttgaaagaacagacccaaggatgtaaactcaagtgttactacccctcatgcaaaactcaaactaacaagaagatggtctccccaaaggcagttgctcacagaaaatttttgggcaactcaatctggtataccatcacatgtcaccaaggtgctatttcaaatcaaaacaagttaaaaatgtacatctaacaaagataccattgtcagatctttatacaacacaacacaccaatgttgctattcaaaaactgttgctacctgcctagagcccagttctccaacctttccatgtccggggctgggtgcctgggtctgcgttaatgctggacagcagcttgtgattgtttagtgtctgaaaactctagcaaaagtctggtggcaaacaaggttctcaatttagacatatcactgtgtggtagcgtttgctccttaattctatttctaaaacatctgcttattggtgtccatgtgctggttcatatgcaatgatgttctttgtttgtgatggaatcttatgattttgctaaaatgtgcattgttttagtggtacttccaaacagtggccactaaccatcatggtgaggatgcatcatcagtagcagtcagaagtaagaaaggcttaaagacgattagacataccactatgtttatttactatactattattttgatgtactaaatgatttcatttgagttattttggtgttttgatggcatatggaggcctccaagatgaaccggattctcccattatattctttggatccttgcagcccatatttgatttcaatggctaattgggttattggtcagcttgcgatatgcctaccagaggacatgagttctagtatttatcagtccttaatgaaggcgttgaccatggagtatgtggaggacataacttgttatccggtttgtgcctctgcttctggtgctattgcagaactcatcgagaatagttatgttccacctgactggctcattcttctgcaagtggttctgaaaagaataagtactggagatgaaaatgagtctgctcttctgttcaagcttctgggcacaatagttgagggtggacaggaaaaagttgtttcatattcctgaaattgtatccaacattgcgagtactataatggagctcctgccccctgtcccagatccttggcctcaggttgttgaacagggtttcacagccctcgtagcaatggtgcaagcttgggagagctctgcaccagatgaaaacaagacacctaaaaagaggttctggcagtcaggccagtctgctattgcccaaacaatttcattactgttacaaaaagcttggttgtttcaagctgacaatatggagggctctgcattaccacctctgtcatgcgtaaacgatgcttctgtgttacttgagtttgtcatgagttctgtcacttgcatggaagaaactgaaagtctgaaggtctttgagctggtagctacatgggctaacgctgttgccaactgggactcctgggagatggaggatcagggtgttttcaacacaattaaagaagctgtcaatttccaccagagatttgacctcgacggtctcttcctgaaaacgcactttgtgagatgtcattccactagctaaaagtttgcagaaatggcaccatcaagatcggtctggagaccaacaagatcatggacttcatcaagtttgatgtcggcaacgtggtcatgatgaccggtgggaggaacaccaggcgtgtaggagtgatcaagaacagggagaagcacaagggcaacttcgagaccatccacgtgctgcttagagctttttgctatgtctagttttctcctatttgttgtataggaaaacatagaatggaattcaaatttggtggccgcaaaatatggagacttgaattcatataaagttaggcttaacattagtgcaaacaattgtattttagtttagatttagagtacacttatgtatgtgttgtttgacaatgcttatttatgatatattgaatggtacttatttatattata

SEQ ID NO: 83167 - DNA, 3676 bp, Zea Mays
gtttggaccccgcttccctcccttgttcgtccatccgtcacaatggtcacacggcggctcccaaaccctaaacagcggtggtgcccctacgcttcagcctcgactcagtattcccccttccccgcttcgacaagtctcgtcccccgcccccttattccattacaagcaactccgccggtgccaccgctgctggtgggacaggccgccgccgccgctgctggtgggacctaccgcctcgcgctccgcatccagcgccgcctcatcccgcccaaccaccccaggatacgggacttcgtctacaggtactgccttcgccgagccccgctgtcgtgcgtccgcgctcaggacgccgtcggtcactgccagccaaacaggatcagcgcgagcagccagtgcaggcacatctcctactcctacgccccgttcccgtcggtcactgccaggaggaagggtgtcttccgcgaggacattgcacagctgatggtatcagatgtctgatgtgtcttggtttaataataaagaagcgagcgagcgcagaggaaattgtcactgctgctgcggtttaggatggagtaatattttagccttgattttgacatccttttttgcagagtagtggatcaacattattcaaaattttgctcatgacgtctgatatgtggacagttgccattcaagttttactctatcatcaatagtggaagttcttgagatgccaaaaagcagggaagtgcggacataacagtcaagatgagctacttaaaagtgaggataattcaaaggagcgtggtatcccgagaatatgaacactccagagatgcaatatttgaggttagtatgcagtagtcgagcctgttcatagtttattgttcctgttttctaatcttggtcttatgactaataatttttaatgagtggttctaactggactgcatccaaatgtagtcattggctaagccaaaatttgaatttcataaagtaactaagatcggtgtttgtccggattgtgacaaggctgtagctttccccttaatcgatcagaccatatcctaggattaaggatgtgcaacagaacccttttgttgtcgacgatatcaatgagcttcggtttttttcacatccataactatataccaagcctttctgccacatttgcaagccacaccatcgctatgaatagaaaaactattatgctagatccatcttctatccgcatatcataaccataacgggtccttcaaaatttatttgtgacctttatgctttgatatttgattggtaagggtctacaggatcttatgaccttatttaccatcgctctgagttcgcaaggcataaatattatggttcttgtgaactcatcctcctacatgtaacatgtcgagtgaagcccaagcctggcccaacaaggagtcatgttctttgcagaacaacaatagatagatgccatttaaactaagttgatggttgtttcaatataacacttgaaagaacagacccaaggatgtaaactcaagtgttactacccctcatgcaaaactcaaactaacaagaagatggtctccccaaaggcagttgctcacagaaaatttttgggcaactcaatctggtataccatcacatgtcaccaaggtgctatttcaaatcaaaacaagttaaaaatgtacatctaacaaagataccattgtcagatctttatacaacacaacacaccaatgttgctattcaaaaactgttgctacctgcctagagcccagttctccaacctttccatgtccggggctgggtgcctgggtctgcgttaatgctggacagcagcttgtgattgtttagtgtctgaaaactctagcaaaagtctggtggcaaacaaggttctcaatttagacatatcactgtgtggtagcgtttgctccttaattctatttctaaaacatctgcttattggtgtccatgtgctggttcatatgcaatgatgttctttgtttgtgatggaatcttatgattttgctaaaatgtgcattgttttagtggtacttccaaacagtggccactaaccatcatggtgaggatgcatcatcagtagcagtcagaagtaagaaaggcttaaagacgattagacataccactatgtttatttactatactattattttgatgtactaaatgatttcatttgagttattttggtgttttgatggcatatggaggcctccaagattttttgactgaaaagaaagatttaacaattacattgatcaggaaccggattctcccattatattctttggatccttgcagcccatatttgatttcaatggctaattgggttattggtcagcttgcgatatgcctaccagaggacatgagttctagtatttatcagtccttaatgaaggcgttgaccatggagtatgtggaggacataacttgttatccggtttgtgcctctgcttctggtgctattgcagaactcatcgagaatagttatgttccacctgactggctcattcttctgcaagtggttctgaaaagaataagtactggagatgaaaatgagtctgctcttctgttcaagcttctgggcacaatagttgagggtggacaggaaaaagttgtttcatattcctgaaattgtatccaacattgcgagtactataatggagctcctgccccctgtcccagatccttggcctcagacagaaatgcatgtttccccagtcatgcttggacgatcacctttcatcatatcccattattcctggtgtattttattccttgaggaaatcccaaccacactatttaatatatctgccatgtaggttgttgaacagggtttcacagccctcgtagcaatggtgcaagcttgggagagctctgcaccagatgaaaacaagacacctaaaaagaggttctggcagtcaggccagtctgctattgcccaaacaatttcattactgttacaaaaagcttggttgtttcaagctgacaatatggagggctctgcattaccacctctgtcatgcgtaaacgatgcttctgtgttacttgagtttgtcatgagttctgtcacttgcatggaagaaactgaaagtctgaaggtctttgagctggtagctacatgggctaacgctgttgccaactgggactcctgggagatggaggatcagggtgttttcaacacaattaaagaagctgtcaatttccaccagagatttgacctcgacggtctcttcctgaaaacgcactttgtgagatgtcattccactagctaaaagtttgcagaaatggcaccatcaagatcggtctggagaccaacaagatcatggacttcatcaagtttgatgtcggcaacgtggtcatgatgaccggtgggaggaacaccaggcgtgtaggagtgatcaagaacagggagaagcacaagggcaacttcgagaccatccacgtgctgcttagagctttttgctatgtctagttttctcctatttgttgtataggaaaacatagaatggaattcaaatttggtggccgcaaaatatggagacttgaattcatataaagttaggcttaacattagtgcaaacaattgtattttagtttagatttagagtacacttatgtatgtgttgtttgacaatgcttatttatgatatattgaatggtacttatttatattata

SEQ ID NO: 83168 - DNA, 3425 bp, Zea Mays
gtttggaccccgcttccctcccttgttcgtccatccgtcacaatggtcacacggcggctcccaaaccctaaacagcggtggtgcccctacgcttcagcctcgactcagtattcccccttccccgcttcgacaagtctcgtcccccgcccccttattccattacaagcaactccgccggtgccaccgctgctggtgggacaggccgccgccgccgctgctggtgggacctaccgcctcgcgctccgcatccagcgccgcctcatcccgcccaaccaccccaggatacgggacttcgtctacaggtactgccttcgccgagccccgctgtcgtgcgtccgcgctcaggacgccgtcggtcactgccagccaaacaggatcagcgcgagcagccagtgcaggcacatctcctactcctacgccccgttcccgtcggtcactgccaggaggaagggtgtcttccgcgaggacattgcacagctgatgagtagtggatcaacattattcaaaattttgctcatgacgtctgatatgtggacagttgccattcaagttttactctatcatcaatagtggaagttcttgagatgccaaaaagcagggaagtgcggacataacagtcaagatgagctacttaaaagtgaggataattcaaaggagcgtggtatcccgagaatatgaacactccagagatgcaatatttgaggttagtatgcagtagtcgagcctgttcatagtttattgttcctgttttctaatcttggtcttatgactaataatttttaatgagtggttctaactggactgcatccaaatgtagtcattggctaagccaaaatttgaatttcataaagtaactaagatcggtgtttgtccggattgtgacaaggctgtagctttccccttaatcgatcagaccatatcctaggattaaggatgtgcaacagaacccttttgttgtcgacgatatcaatgagcttcggtttttttcacatccataactatataccaagcctttctgccacatttgcaagccacaccatcgctatgaatagaaaaactattatgctagatccatcttctatccgcatatcataaccataacgggtccttcaaaatttatttgtgacctttatgctttgatatttgattggtaagggtctacaggatcttatgaccttatttaccatcgctctgagttcgcaaggcataaatattatggttcttgtgaactcatcctcctacatgtaacatgtcgagtgaagcccaagcctggcccaacaaggagtcatgttctttgcagaacaacaatagatagatgccatttaaactaagttgatggttgtttcaatataacacttgaaagaacagacccaaggatgtaaactcaagtgttactacccctcatgcaaaactcaaactaacaagaagatggtctccccaaaggcagttgctcacagaaaatttttgggcaactcaatctggtataccatcacatgtcaccaaggtgctatttcaaatcaaaacaagttaaaaatgtacatctaacaaagataccattgtcagatctttatacaacacaacacaccaatgttgctattcaaaaactgttgctacctgcctagagcccagttctccaacctttccatgtccggggctgggtgcctgggtctgcgttaatgctggacagcagcttgtgattgtttagtgtctgaaaactctagcaaaagtctggtggcaaacaaggttctcaatttagacatatcactgtgtggtagcgtttgctccttaattctatttctaaaacatctgcttattggtgtccatgtgctggttcatatgcaatgatgttctttgtttgtgatggaatcttatgattttgctaaaatgtgcattgttttagtggtacttccaaacagtggccactaaccatcatggtgaggatgcatcatcagtagcagtcagaagtaagaaaggcttaaagacgattagacataccactatgtttatttactatactattattttgatgtactaaatgatttcatttgagttattttggtgttttgatggcatatggaggcctccaagattttttgactgaaaagaaagatttaacaattacattgatcaggaaccggattctcccattatattctttggatccttgcagcccatatttgatttcaatggctaattgggttattggtcagcttgcgatatgcctaccagaggacatgagttctagtatttatcagtccttaatgaaggcgttgaccatggagtatgtggaggacataacttgttatccggtttgtgcctctgcttctggtgctattgcagaactcatcgagaatagttatgttccacctgactggctcattcttctgcaagtggttctgaaaagaataagtactggagatgaaaatgagtctgctcttctgttcaagcttctgggcacaatagttgagggtggacaggaaaaagttgtttcatattcctgaaattgtatccaacattgcgagtactataatggagctcctgccccctgtcccagatccttggcctcaggttgttgaacagggtttcacagccctcgtagcaatggtgcaagcttgggagagctctgcaccagatgaaaacaagacacctaaaaagaggttctggcagtcaggccagtctgctattgcccaaacaatttcattactgttacaaaaagcttggttgtttcaagctgacaatatggagggctctgcattaccacctctgtcatgcgtaaacgatgcttctgtgttacttgagtttgtcatgagttctgtcacttgcatggaagaaactgaaagtctgaaggtctttgagctggtagctacatgggctaacgctgttgccaactgggactcctgggagatggaggatcagggtgttttcaacacaattaaagaagctgtcaatttccaccagagatttgacctcgacggtctcttcctgaaaacgcactttgtgagatgtcattccactagctaaaagtttgcagaaatggcaccatcaagatcggtctggagaccaacaagatcatggacttcatcaagtttgatgtcggcaacgtggtcatgatgaccggtgggaggaacaccaggcgtgtaggagtgatcaagaacagggagaagcacaagggcaacttcgagaccatccacgtgctgcttagagctttttgctatgtctagttttctcctatttgttgtataggaaaacatagaatggaattcaaatttggtggccgcaaaatatggagacttgaattcatataaagttaggcttaacattagtgcaaacaattgtattttagtttagatttagagtacacttatgtatgtgttgtttgacaatgcttatttatgatatattgaatggtacttatttatattata

SEQ ID NO: 83169 - DNA, 2374 bp, Zea Mays
gtttggaccccgcttccctcccttgttcgtccatccgtcacaatggtcacacggcggctcccaaaccctaaacagcggtggtgcccctacgcttcagcctcgactcagtattcccccttccccgcttcgacaagtctcgtcccccgcccccttattccattacaagcaactccgccggtgccaccgctgctggtgggacaggccgccgccgccgctgctggtgggacctaccgcctcgcgctccgcatccagcgccgcctcatcccgcccaaccaccccaggatacgggacttcgtctacaggtactgccttcgccgagccccgctgtcgtgcgtccgcgctcaggacgccgtcggtcactgccagccaaacaggatcagcgcgagcagccagtgcaggcacatctcctactcctacgccccgttcccgtcggtcactgccaggaggaagggtgtcttccgcgaggacattgcacagctgatgagtagtggatcaacattattcaaaattttgctcatgacgtctgatatgtggacagttgccattcaagttttactctatcatcaataggtgaagattcctgatccagaatacttgtgtaagattattaacatgttacccaataataatcttacataatttggcccaacccaaagatacgttaatttaaactccctagattattttgtggaatcccaacagagtttattcatttgcttgtactctatgaagtggaagttcttgagatgccaaaaagcagggaagtgcggacataacagtcaagatgagctacttaaaagtgaggataattcaaaggagcgtggtatcccgagaatatgaacactccagagatgcaatatttgagtggccactaaccatcatggtgaggatgcatcatcagtagcagtcagaagtaagaaaggcttaaagacgattagacataccactatgtttatttactatactattattttgatgtactaaatgatttcatttgagttattttggtgttttgatggcatatggaggcctccaagattttttgactgaaaagaaagatttaacaattacattgatcaggaaccggattctcccattatattctttggatccttgcagcccatatttgatttcaatggctaattgggttattggtcagcttgcgatatgcctaccagaggacatgagttctagtatttatcagtccttaatgaaggcgttgaccatggagtatgtggaggacataacttgttatccggtttgtgcctctgcttctggtgctattgcagaactcatcgagaatagttatgttccacctgactggctcattcttctgcaagtggttctgaaaagaataagtactggagatgaaaatgagtctgctcttctgttcaagcttctgggcacaatagttgagggtggacaggaaaaagttgtttcatattcctgaaattgtatccaacattgcgagtactataatggagctcctgccccctgtcccagatccttggcctcaggttgttgaacagggtttcacagccctcgtagcaatggtgcaagcttgggagagctctgcaccagatgaaaacaagacacctaaaaagaggttctggcagtcaggccagtctgctattgcccaaacaatttcattactgttacaaaaagcttggttgtttcaagctgacaatatggagggctctgcattaccacctctgtcatgcgtaaacgatgcttctgtgttacttgagtttgtcatgagttctgtcacttgcatggaagaaactgaaagtctgaaggtctttgagctggtagctacatgggctaacgctgttgccaactgggactcctgggagatggaggatcagggtgttttcaacacaattaaagaagctgtcaatttccaccagagatttgacctcgacggtctcttcctgaaaacgcactttgtgagatgtcattccactagctaaaagtttgcagaaatggcaccatcaagatcggtctggagaccaacaagatcatggacttcatcaagtttgatgtcggcaacgtggtcatgatgaccggtgggaggaacaccaggcgtgtaggagtgatcaagaacagggagaagcacaagggcaacttcgagaccatccacgtgctgcttagagctttttgctatgtctagttttctcctatttgttgtataggaaaacatagaatggaattcaaatttggtggccgcaaaatatggagacttgaattcatataaagttaggcttaacattagtgcaaacaattgtattttagtttagatttagagtacacttatgtatgtgttgtttgacaatgcttatttatgatatattgaatggtacttatttatattata

SEQ ID NO: 83170 - DNA, 3356 bp, Zea Mays
gtttggaccccgcttccctcccttgttcgtccatccgtcacaatggtcacacggcggctcccaaaccctaaacagcggtggtgcccctacgcttcagcctcgactcagtattcccccttccccgcttcgacaagtctcgtcccccgcccccttattccattacaagcaactccgccggtgccaccgctgctggtgggacaggccgccgccgccgctgctggtgggacctaccgcctcgcgctccgcatccagcgccgcctcatcccgcccaaccaccccaggatacgggacttcgtctacaggtactgccttcgccgagccccgctgtcgtgcgtccgcgctcaggacgccgtcggtcactgccagccaaacaggatcagcgcgagcagccagtgcaggcacatctcctactcctacgccccgttcccgtcggtcactgccaggaggaagggtgtcttccgcgaggacattgcacagctgatgagtagtggatcaacattattcaaaattttgctcatgacgtctgatatgtggacagttgccattcaagttttactctatcatcaataggtgaagattcctgatccagaatacttgtagtttattcatttgcttgtactctatgaagtggaagttcttgagatgccaaaaagcagggaagtgcggacataacagtcaagatgagctacttaaaagtgaggataattcaaaggagcgtggtatcccgagaatatgaacactccagagatgcaatatttgaggttagtatgcagtagtcgagcctgttcatagtttattgttcctgttttctaatcttggtcttatgactaataatttttaatgagtggttctaactggactgcatccaaatgtagtcattggctaagccaaaatttgaatttcataaagtaactaagatcggtgtttgtccggattgtgacaaggctgtagctttccccttaatcgatcagaccatatcctaggattaaggatgtgcaacagaacccttttgttgtcgacgatatcaatgagcttcggtttttttcacatccataactatataccaagcctttctgccacatttgcaagccacaccatcgctatgaatagaaaaactattatgctagatccatcttctatccgcatatcataaccataacgggtccttcaaaatttatttgtgacctttatgctttgatatttgattggtaagggtctacaggatcttatgaccttatttaccatcgctctgagttcgcaaggcataaatattatggttcttgtgaactcatcctcctacatgtaacatgtcgagtgaagcccaagcctggcccaacaaggagtcatgttctttgcagaacaacaatagatagatgccatttaaactaagttgatggttgtttcaatataacacttgaaagaacagacccaaggatgtaaactcaagtgttactacccctcatgcaaaactcaaactaacaagaagatggtctccccaaaggcagttgctcacagaaaatttttgggcaactcaatctggtataccatcacatgtcaccaaggtgctatttcaaatcaaaacaagttaaaaatgtacatctaacaaagataccattgtcagatctttatacaacacaacacaccaatgttgctattcaaaaactgttgctacctgcctagagcccagttctccaacctttccatgtccggggctgggtgcctgggtctgcgttaatgctggacagcagcttgtgattgtttagtgtctgaaaactctagcaaaagtctggtggcaaacaaggttctcaatttagacatatcactgtgtggtagcgtttgctccttaattctatttctaaaacatctgcttattggtgtccatgtgctggttcatatgcaatgatgttctttgtttgtgatggaatcttatgattttgctaaaatgtgcattgttttagtggtacttccaaacagtggccactaaccatcatggtgaggatgcatcatcagtagcagtcagaattattttggtgttttgatggcatatggaggcctccaagatgaaccggattctcccattatattctttggatccttgcagcccatatttgatttcaatggctaattgggttattggtcagcttgcgatatgcctaccagaggacatgagttctagtatttatcagtccttaatgaaggcgttgaccatggagtatgtggaggacataacttgttatccggtttgtgcctctgcttctggtgctattgcagaactcatcgagaatagttatgttccacctgactggctcattcttctgcaagtggttctgaaaagaataagtactggagatgaaaatgagtctgctcttctgttcaagcttctgggcacaatagttgagggtggacaggaaaaagttgtttcatattcctgaaattgtatccaacattgcgagtactataatggagctcctgccccctgtcccagatccttggcctcaggttgttgaacagggtttcacagccctcgtagcaatggtgcaagcttgggagagctctgcaccagatgaaaacaagacacctaaaaagaggttctggcagtcaggccagtctgctattgcccaaacaatttcattactgttacaaaaagcttggttgtttcaagctgacaatatggagggctctgcattaccacctctgtcatgcgtaaacgatgcttctgtgttacttgagtttgtcatgagttctgtcacttgcatggaagaaactgaaagtctgaaggtctttgagctggtagctacatgggctaacgctgttgccaactgggactcctgggagatggaggatcagggtgttttcaacacaattaaagaagctgtcaatttccaccagagatttgacctcgacggtctcttcctgaaaacgcactttgtgagatgtcattccactagctaaaagtttgcagaaatggcaccatcaagatcggtctggagaccaacaagatcatggacttcatcaagtttgatgtcggcaacgtggtcatgatgaccggtgggaggaacaccaggcgtgtaggagtgatcaagaacagggagaagcacaagggcaacttcgagaccatccacgtgctgcttagagctttttgctatgtctagttttctcctatttgttgtataggaaaacatagaatggaattcaaatttggtggccgcaaaatatggagacttgaattcatataaagttaggcttaacattagtgcaaacaattgtattttagtttagatttagagtacacttatgtatgtgttgtttgacaatgcttatttatgatatattgaatggtacttatttatattata

SEQ ID NO: 83171 - DNA, 2696 bp, Zea Mays
cgcttccctcccttgttcgtccatccgtcacaatggtcacacggcggctcccaaaccctaaacagcggtggtgcccctacgcttcagcctcgactcagtattcccccttccccgcttcgacaagtctcgtcccccgcccccttattccattacaagcaactccgccggtgccaccgctgctggtgggacaggccgccgccgccgctgctggtgggacctaccgcctcgcgctccgcatccagcgccgcctcatcccgcccaaccaccccaggatacgggacttcgtctacagccaaacaggatcagcgcgagcagccagtgcaggcacatctcctactcctacgccccgttcccgtcggtcactgccaggaggaagggtgtcttccgcgaggacattgcacagctgatggtatcagatgtctgatgtgtcttggtttaataataaagaagcgagcgagcgcagaggaaattgtcactgctgctgcggtttaggatggagtaatattttagccttgattttgacatccttttttgcagagtagtggatcaacattattcaaaattttgctcatgacgtctgatatgtggacagttgccattcaagttttactctatcatcaatagtggaagttcttgagatgccaaaaagcagggaagtgcggacataacagtcaagatgagctacttaaaagtgaggataattcaaaggagcgtggtatcccgagaatatgaacactccagagatgcaatatttgaggttagtatgcagtagtcgagcctgttcatagtttattgttcctgttttctaatcttggtcttatgactaataatttttaatgagtggttctaactggactgcatccaaatgtagtcattggctaagccaaaatttgaatttcataaagtaactaagatcggtgtttgtccggattgtgacaaggctgtagctttccccttaatcgatcagaccatatcctaggattaaggatgtgcaacagaacccttttgttgtcgacgatatcaatgagcttcggtttttttcacatccataactatataccaagcctttctgccacatttgcaagccacaccatcgctatgaatagaaaaactattatgctagatccatcttctatccgcatatcataaccataacgggtccttcaaaatttatttgtgacctttatgctttgatatttgattggtaagggtctacaggatcttatgaccttatttaccatcgctctgagttcgcaaggcataaatattatggttcttgtgaactcatcctcctacatgtaacatgtcgagtgaagcccaagcctggcccaacaaggagtcatgttctttgcagaacaacaatagatagatgccatttaaactaagttgatggttgtttcaatataacacttgaaagaacagacccaaggatgtaaactcaagtgttactacccctcatgcaaaactcaaactaacaagaagatggtctccccaaaggcagttgctcacagaaaatttttgggcaactcaatctggtataccatcacatgtcaccaaggtgctatttcaaatcaaaacaagttaaaaatgtacatctaacaaagataccattgtcagatctttatacaacacaacacaccaatgttgctattcaaaaactgttgctacctgcctagagcccagttctccaacctttccatgtccggggctgggtgcctgggtctgcgttaatgctggacagcagcttgtgattgtttagtgtctgaaaactctagcaaaagtctggtggcaaacaaggttctcaatttagacatatcactgtgtggtagcgtttgctccttaattctatttctaaaacatctgcttattggtgtccatgtgctggttcatatgcaatgatgttctttgtttgtgatggaatcttatgattttgctaaaatgtgcattgttttagtggtacttccaaacagtggccactaaccatcatggtgaggatgcatcatcagtagcagtcagaagtaagaaaggcttaaagacgattagacataccactatgtttatttactatactattattttgatgtactaaatgatttcatttgagttattttggtgttttgatggcatatggaggcctccaagatgaaccggattctcccattatattctttggatccttgcagcccatatttgatttcaatggctaattgggttattggtcagcttgcgatatgcctaccagaggacatgagttctagtatttatcagtccttaatgaaggcgttgaccatggagtatgtggaggacataacttgttatccggtttgtgcctctgcttctggtgctattgcagaactcatcgagaatagttatgttccacctgactggctcattcttctgcaagtggttctgaaaagaataagtactggagatgaaaatgagtctgctcttctgttcaagcttctgggcacaatagttgagggtggacaggaaaaagttgtttcatattcctgaaattgtatccaacattgcgagtactataatggagctcctgccccctgtcccagatccttggcctcagaaatgcatgtttccccagtcatgcttggacgatcacctttcatcatatcccattattcctggtgtattttattccttgaggaaatcccaaccacactatttaatatatctgccat

SEQ ID NO: 83172 - DNA, 313 bp, Zea Mays
ccactcctcctttccccttggccgccccccctgcccacctcctcctctctccattgttgcagccaccaaaaccctagccgccccccccaatcccctcctccctaggtgctactccgtgccgctcgaatcatcgtctcttggtgcgaatctccaatcgttttggtggagggatgaagggaggaaggaaaaggggagaacccaaggtgattttttcttttgtgttcatcccttgttcatttgcgctgcgattcaattgattagatgttgcgtttgcgattggatagaggggggctgtccagaattttgcgtggtg

SEQ ID NO: 83173 - DNA, 2048 bp, Zea Mays
ggtagggtaatgtgctctcgggtggcgcggacctgttcatgtagtggaggactccgtgggaacgattgacatatgcaagggttaagtgctacatatgtcgtgtggttagagatccccagctgggtataatcggttcgaatcgtcgttgctcctcgattatggagactcatcccggtgaccatcatcgtagttagcaagtgaaatatgagaatgaataaaatgcagctagtataggccaagtgcttgaactagactaggtaaatatagattcaggtaataacctaactagtgaaataaaacttggcttaaggatcaactggtagcaagcttttctgcaaaaggagtctttgatcattgataaaccttaccttgattcccaatcaactagcatacccttgagagtcttttctttagtcgggtaagtcttgctgagtaattgcgtactcagggttttatcccctgttgtttttgcaggagaagttttattcccttatcttttggttagttacttcatgtggaggccttgaagcttagaatgtttatgtgtatctcttatggaaaggcttcacccttccaattattgtaataagttatgcactttgggtactatcaggacttgtaataaatacatctctttctaccttgtaaaacttgagttctggaatgtaaagtgtactttataaaagtcttccgctctatctccaatgtgtgtgtatcaaatgtgattactgtaatatacctgttatgtgggagatccttgggatgatgagttccagttggtgaactcgatagccttgttaagttacctggtacacgtgcacagccacccgaggccattaaggcaaggattggtgcacgtgggcccgataacttgggagggctgtcacagtctcatggtgccaggtcagtctagtcacctggagagactgcatcgtcgcctgcacgaggaccaggagcgccgacaccaggagcaccgacaccaggagcaggagcagcagaactcttcccccacgcctcagcaggaggtggagtctgggaggccgccttaccctgcatctcagctagagatgccccctgcaccaccatagggcatcccggctgctggaggagaccctaacagagacggagacgacgacgacgccggaggctgttcaagccatggcacgaagctctcggaggagctggagctggaggggtggatcggtagacccatcactcgcgatgccgctcacgggtgtcacttccacgacgctctcgacaccttgctacatcgggctttcgaccgacatacttggtccatcgagtaccattgtgtagtctaccagcatcgtcgtgggttatacctggaccagtgggaggctacttgcttggtgcgccttcgggatgatgatctccgcggtgtagaggccttctcagagcactattctatcactgagaggcatgctgctgaggcggccatgcaagatgcagcacgacatgcagtttcttagtattgcttgttgttcagcagggtagctgatgcccttgaactgaaatactaccctcgccgttcgaccggcagcactgggggtgtgattgtctcacccattggtgagggcaatcccaggctaaacagcatggtcaacctggtcatcgtgctcaacaccgagctggaccacgcccttgacgagtttggcaaggttcgggcggaggttgcggaattgcgtgctgagtgcgtggcacgccactatctggatggtggttctcccacccctatcgggattcagcacccttaccgttcaccgccccgtggtcgcttcgagtatggtaccccagactgcaggacccagatagatttggatccatagatcgacagagttggagtctgtaataatgcttaattcagtgtcttagtctagtcagtcttagttagagttagtttgcttatcataagttggatgcctgtggtgatgaacatgtaatgaagttggatctttgtaatgattttcatcaaggtgtgggtatcccttgcaacttgaagtagttattaataaggtcagttatttagt

SEQ ID NO: 83174 - DNA, 2088 bp, Zea Mays
ccctctacagaaaattcaccccctctacagaaaaatatcagtttgcaccattgagcctatccacaagggaagtccctttctgtttattactgtcttcagaactggacataattagataattgtgttgtacctgtggtattggaccaggttcggtgtctcaactgtgcagatgaaccaatgtggaattgatacttgggagccacgtttgtaagcccctattgtgctggcgcactgggaaacactccccacagcatggttgccatgtgcagggacacctgcccctatattcagtgccttggggctgaattttgtgaagttctcccctaccctcaacctctagccaaagtagctgcttgtgcgttgtagttcctgtctccacgacagttttagctcccctcctcagccactagatcgatctgcccttgttcatcacaaccaactcctgtgtctggtgaccacaacagcaatccttcaacctcatcatggccagggttcgtggagattgtctcggccgtgttgtgcccattccttgttcctcacaggagaagttttattcccttatcttttggttagttacttcatgtggaggccttgaagcttagaatgtttatgtgtatctcttatggaaaggcttcacccttccaattattgtaataagttatgcactttgggtactatcaggacttgtaataaatacatctctttctaccttgtaaaacttgagttctggaatgtaaagtgtactttataaaagtcttccgctctatctccaatgtgtgtgtatcaaatgtgattactgtaatatacctgttatgtgggagatccttgggatgatgagttccagttggtgaactcgatagccttgttaagttacctggtacacgtgcacagccacccgaggccattaaggcaaggattggtgcacgtgggcccgataacttgggagggctgtcacagtctcatggtgccaggtcagtctagtcacctggagagactgcatcgtcgcctgcacgaggaccaggagcgccgacaccaggagcaccgacaccaggagcaggagcagcagaactcttcccccacgcctcagcaggaggtggagtctgggaggccgccttaccctgcatctcagctagagatgccccctgcaccaccatagggcatcccggctgctggaggagaccctaacagagacggagacgacgacgacgccggaggctgttcaagccatggcacgaagctctcggaggagctggagctggaggggtggatcggtagacccatcactcgcgatgccgctcacgggtgtcacttccacgacgctctcgacaccttgctacatcgggctttcgaccgacatacttggtccatcgagtaccattgtgtagtctaccagcatcgtcgtgggttatacctggaccagtgggaggctacttgcttggtgcgccttcgggatgatgatctccgcggtgtagaggccttctcagagcactattctatcactgagaggcatgctgctgaggcggccatgcaagatgcagcacgacatgcagtttcttagtattgcttgttgttcagcagggtagctgatgcccttgaactgaaatactaccctcgccgttcgaccggcagcactgggggtgtgattgtctcacccattggtgagggcaatcccaggctaaacagcatggtcaacctggtcatcgtgctcaacaccgagctggaccacgcccttgacgagtttggcaaggttcgggcggaggttgcggaattgcgtgctgagtgcgtggcacgccactatctggatggtggttctcccacccctatcgggattcagcacccttaccgttcaccgccccgtggtcgcttcgagtatggtaccccagactgcaggacccagatagatttggatccatagatcgacagagttggagtctgtaataatgcttaattcagtgtcttagtctagtcagtcttagttagagttagtttgcttatcataagttggatgcctgtggtgatgaacatgtaatgaagttggatctttgtaatgattttcatcaaggtgtgggtatcccttgcaacttgaag

SEQ ID NO: 83175 - DNA, 1223 bp, Zea Mays
attatcttctctccctgctgtcctccacttatgtgcacaaactgggatagacttggggtggacaatatggagctcgagattcagtcaccccctctacagaaaattcaccccctctacagaaaaatatcagtttgcaccattgagcctatccacaagggaagtccctttctgtttattactgtcttcagaactggacataattagataattgtgttgtacctgtggtattggaccaggttcggtgtctcaactgtgcagatgaaccaatgtggaattgatacttgggagccacgtttgtaagcccctattgtgctggcgcactgggaaacactccccacagcatggttgccatgtgcagggacacctgcccctatattcagtgccttggggctgaattttgtgaagttctcccctaccctcaacctctagccaaagtagctgcttgtgcgttgtagttcctgtctccacgacagttttagctcccctcctcagccactagatcgatctgcccttgttcatcacaaccaactcctgtgtctggtgaccacaacagcaatccttcaacctcatcatggccagggttcgtggagattgtctcggccgtgttgtgcccattccttgttcctcacagaattcccataagaagaagatgaaattcaaaaaggggtttcttaagaggagtctgcttcagtgcctgctcatcaagtgatgggagccatctaactaatcatcgtgttagaagtatctagaacctcttctctgcaacaaaccccggtgcatttgccccttccttgtgttttaaatgctttatcacctaaaatgatgcattaggtgataggagttgtgtgatgaacaattgatgcattaccattccttggaagttgatactttaccttgatccctgatttataaaaagaactgataatgcttaaccctgcttagaaacagaaaaatcatttgttttcaaaaagaatgattgtggaacattggttatgggctttttgattcaaaaatcaaagcaatctaaggtgatgattcctctacggccggagtggactcgtcactcgaaaagagtacccctgtcgggtaccaaaaatggggaaatggttaataaatctagatcaggcactgagcagacagagtcgcccgtctgtgtcgattaaggaccgtaccgttgactggcctattgtggttgagactttgcaactagccacataccctgg

SEQ ID NO: 83176 - DNA, 2389 bp, Zea Mays
tggagctcgagattcagtcaccccctctacagaaaattcaccccctctacagaaaaatatcagtttgcaccattgagcctatccacaagggaagtccctttctgtttattactgtcttcagaactggacataattagataattgtgttgtacctgtggtattggaccaggttcggtgtctcaactgtgcagatgaaccaatgtggaattgatacttgggagccacgtttgtaagcccctattgtgctggcgcactgggaaacactccccacagcatggttgccatgtgcagggacacctgcccctatattcagtgccttggggctgaattttgtgaagttctcccctaccctcaacctctagccaaagtagctgcttgtgcgttgtagttcctgtctccacgacagttttagctcccctcctcagccactagatcgatctgcccttgttcatcacaaccaactcctgtgtctggtgaccacaacagcaatccttcaacctcatcatggccagggttcgtggagattgtctcggccgtgttgtgcccattccttgttcctcacaggtcagtgaacctcacaccatttactgcttgaactctaccactattggttgcctggaactaggtgtgaaatttgctcaaacataggttatcaggtttctggatcccagacttagtgcataaggctgaaactaggttttagtgtgttgagctccactttggtgcctcataaaaattgttctgaatgttttcaacctaggggtgctatactaaagtagtagagctatatctaaggaataactttgataatgtgagcttggtctgttgctgtgtaaaagttggagaaaaggttggctaaagttggactgtcaggctggacacaactgaattttttttattcagttctgtgaactgaattgcagcagtatgcctagtttggaattcatttgtgactgattcatggagttttggattaagggttccatagcaaagttgtagaccatagtaaagtgaacaagtttactaaagtgagatggacctggttccacataaatttgggagtaaaagtggccaaaagtttgactgtcatgtggttggtgacttagtctattcagaactgaaagtctgaaatcagtaattttagtgcagttttggagctgtgtagtgcctgttctaggtggttttgaaccaaagtttctgcagcaagtttgaagaacatgtgttagagaacaacatcctttaagtgagttgggtttgaccccacacacaaagtggtgtaaagactgcccaaagatggacttcagttgtagagactgaatttcattcagctgcctgaaaactgaatttgcaatgtgtattttcagtcttggagtgttataccaaagtggaagagcaatacttagggaatagatttggttaagtaggtggggtctgttgtcatgtgagtttatgagataaaaggcattgaacagaggggagaggaatggagcaatggaagatgaattcagagaactgaaagcaggttcagtgaattgtggttgattcttggacactataacttgtagtacatgcagtttggatccttgcttaaggcataaatgaagcacttggttggttatggaggcaaggtttcctagtttggttcgtgaattgtgttgtgatattagagtatttagctctcttaaggttttgttagtttttatgtgcacctttagagaggtgtaagtgttgtgatgtttttttagtattttcttttcaagttgcataagcataagcattcatgttcatatctttacatgtagaattcccataagaagaagatgaaattcaaaaaggggtttcttaagaggagtctgcttcagtgcctgctcatcaagtgatgggagccatctaactaatcatcgtgttagaagtatctagaacctcttctctgcaacaaaccccggtgcatttgccccttccttgtgttttaaatgctttatcacctaaaatgatgcattaggtgataggagttgtgtgatgaacaattgatgcattaccattccttggaagttgatactttaccttgatccctgatttataaaaagaactgataatgcttaaccctgcttagaaacagaaaaatcatttgttttcaaaaagaatgattgtggaacattggttatgggctttttgattcaaaaatcaaagcaatctaaggtgatgattcctctacggccggagtggactcgtcactcgaaaagagtacccctgtcgggtaccaaaaatggggaaatggttaataaatctagatcaggcactgagcagacagagtcgcccgtctgtgtcgattaaggaccgtaccgttgactggcctattgtggttgagactttgcaactagccacatac

SEQ ID NO: 83177 - DNA, 912 bp, Zea Mays
taaatacaccaccagcccacggctgcccagctctctctgactctctctcgcgtcgggcacgcagtcgcacaagtagtgaactcaaacgggatctcctgctctgcctccctcgtcttcctctgcccgtgcgcgtttcagagcacgtacggagagggcgagcagcagcttgcggccgggcaccatcatgtggtggaggtgctggagaacctggcgttcctggcgaacgccagcaacctggtgacctacctgatggggttcatgcactactcgccgtcgcagtcggccacggcggtcaccaacttcatgggcacggccttcctgctcgcgctcctcggcggcttcctctccgacgccttcttcaccacctacaccatctacatcgccagcgccttcatcgagctcatggggctggtgatcctgacggtccaggcgcggacgcagtcgctgatgccgccgcagtgcgccaagccgggggctccgtgcgagcccgtgtcgggcgccaagaaggcgatgctgttcgcggggctgtacctcacggcgctgggcgtgggcgggatcaagggctccctcccctcccacggcgcggagcagttcgacgagcatgcggcgcgggggcgcaagggccgctccaccttcttcaactacttcgtcttctgcctctcctgcggcgccctcgtcgccgtcaccttcgccgtatgggtcgaggacaacaagggctggcagtgggggttcggcatctccaccatcgccatcctgctctccatcccgctcttcgtcgccggctccagccgctaccggaacaaggtgcccacggggagcccgctcaccaccatcgccaaggtcctcatcgccgccgcgctcgcgcgccgcggctgcgcgccgagctccagcaacggcgccgtcatcgaccgc

SEQ ID NO: 83178 - DNA, 1083 bp, Zea Mays
cgaccacaactcctctgccgtcgaagacaggagttgcccttggtcatgagctcactgacaagatgccacctaatgagtactatgagtattttggtccagattacactctacatgtcgctccaagtaacatggagaataaaaacacacggcatcaattggatgacataaaatcaaaacttctagataatctttcaaaactccgacatgctcctagtgttcagtttcaagagcgacctcctgaggctgagttacctgagatgaagacaaagagaatcctgatgaaagacatgatgctgattctgatgtggagatgaatgatgccaaacctttgcaggactctggaaggatgtcaatagtgtagctgcagaacattctagaggcactggacctgtggctgatggagttggttcctcgaaacaaacctttccgaatgccactagtcgaatggccatagatgaaccaaacgctcttgagagttgagcaagagggttcaaacaaattgcaggaccaaccatcgatgcacctcaagtagctaatgtcatctgtagcctgtcgattcttttgcgcaaattcattaactgtaggcaagccatgcgtggactgaagcagggagcagaagcaagtgctcgaccaagaagttgtgcatctgaaatctatattttttgcgcgtcatatttgtattaccgacagttgcaaacgatggtttaatcatgaaaaatttgtctttccacccttggcttctgcagtggaaggggttgatatcgtagtatgcatcaattatgcattttgtccattccccatccccaaatgagaagtgggtagtccccgacgggttttgaatggccaacagttttaagggagggaagcagcccggaggccaaaaaaaaagcaacgagatgtacggcatcagattgtttgcaatgttttttttttctaaatttgatcatttatatcttacttttacgccacgttatctaaattctgcccctatttttctctctactgcagccgtttctattaaattctttgtctactttattttaactataaaatatcattttttatacctatttatcattattt

SEQ ID NO: 83179 - DNA, 1144 bp, Zea Mays
gagatcaagtaagcctttctatataaggagagatttcacacgcctattccctgtgtacgaccacaactcctctgccgtcgaagacaggagttgcccttggtcatgagctcactgacaagatgccacctaatgagtactatgagtattttggtccagattacactctacatgtcgctccaagtaacatggagaataaaaacacacggcatcaattggatgacataaaatcaaaacttctagataatctttcaaaactccgacatgctcctagtgttcagtttcaagagcgacctcctgaggctgagttacctgagcaagatgaagacaaagagaatcctgatgaaagacatgatgctgattctgatgtggagatgaatgatgccaaacctttgcaggactctggaaggatgtcaatagtgtagctgcagaacattctagaggcactggacctgtggctgatggagttggttcctcgaaacaaacctttccgaatgccactagtcgaatggccatagatgaaccaaacgctcttgagagttgagcaagagggttcaaacaaattgcaggaccaaccatcgatgcacctcaagtagctaatgtcatctgtagcctgtcgattcttttgcgcaaattcattaactgtaggcaagccatgcgtggactgaagcagggagcagaagcaagtgctcgaccaagaagttgtgcatctgaaatctatattttttgcgcgtcatatttgtattaccgacagttgcaaacgatggtttaatcatgaaaaatttgtctttccacccttggcttctgcagtggaaggggttgatatcgtagtatgcatcaattatgcattttgtccattccccatccccaaatgagaagtgggtagtccccgacgggttttgaatggccaacagttttaagggagggaagcagcccggaggccaaaaaaaaagcaacgagatgtacggcatcagattgtttgcaatgttttttttttctaaatttgatcatttatatcttacttttacgccacgttatctaaattctgcccctatttttctctctactgcagccgtttctattaaattctttgtctactttattttaactataaaatatcattttttatacctatttatcattattt

SEQ ID NO: 83180 - DNA, 2195 bp, Zea Mays
attccctactcaaacgcagccgccgagcgcctctcgcctctcgccctacaggaggcaccctacagaacccaaccaaaaagcgccggcggcaaacagaacccaacccaaagcgccggcggcaagcgaagagaaagcgccggcactaatccgacgatggacgcgtcggccggcggcggcggcaactccctgccgaccactggcgcggacgggtcgaagcgccgcgtctgctacttctacgacgcggaggtgggcaactactactacgggcagggccacccgatgaagccgcaccgcatccgcatgacccacgcgctgctcggccgctacggcctcctcgaccagatgcaagtgttccgccctcaccctgcccgcgaccgcgacctctgccgcttccacgccgacgattacgtctccttcctccggtccgtcacccccgaaacgcagcaggaccagatccgcgcgctcaagcgcttcaacgtcggcgaggactgccccgtcttcgacggtctctacagtttctgtcagacgtacgcggggggctctgttggcggcgccgtcaagctcaaccatggccatgatatcgccatcaactgggccggcggactccaccacgccaagaagtgcgaggcctccgggttttgctatgttaatgacattgtcctcgccatcctcgagctcctcaagtaccaccagcgcgttctgtacgtggacattgatatccaccacggggacggcgtggaggaggctttttataccacagaccgggtgatgacagtctcattccacaagtttggagattatttccctgggacaggggacattcgtgatgttgggcactcaaagggtaaatattactccctgaatgttcccctggacgatggtattgatgatgagagctaccagtcgttgttcaagccaataatgggcaaggtgatggaggtcttcaaccctggtgcagtcgtgctccagtgtggtgcggattcattgtcgggtgacaggttgggctgtttcaacctctctattaagggtcacgcagaatgtgtaagatttatgaggtccttcaacgtcccgctgttgctgcttggtggtggtgggtataccataagaaacgttgcacggtgttggtgctacgagacaggagttgcccttggtcatgagctcactgacaagatgccacctaatgagtactatgagtattttggtccagattacactctacatgtcgctccaagtaacatggagaataaaaacacacggcatcaattggatgacataaaatcaaaacttctagataatctttcaaaactccgacatgctcctagtgttcagtttcaagagcgacctcctgaggctgagttacctgagcaagatgaagacaaagagaatcctgatgaaagacatgatgctgattctgatgtggagatgaatgatgccaaacctttgcaggactctggaaggatgtcaatagtgtagctgcagaacattctagaggcactggacctgtggctgatggagttggttcctcgaaacaaacctttccgaatgccactagtcgaatggccatagatgaaccaaacgctcttgagagttgagcaagagggttcaaacaaattgcaggaccaaccatcgatgcacctcaagtagctaatgtcatctgtagcctgtcgattcttttgcgcaaattcattaactgtaggcaagccatgcgtggactgaagcagggagcagaagcaagtgctcgaccaagaagttgtgcatctgaaatctatattttttgcgcgtcatatttgtattaccgacagttgcaaacgatggtttaatcatgaaaaatttgtctttccacccttggcttctgcagtggaaggggttgatatcgtagtatgcatcaattatgcattttgtccattccccatccccaaatgagaagtgggtagtccccgacgggttttgaatggccaacagttttaagggagggaagcagcccggaggccaaaaaaaaagcaacgagatgtacggcatcagattgtttgcaatgttttttttttctaaatttgatcatttatatcttacttttacgccacgttatctaaattctgcccctatttttctctctactgcagccgtttctattaaattctttgtctactttattttaactataaaatatcattttttatacctatttatcattattt

SEQ ID NO: 83181 - DNA, 2191 bp, Zea Mays
attccctactcaaacgcagccgccgagcgcctctcgcctctcgccctacaggaggcaccctacagaacccaaccaaaaagcgccggcggcaaacagaacccaacccaaagcgccggcggcaagcgaagagaaagcgccggcactaatccgacgatggacgcgtcggccggcggcggcggcaactccctgccgaccactggcgcggacgggtcgaagcgccgcgtctgctacttctacgacgcggaggtgggcaactactactacgggcagggccacccgatgaagccgcaccgcatccgcatgacccacgcgctgctcggccgctacggcctcctcgaccagatgcaagtgttccgccctcaccctgcccgcgaccgcgacctctgccgcttccacgccgacgattacgtctccttcctccggtccgtcacccccgaaacgcagcaggaccagatccgcgcgctcaagcgcttcaacgtcggcgaggactgccccgtcttcgacggtctctacagtttctgtcagacgtacgcggggggctctgttggcggcgccgtcaagctcaaccatggccatgatatcgccatcaactgggccggcggactccaccacgccaagaagtgcgaggcctccgggttttgctatgttaatgacattgtcctcgccatcctcgagctcctcaagtaccaccagcgcgttctgtacgtggacattgatatccaccacggggacggcgtggaggaggctttttataccacagaccgggtgatgacagtctcattccacaagtttggagattatttccctgggacaggggacattcgtgatgttgggcactcaaagggtaaatattactccctgaatgttcccctggacgatggtattgatgatgagagctaccagtcgttgttcaagccaataatgggcaaggtgatggaggtcttcaaccctggtgcagtcgtgctccagtgtggtgcggattcattgtcgggtgacaggttgggctgtttcaacctctctattaagggtcacgcagaatgtgtaagatttatgaggtccttcaacgtcccgctgttgctgcttggtggtggtgggtataccataagaaacgttgcacggtgttggtgctacgagacaggagttgcccttggtcatgagctcactgacaagatgccacctaatgagtactatgagtattttggtccagattacactctacatgtcgctccaagtaacatggagaataaaaacacacggcatcaattggatgacataaaatcaaaacttctagataatctttcaaaactccgacatgctcctagtgttcagtttcaagagcgacctcctgaggctgagttacctgagatgaagacaaagagaatcctgatgaaagacatgatgctgattctgatgtggagatgaatgatgccaaacctttgcaggactctggaaggatgtcaatagtgtagctgcagaacattctagaggcactggacctgtggctgatggagttggttcctcgaaacaaacctttccgaatgccactagtcgaatggccatagatgaaccaaacgctcttgagagttgagcaagagggttcaaacaaattgcaggaccaaccatcgatgcacctcaagtagctaatgtcatctgtagcctgtcgattcttttgcgcaaattcattaactgtaggcaagccatgcgtggactgaagcagggagcagaagcaagtgctcgaccaagaagttgtgcatctgaaatctatattttttgcgcgtcatatttgtattaccgacagttgcaaacgatggtttaatcatgaaaaatttgtctttccacccttggcttctgcagtggaaggggttgatatcgtagtatgcatcaattatgcattttgtccattccccatccccaaatgagaagtgggtagtccccgacgggttttgaatggccaacagttttaagggagggaagcagcccggaggccaaaaaaaaagcaacgagatgtacggcatcagattgtttgcaatgttttttttttctaaatttgatcatttatatcttacttttacgccacgttatctaaattctgcccctatttttctctctactgcagccgtttctattaaattctttgtctactttattttaactataaaatatcattttttatacctatttatcattattt

SEQ ID NO: 83182 - DNA, 2122 bp, Zea Mays
attccctactcaaacgcagccgccgagcgcctctcgcctctcgccctacaggaggcaccctacagaacccaaccaaaaagcgccggcggcaaacagaacccaacccaaagcgccggcggcaagcgaagagaaagcgccggcactaatccgacgatggacgcgtcggccggcggcggcggcaactccctgccgaccactggcgcggacgggtcgaagcgccgcgtctgctacttctacgacgcggaggtgggcaactactactacgggcagggccacccgatgaagccgcaccgcatccgcatgacccacgcgctgctcggccgctacggcctcctcgaccagatgcaagtgttccgccctcaccctgcccgcgaccgcgacctctgccgcttccacgccgacgattacgtctccttcctccggtccgtcacccccgaaacgcagcaggaccagatccgcgcgctcaagcgcttcaacgtcggcgaggactgccccgtcttcgacggtctctacagtttctgtcagacgtacgcggggggctctgttggcggcgccgtcaagctcaaccatggccatgatatcgccatcaactgggccggcggactccaccacgccaagaagtgcgaggcctccgggttttgctatgttaatgacattgtcctcgccatcctcgagctcctcaagtaccaccagcgcgttctgtacgtggacattgatatccaccacggggacggcgtggaggaggctttttataccacagaccgggtgatgacagtctcattccacaagtttggagattatttccctgggacaggggacattcgtgatgttgggcactcaaagggtaaatattactccctgaatgttcccctggacgatggtattgatgatgagagctaccagtcgttgttcaagccaataatgggcaaggtgatggaggtcttcaaccctggtgcagtcgtgctccagtgtggtgcggattcattgtcgggtgacaggttgggctgtttcaacctctctattaagggtcacgcagaatgtgtaagatttatgaggtccttcaacgtcccgctgttgctgcttggtggtggtgggtataccataagaaacgttgcacggtgttggtgctacgagattacactctacatgtcgctccaagtaacatggagaataaaaacacacggcatcaattggatgacataaaatcaaaacttctagataatctttcaaaactccgacatgctcctagtgttcagtttcaagagcgacctcctgaggctgagttacctgagcaagatgaagacaaagagaatcctgatgaaagacatgatgctgattctgatgtggagatgaatgatgccaaacctttgcaggactctggaaggatgtcaatagtgtagctgcagaacattctagaggcactggacctgtggctgatggagttggttcctcgaaacaaacctttccgaatgccactagtcgaatggccatagatgaaccaaacgctcttgagagttgagcaagagggttcaaacaaattgcaggaccaaccatcgatgcacctcaagtagctaatgtcatctgtagcctgtcgattcttttgcgcaaattcattaactgtaggcaagccatgcgtggactgaagcagggagcagaagcaagtgctcgaccaagaagttgtgcatctgaaatctatattttttgcgcgtcatatttgtattaccgacagttgcaaacgatggtttaatcatgaaaaatttgtctttccacccttggcttctgcagtggaaggggttgatatcgtagtatgcatcaattatgcattttgtccattccccatccccaaatgagaagtgggtagtccccgacgggttttgaatggccaacagttttaagggagggaagcagcccggaggccaaaaaaaaagcaacgagatgtacggcatcagattgtttgcaatgttttttttttctaaatttgatcatttatatcttacttttacgccacgttatctaaattctgcccctatttttctctctactgcagccgtttctattaaattctttgtctactttattttaactataaaatatcattttttatacctatttatcattattt

SEQ ID NO: 83183 - DNA, 1736 bp, Zea Mays
attccctactcaaacgcagccgccgagcgcctctcgcctctcgccctacaggaggcaccctacagaacccaaccaaaaagcgccggcggcaaacagaacccaacccaaagcgccggcggcaagcgaagagaaagcgccggcactaatccgacgatggacgcgtcggccggcggcggcggcaactccctgccgaccactggcgcggacgggtcgaagcgccgcgtctgctacttctacgacgcggaggtgggcaactactactacgggcagggccacccgatgaagccgcaccgcatccgcatgacccacgcgctgctcggccgctacggcctcctcgaccagatgcaagtgttccgccctcaccctgcccgcgaccgcgacctctgccgcttccacgccgacgattacgtctccttcctccggtccgtcacccccgaaacgcagcaggaccagatccgcgcgctcaagcgcttcaacgtcggcgaggactgccccgtcttcgacggtctctacagtttctgtcagacgtacgcggggggctctgttggcggcgccgtcaagctcaaccatggccatgatatcgccatcaactgggccggcggactccaccacgccaagaagtgcgaggcctccgggttttgctatgttaatgacattgtcctcgccatcctcgagctcctcaagtaccaccagcgcgttctgtacgtggacattgatatccaccacggggacggcgtggaggaggctttttataccacagaccgggtgatgacagtctcattccacaagtttggagattatttccctgggacaggggacattcgtgatgttgggcactcaaagggtaaatattactccctgaatgttcccctggacgatggtattgatgatgagagctaccagtcgttgttcaagccaataatgggcaaggtgatggaggtcttcaaccctggtgcagtcgtgctccagtgtggtgcggattcattgtcgggtgacaggttgggctgtttcaacctctctattaagggtcacgcagaatgtgtaagatttatgaggtccttcaacgtcccgctgttgctgcttggtggtggtgggtataccataagaaacgttgcacggtgttggtgctacgagacaggagttgcccttggtcatgagctcactgacaagatgccacctaatgagtactatgagtattttggtccagattacactctacatgtcgctccaagtaacatggagaataaaaacacacggcatcaattggatgacataaaatcaaaacttctagataatctttcaaaactccgacatgctcctagtgttcagtttcaagagcgacctcctgaggctgagttacctgagcaagatgaagacaaagagaatcctgatgaaagacatgatgctgattctgatgtggagatgaatgatgccaaacctttgcaggactctggaagagctcctgccattgcgcttaaaaaaaggacgtggcttctatcgtcttctccaacgaagcagtagtaaggtttgatctgatcccctggttatggttacactcaaggatgtctcagctctgattccttaacccaacttggcgagatggcgatcagagaggaactggggtgttgttgtatacgacctgtggactatggttgcaacaatgtaatttttttatcaggttcctatatgtaattggccctcgttatgggtatgaatgaatgaaatcaccccttctc

SEQ ID NO: 83184 - DNA, 987 bp, Zea Mays
catccaacggatgagcgcgtccaacaacaccgcccgcagcctcgttttatgtttctggaatcactcgctccactctctctctcttgttctctacgcctctcgattcttctcgccgacgccttctctctcagtgactcttttcaccttcgcgctacagttcttcctcctcgctctcacagcctcttcatcgcgatgattttctttggcctgcgaagcaccgctcccacgcattcctcctagaagcatcgcgagagtgcgagacacaaatctttcaaaagaaaaaaaaacgttgttgtcgctggagtttacgagttctgttttcgtcgcctggatgaggtgaggcgacgctgcgatggagatgaggtcgcgttgaggaggtgaggcgacggagacaaagtgaaaacacaaaaagagttgaagaacaactttaggaccatgtgacgctttgaagaataactaatttatataaaaaggcaagtcttatggcgttcaagtggcaatggatttattgatgggactatccttttaacctgcaaatggttggaatgactagagcaggagatattgttgttggagaattgggcttctttgctataggcctcaagtattcacatttcgaacaaaatcattacgcctgcaggcagatatgcatacggatggggacatactgctgaaatcagagttgatcgatccatcctcaaggagcctgcaccagacctttagttttggacaggaaagaaaaccctaatgagggtgtcctgctgaagcaagtgcctactaccatgatgcattgtcttcagttggattcatacctgtagagtgtcaagtttgtacgctgcttcacaagtccctgttgtatccaaacttgactaggacaacttgatcttagtctgctcaaaagagaagttgcaagaacaacttgatgtgcttgatcgccaatgtgatatgcgttcacaagtgcaccgtggttctgcccgtcctccccct

SEQ ID NO: 83185 - DNA, 3327 bp, Zea Mays
cttctctctcagtgactcttttcaccttcgcgctacagttcttcctcctcgctctcacagcctcttcatcgcgatgattttctttggcctgcgaagcaccgctcccacgcattcctcctagaagcatcgcgagagtgcgagacacaaatctttcaaaagaaaaaaaaacgttgttgtcgctggagtttacgagttctgttttcgtcgcctggatgaggtgaggcgacgctgcgatggagatgaggtcgcgttgaggaggtgaggcgacggagacaaagtgaaaacacaaaaagaggtatgttctccttcccttcggcgatgtctaccgctgcatttcggccccctccccaccattcggcgttggattttgcatagcccttgatgctagggttctgtgtttttttgtattctcttcgttcttcactccttgacgccgaggatggctcatccggtgaatcgctgcaattctctagtctagtgttcatgatgagatgcagagacgtaagctggtatagtgtacgcgactgtgttaactgctcgtgctttgcgctgatggtcctccccctttctctgaccagggcaacgtctagaataggatgctgccaagtggtagcagtaaattggttcatgcgttgtagctgttcgatgttatgccctagctgaatgtggtcttgtgacgcataaaaaagaggcaatttaggtgttgattgttcacaggaaggttaggatttagttatcaaaagaagtcttcgaaagcatatacacaacaatataggaagctatttttggtgcccctaccatgtaaggtgatactagacttgaagaacattgccttggtcgacctaattaagctccaacctaaaataaataggtttatgttagcagaaaattttaacgatcatgcatgcacacacatgtatatgtttctaatagttggttaatatgtgcctttgatttcttaccaatgtattgtacttaacgttctttactttttctatcacacatttttacaacattaaatctgattggtactaaccttttcagaatgcttgtgttgtagttgaagaacaactttaggaccatgtgacgctttgaagaataactaatttatataaaaaggtgaatttcccactccttttttgagaaaaggtttgctgcttatattactattttctttgctggaatcaaatgaaaaaaataaagtttaccagcctctttgtcacatgaaaattttattgttttattattaatgttgatatgctggtgatatttagttgattgcattcacctgagaactaatactatccctcacctctctttaccatggaaatcttaggaggtgtttggttggattgttttggtctgttaatgatttacagcgtgatccggttacgtttgttgctatttgttttggccgtgatgtaatcgattcatgcagcatcagttacgacgcttcagattggcgatcccgccagtcttgcggcactatcccattacgaccatgtccctcctctccgcttgagcaaaccaaacaattgacgcttttcattgcatctcgtaacaactagcgccgtcatttgattccatttatgttgccgctcccaaaacacaaccaaacagcaagttagtgttatgctaaatatgctgctaacgccgacaaaaaaggcttcaaaacaagtatgtacctcggtcttatatgtagatttatatttatctcattatatatttgtttctttgtatatatatatggtacatacctagccatgacataagcaattatatagttctaatgctttaacgttcttacattacaatcgttttggttatgtattatctttagagttacaactatttcattttcattattaaacttttcaaattcaatgttctcaaaatgtaccacatgaaaattttgttgatctattttttatgctgatagaaaaggaagaattcgaggaatataagcataaggagtcatgactccaccctatccatgaatattataagaatttctatattacaatcgcggtaggaaacggcgcttcaaagactatccacgtcagcttctaatttatcatctgttggatactacatcaacggcaaagcgcagcagccaaaaaaccaagtgttgaccatcagtctagagacttccacaagctccacgaaacaaaccttcagacccttcatcctcgccttttcacgcgctcagatccccgatgatgcgttacaatgcatccttgtgctcctcgcgtccctcgccgctgccatcgccgcagcatcctcgcacactcactcgctctcgtgctctgcctcggcctgccaccaccaccaccatctcgcctgctgctcgccaatggcccctgcctcgtcgctggttgcaggctcctccactcactccgtcgcctccgccacatcctcgggatatgatgctctgtccccttcggatccggctatgattcttgtccctcgcggcgctcaagtggccccgcatgccactctcctagcgtcattcgtcgccccctctgcgcacggcggtgtcggcgtctccaagtgcctcttcgtgatgttttccatcgatgagtgtggcatgtcatgcgagatgtctcccccttcttcttgaccggtttaactgcaacataatgttcatgtggagaacaggcaagtcttatggcgttcaagtggcaatggatttattgatgggactatccttttaacctgcaaatggttggaatgactagagcaggagatattgttgttggagaattgggcttctttgctataggcctcaagtattcacatttcgaacaaaatcattacgcctgcaggcagatatgcatacggatggggacatactgctgaaatcagagttgatcgatccatcctcaaggagcctgcaccagacctttagttttggacaggaaagaaaaccctaatgagggtgtcctgctgaagcaagtgcctactaccatgatgcattgtcttcagttggattcatacctgtagagtgtcaagtttgtacgctgcttcacaagtccctgttgtatccaaacttgactaggacaacttgatcttagtctgctcaaaagagaagttgcaagaacaacttgatgtgcttgatcgccaatgtgatatgtaagtatcttcacaaattggtccatgtagtttaaatgtagttgtcatgtattttagctttcaaagggacaaccttgcaggtattggttgtcttttatagattgcaaactcctaaagagtacacatcccggcagatggcacttcttggccagttctgtacatagaaatgcacacaagatttaacattgctgtttg

SEQ ID NO: 83186 - DNA, 2596 bp, Zea Mays
catccaacggatgagcgcgtccaacaacaccgcccgcagcctcgttttatgtttctggaatcactcgctccactctctctctcttgttctctacgcctctcgattcttctcgccgacgccttctctctcagtgactcttttcaccttcgcgctacagttcttcctcctcgctctcacagcctcttcatcgcgatgattttctttggcctgcgaagcaccgctcccacgcattcctcctagaagcatcgcgagagtgcgagacacaaatctttcaaaagaaaaaaaaacgttgttgtcgctggagtttacgagttctgttttcgtcgcctggatgaggtgaggcgacgctgcgatggagatgaggtcgcgttgaggaggtgaggcgacggagacaaagtgaaaacacaaaaagagttgaagaacaactttaggaccatgtgacgctttgaagaataactaatttatataaaaaggtgaatttcccactccttttttgagaaaaggtttgctgcttatattactattttctttgctggaatcaaatgaaaaaaataaagtttaccagcctctttgtcacatgaaaattttattgttttattattaatgttgatatgctggtgatatttagttgattgcattcacctgagaactaatactatccctcacctctctttaccatggaaatcttaggaggtgtttggttggattgttttggtctgttaatgatttacagcgtgatccggttacgtttgttgctatttgttttggccgtgatgtaatcgattcatgcagcatcagttacgacgcttcagattggcgatcccgccagtcttgcggcactatcccattacgaccatgtccctcctctccgcttgagcaaaccaaacaattgacgcttttcattgcatctcgtaacaactagcgccgtcatttgattccatttatgttgccgctcccaaaacacaaccaaacagcaagttagtgttatgctaaatatgctgctaacgccgacaaaaaaggcttcaaaacaagtatgtacctcggtcttatatgtagatttatatttatctcattatatatttgtttctttgtatatatatatggtacatacctagccatgacataagcaattatatagttctaatgctttaacgttcttacattacaatcgttttggttatgtattatctttagagttacaactatttcattttcattattaaacttttcaaattcaatgttctcaaaatgtaccacatgaaaattttgttgatctattttttatgctgatagaaaaggaagaattcgaggaatataagcataaggagtcatgactccaccctatccatgaatattataagaatttctatattacaatcgcggtaggaaacggcgcttcaaagactatccacgtcagcttctaatttatcatctgttggatactacatcaacggcaaagcgcagcagccaaaaaaccaagtgttgaccatcagtctagagacttccacaagctccacgaaacaaaccttcagacccttcatcctcgccttttcacgcgctcagatccccgatgatgcgttacaatgcatccttgtgctcctcgcgtccctcgccgctgccatcgccgcagcatcctcgcacactcactcgctctcgtgctctgcctcggcctgccaccaccaccaccatctcgcctgctgctcgccaatggcccctgcctcgtcgctggttgcaggctcctccactcactccgtcgcctccgccacatcctcgggatatgatgctctgtccccttcggatccggctatgattcttgtccctcgcggcgctcaagtggccccgcatgccactctcctagcgtcattcgtcgccccctctgcgcacggcggtgtcggcgtctccaagtgcctcttcgtgatgttttccatcgatgagtgtggcatgtcatgcgagatgtctcccccttcttcttgaccggtttaactgcaacataatgttcatgtggagaacaggagatattgttgttggagaattgggcttctttgctataggcctcaagtattcacatttcgaacaaaatcattacgcctgcaggcagatatgcatacggatggggacatactgctgaaatcagagttgatcgatccatcctcaaggagcctgcaccagacctttagttttggacaggaaagaaaaccctaatgagggtgtcctgctgaagcaagtgcctactaccatgatgcattgtcttcagttggattcatacctgtagagtgtcaagtttgtacgctgcttcacaagtccctgttgtatccaaacttgactaggacaacttgatcttagtctgctcaaaagagaagttgcaagaacaacttgatgtgcttgatcgccaatgtgatatgtaagtatcttcacaaattggtccatgtagtttaaatgtagttgtcatgtattttagctttcaaagggacaaccttgcaggtattggttgtcttttatagattgcaaactcctaaagagtacacatcccggcagatggcacttcttggccagttctgtacatagaaatgcacacaagatttaacattgctgtttg

SEQ ID NO: 83187 - DNA, 1740 bp, Zea Mays
catccaacggatgagcgcgtccaacaacaccgcccgcagcctcgttttatgtttctggaatcactcgctccactctctctctcttgttctctacgcctctcgattcttctcgccgacgccttctctctcagtgactcttttcaccttcgcgctacagttcttcctcctcgctctcacagcctcttcatcgcgatgattttctttggcctgcgaagcaccgctcccacgcattcctcctagaagcatcgcgagagtgcgagacacaaatctttcaaaagaaaaaaaaacgttgttgtcgctggagtttacgagttctgttttcgtcgcctggatgaggtgaggcgacgctgcgatggagatgaggtcgcgttgaggaggtgaggcgacggagacaaagtgaaaacacaaaaagaggtatgttctccttcccttcggcgatgtctaccgctgcatttcggccccctccccaccattcggcgttggattttgcatagcccttgatgctagggttctgtgtttttttgtattctcttcgttcttcactccttgacgccgaggatggctcatccggtgaatcgctgcaattctctagtctagtgttcatgatgagatgcagagacgtaagctggtatagtgtacgcgactgtgttaactgctcgtgctttgcgctgatggtcctccccctttctctgaccagggcaacgtctagaataggatgctgccaagtggtagcagtaaattggttcatgcgttgtagctgttcgatgttatgccctagctgaatgtggtcttgtgacgcataaaaaagaggcaatttaggtgttgattgttcacaggaaggttaggatttagttatcaaaagaagtcttcgaaagcatatacacaacaatataggaagctatttttggtgcccctaccatgtaaggtgatactagacttgaagaacattgccttggtcgacctaattaagctccaacctaaaataaataggtttatgttagcagaaaattttaacgatcatgcatgcacacacatgtatatgtttctaatagttggttaatatgtgcctttgatttcttaccaatgtattgtacttaacgttctttactttttctatcacacatttttacaacattaaatctgattggtactaaccttttcagaatgcttgtgttgtagttgaagaacaactttaggaccatgtgacgctttgaagaataactaatttatataaaaaggcagatatgcatacggatggggacatactgctgaaatcagagttgatcgatccatcctcaaggagcctgcaccagacctttagttttggacaggaaagaaaaccctaatgagggtgtcctgctgaagcaagtgcctactaccatgatgcattgtcttcagttggattcatacctgtagagtgtcaagtttgtacgctgcttcacaagtccctgttgtatccaaacttgactaggacaacttgatcttagtctgctcaaaagagaagttgcaagaacaacttgatgtgcttgatcgccaatgtgatatgtaagtatcttcacaaattggtccatgtagtttaaatgtagttgtcatgtattttagctttcaaagggacaaccttgcaggtattggttgtcttttatagattgcaaactcctaaagagtacacatcccggcagatggcacttcttggccagttctgtacatagaaatgcacacaagatttaacattgctgtttg

SEQ ID NO: 83188 - DNA, 1818 bp, Zea Mays
ccatgcttcgtcgccgaaggtcctgcatgaagaaacaccttcggcaaaacctgtttatacgtaataccgaagctaccgctcatgaagcttcaatattatagcgtatccgaaggtgaagggtcgaaccgacttaaagatggaatgactttttagtccataagggtctgagtcataattgtaatcttttgtaaggggtatgattgtaatttcttacaggctgtgtcctgtgcctataaatagtgaacagtactcctctactgttcacggaatcctgtaactgctaacgcattattctggaattattgttctttgtcaaggcaaaggtataaatgtaaccaaacatcatgttttaatatctcaatttatattataaaatgagcaaatgatgttattcattctggatattctttaatgttttatactttatatttcatttcgcattattttatttctgattacgaaggtaggacctttgtaatttatcatccatgaccttcgtccgaagctcattaaatcctcagggaaataatgcttgagcggacgaagggctttgacatttaacattttatgttgccttgttcttaattcatagcatttgagaacaagtccccaacaatgtcttctttgtttaattacccatatagaaaaggctacatgtcaactttgtattgtagggacatgtcggtataatagttacaaaatttaaattttcatcacctctagatgactcgggctttattggtagtcctttatttcatttccgtgctttacgatgcttcctattgttcccatttttttgttcaatggacatcgtggcatatcttttcttatccctatgcctcttacattcattagcatcgaccattggtccaagcgagtatgatgaagtaccacatgagtggatatatagaaaaggaatccaaatccgtcgaatcgctcatgttatgatcttctacattctaggtctccgcgttccatcatctagcttatgttcttcatgtagcattcagatcgaatgactctatgaaattacgtcgatacttccacatattatgggtaacgtaggagacatccctattttttcccggggtcttaattaccactgcttaactttcaattcgcctctaaccatcaaattaaatgtgaataacccgtcctcctctctttgaaacaaggggcgcttccggttctgtgtgtgcttcaaacaattttgtcttctccagttaccatatctctagagtcaataattttctatgaggaactattgaactaaatcacttgctgccattaactttgtgtttcactgttcctctacttattatgtttaaatcattattcgacatgtgtgtagtaacttttttacctttaatgctggtgtttgagatgtttgtaaatggtgtgcgaccaacattatgccccatcagatatgtttctattggttctccattttcactaaagaaaatctgctagggacaatgtactggtttagttactttcacacacaatctgatgcctattgtcactaggtatcagtttgcacacatttttacgagaaacctattattgttgccacacagtttgacacaatttatgcagttctcaagcacaccaagtttcacagactgttgtaacataacaaacaaattcatagtcaaccaaaatatcagcgtctgacgtgttcttttttcgtcttgacaatttacaattgagattaaaaaactagattatctgtttattacaatgattgtagcgatctctttagtgttcaagtgtagattataatgatacacacatatatttgtatatggaatgtttttg

SEQ ID NO: 83189 - DNA, 1311 bp, Zea Mays
cgatttttttggtgcttccaatggcgcgatctttgcctgcctacgatttgggcaaaatcaattccagatctattgcatgtgctttctgagttgcccaggcagcttaacttcattgagcataccagtgacatcggatggaaggagtaccagagggcgaagccagtgatcatcgaccctgggctatacagcctgcagaagtctgacgttttctggataacagagaaaaggagtgtcccaactgcattcaagctcttcaccggctcagcatggatgatgcttactcatcagttcattgaatattgtatatggggatgggacaatctcccaaggacagtcctgatgtattacgcaaattttctttcttcaccagagggttacttccacactgtcatctgcaatgtccccgagttccgcaacaccacagtcaaccatgatctacatttcatttcttgggacaacccaccaaagcaacaccctcattatctcacactcgctgacttcgatggtatggttaacagcaacgcaccctttgcaaggaagtttggaagagaggatcctgtgctggacaagattgaccaggaactgttggcccgccgacctgatggatttgtgcctggtggatggacagacctactgaacacaactgagaaagggaaacccttcacggttgagcgcgtgcaagatctccgcccaggtcctggtgtggacagattaaagaaactcgtcacaggattgctcacccaagaaggttttgatgacaagcattgcctgtgaaactcccagtaagatgattctggggcagtaggttacacgctcaaatttgaaggcatcgggccatttgctaggaatgcccctactagctgaggcagcagcacattagcgtcatgtacgcgaggatgcaacgataaggaaggtgctcttacagacaactgcttgagttgagttaccgtacagcaggagaccacggatgtagcagtcggagatgattatacagaactagtagctcattagtttattagatgattataatcagccccccaaccatgaataatgttggaatttttgacatttctgcgcccgagggttgtgcaaggtagcccattctttgtttcgaagccatggcacctggtgcaccagctggtagcgtgagacttcgttgtattgactagtggatgtttctgggtaaactgatacatttgattgcacacatgtattgatttgtttcttttctctttgatgagtatagcgaaaatgctcgtgctgttttcttgtctgttgcgatttgaacatccatctagttaccttatttca

SEQ ID NO: 83190 - DNA, 1135 bp, Zea Mays
atggagagcgacgaggagatcaggagggtgccggaggttggcctggagctgctgaccagcccgtcgacgtccggcagggaggcgaccgctgccgcggccgctgccgggacgtcgtccgcgtcgcaggcggccagcgccagccgccgcggccgcagcccggccgacaaggagcaccgccgcctcaaaaggtgcgttcacgcctcttcgaataccagcttgggcgatccattgcgagcttagcggcctcagagactgtcctcaagacacgataatcgagagcttgtgtcggcgtagttgcttcggaaccgggtgtcggcgcagcaggcacgggaaaggaagaaggcgtacctgagcgagctggaggtgagggtgaaggagctggagaagaggaactcggagctggaggagaagctgtccacgctgcagaacgagaaccagatgcttagacagatactgaagaacaccactgtcaacaacagaagaggcccaggtagcagcagtgctggtggagacagccaatagctgtcgtctatacaactcctcctagaacccggttgcacttcgaagaaactaattaattaaagcaaggaaataccgcttgagagagctagtagaaagattgaactggtcatgcaagctcgttatttagttacaatcatatatagccagcctcccttcacagggaccctgtgctgcatatatacgcacgtgttcagtgattcagtccgttctgcaactttgtctagctgtatgcatgcaatcgcgttgccaacttgtaattcgattcgccttcgtgtgtagactgtacgcaaggcggagtggacgcagtgcacaagtccgtggtgcaacaactgtaatgtaataactaggcttgtctgaattctgaatttgtgtgtcttctgtactgtacggttgtgcaaacgtgcagattcgctgatgacacattttatttagcttgaccaatacatcgacatgtcctctcccatatgctagaattttagaagatataaatattagttactatttagtaacccattcattttaaactatgagatgtttttttttgtttttttaagatgtacattgtttggggagccttcgcgccgaagttctacaagagtgtgtttggtttgaa

SEQ ID NO: 83191 - DNA, 1281 bp, Zea Mays
cgtccacacgcgcacacacacacaaaaactgtcgaccatgttgaacatactcaacaaatcgtgcaggaaggagattcagctgacagagaaaaggcgcacacaattaataagaaatctatcccctgccgactgccgaccgccggccgtttgccgacgagccgagacccgcgagggcgcgcgcgcaggaacatgcaggatcagacgacgacgagctcgctgctctccagcagcgagcgctcctccagctcggcgccggagacgggggagaccagggaagaagcgatggagagcgacgaggagatcaggagggtgccggaggttggcctggagctgctgaccagcccgtcgacgtccggcagggaggcgaccgctgccgcggccgctgccgggacgtcgtccgcgtcgcaggcggccagcgccagccgccgcggccgcagcccggccgacaaggagcaccgccgcctcaaaaggcacgggaaaggaagaaggcgtacctgagcgagctggaggtgagggtgaaggagctggagaagaggaactcggagctggaggagaagctgtccacgctgcagaacgagaaccagatgcttagacagatactgaagaacaccactgtcaacaacagaagaggcccaggtagcagcagtgctggtggagacagccaatagctgtcgtctatacaactcctcctagaacccggttgcacttcgaagaaactaattaattaaagcaaggaaataccgcttgagagagctagtagaaagattgaactggtcatgcaagctcgttatttagttacaatcatatatagccagcctcccttcacagggaccctgtgctgcatatatacgcacgtgttcagtgattcagtccgttctgcaactttgtctagctgtatgcatgcaatcgcgttgccaacttgtaattcgattcgccttcgtgtgtagactgtacgcaaggcggagtggacgcagtgcacaagtccgtggtgcaacaactgtaatgtaataactaggcttgtctgaattctgaatttgtgtgtcttctgtactgtacggttgtgcaaacgtgcagattcgctgatgacacattttatttagcttgaccaatacatcgacatgtcctctcccatatgctagaattttagaagatataaatattagttactatttagtaacccattcattttaaactatgagatgtttttttttgtttttttaagatgtacattgtttggggagccttcgcgccgaagttctacaagagtgtgtttggtttgaa

SEQ ID NO: 83192 - DNA, 1476 bp, Zea Mays
gtcgaatttctgtcctggccaacgcgtggccttgtacgctaaaattgcattagttgtttttaggcctgtaggagtagatttcgtgtaacgctgcaaacaggaacatgtctaatatgagagatgtcgagggggccgtctgtaagagatcctggatgtttaccacacgtccacacgcgcacacacacacaaaaactgtcgaccatgttgaacatactcaacaaatcgtgcaggaaggagattcagctgacagagaaaaggcgcacacaattaataagaaatctatcccctgccgactgccgaccgccggccgtttgccgacgagccgagacccgcgagggcgcgcgcgcaggaacatgcaggatcagacgacgacgagctcgctgctctccagcagcgagcgctcctccagctcggcgccggagacgggggagaccagggaagaagcgatggagagcgacgaggagatcaggagggtgccggaggttggcctggagctgctgaccagcccgtcgacgtccggcagggaggcgaccgctgccgcggccgctgccgggacgtcgtccgcgtcgcaggcggccagcgccagccgccgcggccgcagcccggccgacaaggagcaccgccgcctcaaaaggttgcttcggaaccgggtgtcggcgcagcaggcacgggaaaggaagaaggcgtacctgagcgagctggaggtgagggtgaaggagctggagaagaggaactcggagctggaggagaagctgtccacgctgcagaacgagaaccagatgcttagacagatactgaagaacaccactgtcaacaacagaagaggcccaggtagcagcagtgctggtggagacagccaatagctgtcgtctatacaactcctcctagaacccggttgcacttcgaagaaactaattaattaaagcaaggaaataccgcttgagagagctagtagaaagattgaactggtcatgcaagctcgttatttagttacaatcatatatagccagcctcccttcacagggaccctgtgctgcatatatacgcacgtgttcagtgattcagtccgttctgcaactttgtctagctgtatgcatgcaatcgcgttgccaacttgtaattcgattcgccttcgtgtgtagactgtacgcaaggcggagtggacgcagtgcacaagtccgtggtgcaacaactgtaatgtaataactaggcttgtctgaattctgaatttgtgtgtcttctgtactgtacggttgtgcaaacgtgcagattcgctgatgacacattttatttagcttgaccaatacatcgacatgtcctctcccatatgctagaattttagaagatataaatattagttactatttagtaacccattcattttaaactatgagatgtttttttttgtttttttaagatgtacattgtttggggagccttcgcgccgaagttctacaagagtgtgtttggtttgaa

SEQ ID NO: 83193 - DNA, 1272 bp, Zea Mays
gtttgccttcgtctctctctctctccccctgagccccctctcgagcctggactttttcttcacctgtactggtccatcattagccaaatctgggtagagagatgatcagcaccagaggttaaatattaataacccctgcagaacccagttgcttactggaaaacaggcccagccaccacctttccatggcactggcaccggttgttgactgctctgctgcctgcacactaatggcggtctctgtccgtctacatatataacacagagggggccgctgcaggagcgggcgcggagcaacaccgtccagtccatcactgccctttgttctcctccacagtcgcagacaaagctggttcgtctcgcggagaggggaagccgggaaggtggataggcggcacccacccatcacccatggctgggttgcaaagatcggcgaccacgttcagacggtccggctcgtcgggcctggtctgggacgagcgtttcctgaccgaggccgacgccgaggcgaaggccggcgccgcggaggatgccgagcagccggagctccggcactcgaggagcgtcggcatgctgcgccgtgcgggcggcggtggagacagccgcagcaagaagggcaaggagagtaggcagaagcaggcggagtcggcgcggcgcagcaaccagcaggtgttccggaccaaggacgtggccccggacatggatcccccctcgccgagggtgtccggctgcgccttctgcgccgtcttccgcgggggctctggcggtactggccgcagggcacaggcacgccgccggtccaagcccaggaagaagtgacggcgtagcaacacgtacgtacgtgcggtacgttgttgtttgtgccatctgtaaagtccgggccatggttgttcgtgcgtgtacatgtttactatactaaatactagggtcatatatagatgagcttgctactcggtaatcggtatacgtacgccattatttagttcaggatagttcctccttttttgggtcggtcggttggtttcttgatccagatccatgcttttgaggtttgggcgacggttagatgttacttgtctactatatatgcagcagctatttatgagatctggggctgttgttcttgttcttactagcttggtgcaactttttcgcttgggttctgccgctggtccttcgggaagcgcatgtggttttggttttgaaactgggagggaagcagggtggagcgacgatgaattggtccgtgatgcggctgaactgggagggcag

SEQ ID NO: 83194 - DNA, 1191 bp, Zea Mays
gggagatgcaagaaaagaacaagacaatgataaatggttaaatattaataacccctgcagaacccagttgcttactggaaaacaggcccagccaccacctttccatggcactggcaccggttgttgactgctctgctgcctgcacactaatggcggtctctgtccgtctacatatataacacagagggggccgctgcaggagcgggcgcggagcaacaccgtccagtccatcactgccctttgttctcctccacagtcgcagacaaagctggttcgtctcgcggagaggggaagccgggaaggtggataggcggcacccacccatcacccatggctgggttgcaaagatcggcgaccacgttcagacggtccggctcgtcgggcctggtctgggacgagcgtttcctgaccgaggccgacgccgaggcgaaggccggcgccgcggaggatgccgagcagccggagctccggcactcgaggagcgtcggcatgctgcgccgtgcgggcggcggtggagacagccgcagcaagaagggcaaggagagtaggcagaagcaggcggagtcggcgcggcgcagcaaccagcaggtgttccggaccaaggacgtggccccggacatggatcccccctcgccgagggtgtccggctgcgccttctgcgccgtcttccgcgggggctctggcggtactggccgcagggcacaggcacgccgccggtccaagcccaggaagaagtgacggcgtagcaacacgtacgtacgtgcggtacgttgttgtttgtgccatctgtaaagtccgggccatggttgttcgtgcgtgtacatgtttactatactaaatactagggtcatatatagatgagcttgctactcggtaatcggtatacgtacgccattatttagttcaggatagttcctccttttttgggtcggtcggttggtttcttgatccagatccatgcttttgaggtttgggcgacggttagatgttacttgtctactatatatgcagcagctatttatgagatctggggctgttgttcttgttcttactagcttggtgcaactttttcgcttgggttctgccgctggtccttcgggaagcgcatgtggttttggttttgaaactgggagggaagcagggtggagcgacgatgaattggtccgtgatgcggctgaactgggagggcag

SEQ ID NO: 83195 - DNA, 2343 bp, Zea Mays
cgtcggacatccagtagcccgctgcagcacattctatcatcgagtaaactctacgtcgagtaaacgcaacaacgcgcactcgcgcagagacactgcccatcaggatttcgcaaaagcaacaaaacccactcgacgtcgagggtagaagaggcctgcaaatttccgaagagctcgcggaaatggcgacggtgctgccgcttgccgccgcctcggcctcggccacgccgaggacttgcatctccggcggcccagttcccgcgcgattcctcgggacttgcatgcgtctccgcatccacatcccaccgcggggcgttgcctgcgccctcagaaggagacccaccaagtacaagactaaaatccagagtgaggaggatgtggtggctgcagaagatgtcatggatgatgatgacgacgaggatggtgcactggaagcacttttcaagcagctggaagaagatcttgacaatgatgatttatctgtcgatgataatgatatatcagaagaagatatggcaaggtttgaaaaggagttggcagaagcaattgaagatgtcagtggtgttgatgactcagcgggggattcgttgctgagctctggcgactatggtattgatgagcaactagatggaagcgaacgggcagagctgaaaacctggcaactccggagattggctcgtgcactgaaaataggccggcgtaaaactagtattaagaatcttgcaggggagctaggcctagataggggtttggttattgaaatgctccgcaatccaccaccgaagcttctactcatgtctgattctttgcctgatgaagtcccttctaaatctgaagtgaaggaaatagaaacccctagtacgaccactgttgacgaggttgataccagtgaaatcaaaccacagttggagcttccagtgcacgtcatgagtgcagaatggtctgcaagaaaaagactgaaaaaggtgcaacttgagaccttagaaagagtctacctgcgaagcaaacggcccacgaatacaatggtcagcagcatagttcaagtgacaaaccttccgcgaaagaccattgttaagtggtttgaggatagaagggagcaagatggagtccctgaccatcgtgctgcattcaagagatccctatctgagattggtgctagttcataacttcttcagataagcctttgttacggttaaatattaataacccctgcagaacccagttgcttactggaaaacaggcccagccaccacctttccatggcactggcaccggttgttgactgctctgctgcctgcacactaatggcggtctctgtccgtctacatatataacacagagggggccgctgcaggagcgggcgcggagcaacaccgtccagtccatcactgccctttgttctcctccacagtcgcagacaaagctggttcgtctcgcggagaggggaagccgggaaggtggataggcggcacccacccatcacccatggctgggttgcaaagatcggcgaccacgttcagacggtccggctcgtcgggcctggtctgggacgagcgtttcctgaccgaggccgacgccgaggcgaaggccggcgccgcggaggatgccgagcagccggagctccggcactcgaggagcgtcggcatgctgcgccgtgcgggcggcggtggagacagccgcagcaagaagggcaaggagagtaggcagaagcaggcggagtcggcgcggcgcagcaaccagcaggtgttccggaccaaggacgtggccccggacatggatcccccctcgccgagggtgtccggctgcgccttctgcgccgtcttccgcgggggctctggcggtactggccgcagggcacaggcacgccgccggtccaagcccaggaagaagtgacggcgtagcaacacgtacgtacgtgcggtacgttgttgtttgtgccatctgtaaagtccgggccatggttgttcgtgcgtgtacatgtttactatactaaatactagggtcatatatagatgagcttgctactcggtaatcggtatacgtacgccattatttagttcaggatagttcctccttttttgggtcggtcggttggtttcttgatccagatccatgcttttgaggtttgggcgacggttagatgttacttgtctactatatatgcagcagctatttatgagatctggggctgttgttcttgttcttactagcttggtgcaactttttcgcttgggttctgccgctggtccttcgggaagcgcatgtggttttggttttgaaactgggagggaagcagggtggagcgacgatgaattggtccgtgatgcggctgaactgggagggcag

SEQ ID NO: 83196 - DNA, 2331 bp, Zea Mays
cgtcggacatccagtagcccgctgcagcacattctatcatcgagtaaactctacgtcgagtaaacgcaacaacgcgcactcgcgcagagacactgcccatcaggatttcgcaaaagcaacaaaacccactcgacgtcgagggtagaagaggcctgcaaatttccgaagagctcgcggaaatggcgacggtgctgccgcttgccgccgcctcggcctcggccacgccgaggacttgcatctccggcggcccagttcccgcgcgattcctcgggacttgcatgcgtctccgcatccacatcccaccgcggggcgttgcctgcgccctcagaaggagacccaccaagtacaagactaaaatccagagtgaggaggatgtggtggctgcagaagatgtcatggatgatgatgacgacgaggatggtgcactggaagcacttttcaagcagctggaagaagatcttgacaatgatgatttatctgtcgatgataatgatatatcagaagaagatatggcaaggtttgaaaaggagttggcagaagcaattgaagatgtcagtggtgttgatgactcagcgggggattcgttgctgagctctggcgactatggtattgatgagcaactagatggaagcgaacgggcagagctgaaaacctggcaactccggagattggctcgtgcactgaaaataggccggcgtaaaactagtattaagaatcttgcaggggagctaggcctagataggggtttggttattgaaatgctccgcaatccaccaccgaagcttctactcatgtctgattctttgcctgatgaagtcccttctaaatctgaagtgaaggaaatagaaacccctagtacgaccactgttgacgaggttgataccagtgaaatcaaaccacagttggagcttccagtgcacgtcatgagtgcagaatggtctgcaagaaaaagactgaaaaaggtgcaacttgagaccttagaaagagtctacctgcgaagcaaacggcccacgaatacaatggtcagcagcatagttcaagtgacaaaccttccgcgaaagaccattgttaagtggtttgaggatagaagggagcaagatggagtccctgaccatcgtgctgcattcaagagatccctatctgagattggtgctagttcataacttcttcaggcaggttaaatattaataacccctgcagaacccagttgcttactggaaaacaggcccagccaccacctttccatggcactggcaccggttgttgactgctctgctgcctgcacactaatggcggtctctgtccgtctacatatataacacagagggggccgctgcaggagcgggcgcggagcaacaccgtccagtccatcactgccctttgttctcctccacagtcgcagacaaagctggttcgtctcgcggagaggggaagccgggaaggtggataggcggcacccacccatcacccatggctgggttgcaaagatcggcgaccacgttcagacggtccggctcgtcgggcctggtctgggacgagcgtttcctgaccgaggccgacgccgaggcgaaggccggcgccgcggaggatgccgagcagccggagctccggcactcgaggagcgtcggcatgctgcgccgtgcgggcggcggtggagacagccgcagcaagaagggcaaggagagtaggcagaagcaggcggagtcggcgcggcgcagcaaccagcaggtgttccggaccaaggacgtggccccggacatggatcccccctcgccgagggtgtccggctgcgccttctgcgccgtcttccgcgggggctctggcggtactggccgcagggcacaggcacgccgccggtccaagcccaggaagaagtgacggcgtagcaacacgtacgtacgtgcggtacgttgttgtttgtgccatctgtaaagtccgggccatggttgttcgtgcgtgtacatgtttactatactaaatactagggtcatatatagatgagcttgctactcggtaatcggtatacgtacgccattatttagttcaggatagttcctccttttttgggtcggtcggttggtttcttgatccagatccatgcttttgaggtttgggcgacggttagatgttacttgtctactatatatgcagcagctatttatgagatctggggctgttgttcttgttcttactagcttggtgcaactttttcgcttgggttctgccgctggtccttcgggaagcgcatgtggttttggttttgaaactgggagggaagcagggtggagcgacgatgaattggtccgtgatgcggctgaactgggagggcag

SEQ ID NO: 83197 - DNA, 1212 bp, Zea Mays
cgtcggacatccagtagcccgctgcagcacattctatcatcgagtaaactctacgtcgagtaaacgcaacaacgcgcactcgcgcagagacactgcccatcaggatttcgcaaaagcaacaaaacccactcgacgtcgagggtagaagaggcctgcaaatttccgaagagctcgcggaaatggcgacggtgctgccgcttgccgccgcctcggcctcggccacgccgaggacttgcatctccggcggcccagttcccgcgcgattcctcgggacttgcatgcgtctccgcatccacatcccaccgcggggcgttgcctgcgccctcagaaggagacccaccaagtacaagactaaaatccagagtgaggaggatgtggtggctgcagaagatgtcatggatgatgatgacgacgaggatggtgcactggaagcacttttcaagcagctggaagaagatcttgacaatgatgatttatctgtcgatgataatgatatatcagaagaagatatggcaaggtttgaaaaggagttggcagaagcaattgaagatgtcagtggtgttgatgactcagcgggggattcgttgctgagctctggcgactatggtattgatgagcaactagatggaagcgaacgggcagagctgaaaacctggcaactccggagattggctcgtgcactgaaaataggccggcgtaaaactagtattaagaatcttgcaggggagctaggcctagataggggtttggttattgaaatgctccgcaatccaccaccgaagcttctactcatgtctgattctttgcctgatgaagtcccttctaaatctgaagtgaaggaaatagaaacccctagtacgaccactgttgacgaggttgataccagtgaaatcaaaccacagttggagcttccagtgcacgtcatgagtgcagaatggtctgcaagaaaaagactgaaaaaggtgcaacttgagaccttagaaagagtctacctgcgaagcaaacggcccacgaatacaatggtcagcagcatagttcaagtgacaaaccttccgcgaaagaccattgttaagtggtttgaggatagaagggagcaagatggagtccctgaccatcgtgctgcattcaagagatccctatctgagattgtgggctcaggtggaccatctatcaaatgaaaggtaaaaccatgacctcgcaagtagtttctac

SEQ ID NO: 83198 - DNA, 1666 bp, Zea Mays
cgtcggacatccagtagcccgctgcagcacattctatcatcgagtaaactctacgtcgagtaaacgcaacaacgcgcactcgcgcagagacactgcccatcaggatttcgcaaaagcaacaaaacccactcgacgtcgagggtagaagaggcctgcaaatttccgaagagctcgcggaaatggcgacggtgctgccgcttgccgccgcctcggcctcggccacgccgaggacttgcatctccggcggcccagttcccgcgcgattcctcgggacttgcatgcgtctccgcatccacatcccaccgcggggcgttgcctgcgccctcagaaggagacccaccaagtacaagactaaaatccagagtgaggaggatgtggtggctgcagaagatgtcatggatgatgatgacgacgaggatggtgcactggaagcacttttcaagcagctggaagaagatcttgacaatgatgatttatctgtcgatgataatgatatatcagaagaagatatggcaaggtttgaaaaggagttggcagaagcaattgaagatgtcagtggtgttgatgactcagcgggggattcgttgctgagctctggcgactatggtattgatgagcaactagatggaagcgaacgggcagagctgaaaacctggcaactccggagattggctcgtgcactgaaaataggccggcgtaaaactagttcccttctaaatctgaagtgaaggaaatagaaacccctagtacgaccactgttgacgaggttgataccagtgaaatcaaaccacagttggagcttccagtgcacgtcatgagtgcagaatggtctgcaagaaaaagactgaaaaaggtgcaacttgagaccttagaaagagtctacctgcgaagcaaacggcccacgaatacaatggtcagcagcatagttcaagtgacaaaccttccgcgaaagaccattgttaagtggtttgaggatagaagggagcaagatggagtccctgaccatcgtgctgcattcaagagatccctatctgagattggtgctagttcataacttcttcagataagcctttgttacggtgtttacttggaaccattacaaacatgtaaatttgagctttgaaattatgacaagttttgcaagctcaacatgcagtatcttttagattgtagtctcagcctatcatgcttatcaaagcggtaaagcgaggagtggcaactaactaccgccttacgcatgagcgagtaaggcataagatgaggtggcaccttgtggccatgctacagtagtataggagcatgtcataccttgatgttgtcttctgtgcagcccgcagtccccagtgtgcatccaacaacacactgcttccccaaagataaactggagtgctcagtgagcacagtccacaatagtacaatactaatgcataattagttaggtacaaatactctcacaactctcaagcatcattaagtcaatagaagtcatcctctgtcaaaaaaggatctgaattgccaccgccagcagcagcttgatcatcactttcatgagcaacaataggtgcaatttcaccatagtcagcaacttccatatcatcaaccaaatattcttcaccactttcatgtgcagcttgatcgtccatgtcttcagcctcctgcagttcat

SEQ ID NO: 83199 - DNA, 722 bp, Zea Mays
gccgcgcctccccaaaaccctaggtctcctctgttcaccatggtaattgctggtgcgccgccgccacaccattgcgcctctcaactttgctccacccccgatactaggtctaggagtgcggcaaggacctcgtgggtgtgtgcgtcaagaatcaggtcggttgggcgctccaggaatcggcgattgctcgtcggagttcgtttcccctagtcaagttgttggacaccatggacagctcgggtcgacaccctaattcatggagaggaacaggtggttcaagaggagccacaacgaggagttcgatttgatctaggtggtgtctcccagttgactttctggtgccaaggatggattttagatccttttatatatttaattttataagactttcgctatctaataagtactctgattatattgtgacatttatttctatacactctgttataatatatgttgtcttctttggcgcatgtatgagatgcacccgacgttgtcccttaaaaccgagtgtgacagaagtggtattagaggaatattgactgtaggacgaaacctagatagaactggacaactcttacctacttaccttactctgagtcaattctaaacttatcttaatattttctcatctatttctgctttactctgattattcttaccttttctcttctaaagacaaaagtggatttcacactttgaaatcctatgcctaaagtgac

SEQ ID NO: 83200 - DNA, 3533 bp, Zea Mays
gccgcgcctccccaaaaccctaggtctcctctgttcaccatggtaattgctggtgcgccgccgccacaccattgcgcctctcaactttgctccacccccgatactaggtctaggagtgcggcaaggacctcgtgggtgtgtgcgtcaagaatcaggtcggttgggcgctccaggaatcggcgattgctcgtcggagttcgtttcccctagtcaagttgttggacaccatggacagctcgggtcgacaccctaattcatggtaatgatagcctctctggatttcctatacctccctcactgttttgcatcccgtcgcgtccgcgtaggagctccgaatcgggttggttgcatgcgcggaggttagcgctcgtcgttgaccgccatgggcgccgccgtggtgtgctctgttggggaaggggagattagaaccgttgatcggctagtgaatggttaggatcagtgctgagtgtgggagtgcttcgggccgttgattgacgatccaagggccaccatcatataccgattcgttttaagtggaggcagatcctggcgcttgttttctgatccgacggatccgactgtccacgcttgtttaaaatcctcgccgttgtttccaaatcggatggtggagggcgcgcaccgattcatcagctcgccgatttaatcgtgactgtgtaattgtgatcgagcgaacgtgatagctcttgttggcctcttgttctcaagtactatgaattaagaacaaggcaacacaagatgttaaatgttaattcccttcgtccttcggagcattattttccttaggatataatgatcttcagacgaaggtcatgaaggacataccttcatcatcgcaatatatgttaaataaaagaagaatcatatgacatataagaaacaacataaacaatcatataacattattaacttattcttattatataatcatggaaaggaaaatacaatattgaattacaaaagtaccttcggcttgatagaagacaagaaagtacaaacatgatgcaaaaacaagtacaagtccgcgtgaatagtacgagggtactattcacctatttataggcacgagacacagcccgtgtaaacttacatccaggcccttcacatttgctaataactttaaggtgatccaccgaggtctaaatagccttttcccttttaagtcggttccccttttctgtcgttatgccgaagctcccttgtgtgtagcttcgacgctgcgtcaaccttcgtattgttcatgcttttcacaccgtgtgattctgatccgagatagaaggcgcctgttcacatattacactcggaaaacattgttaaattatgtttttgaggaccttcggaagacgaaggcccccaacagctctataccctttcggtcgtgcaaacattcaaaagagtccctgtatttattgctaattaggccgccatccacggaagttcaaaaagaattacgattcagtcctttttattcctaaatggtccctgttcttaggaaaattgtatccgacgtcctactgttgactagaacactattattaaacataaaatttatccataaacttgtttaattaataactttcacattttaactctgttttgccccgttcgaattgcgttggactcgtattaatatttcctacaccatagtaacattattttaccatgtaacatgttctcaaaaataaataattaatttgtccaacccatggttattggattaacatgtttaatctgagttaatatagaattttagttatgatcatctactggaatatgattctgttgtaactaagatcaagttgagttagttacatcttttctcacacgatttattttaatcaccacaatatatagttttattgattaatcacttagaacctagtaaatcatatcttcgtaaccatgactccgttctttgtagttctcgatcccgcgatctcgtagcgacgcgtaaatcaatattatgcagcatgttcttatggttggtgtgatgttaattttgtctataccatgtctgtttgtattgctacgactagcgtgaggtcacgaggatctgaagaatcatcctggtaactggaatctcaagtgccaggcaagttgtgcccttgatccacttttgttacccaataatattctttattatcactattcaatgcataggtttaattttgatgggacccaataggtcaccttagtctgtttatcctgtttaccttgtttacccttgattcacttgggtagtaatgctattgcattatatggttttgggttaatatttcattatatccatgttccaattattctattattttatttatgttcatgtcaagatcattaatgttaattggaacatggagcttaacttgagaaacacgtgccaccataagggtggaatgggacgcccttggctgactaattaggaaagctagtggaagactaccttacccgaaaggggcaagggcagtaggggagttgtatgcaaggaggttcttgggttgattttgctgcgatggcggtcagacgggggattcttgcaagtgctcttcccacaaactgtagcaggttttcggaagctagtggaactttgtaaaggcctcgtagtggatccctagccattcacctcggcagtgtctaagggccttgcaaaccctagcgacatgggatacacgacttgtgggtacagggtacaacctctgcagagtgtaaaactggtatactagccgagctcacggtcaagagcagctcaggactctcgcatgattaatttatgaaacttaaattcaatttgtcatttgcatttgcatgggatttattattaattttgttcttttattatttattatggtttggtatttacttacatttagtaactgctaataaaattttgaccaacttataaaagcaatgctcagcttcaacctttatattgttgatcagccttacacattacatgaactcccacctttggtgagttcatgccacattattctccacaacttgttgagtgatgaacatgtgtgagctcacccttgctgtctcacacccctcacaggagaggaacaggtggttcaagaggagccacaacgaggagttcgatttgatctaggtggtgtctcccagttgactttctggtgccaaggatggattttagatccttttatatatttaattttataagactttcgctatctaataagtactctgattatattgtgacatttatttctatacactctgttataatatatgttgtcttctttggcgcatgtatgagatgcacccgacgttgtcccttaaaaccgagtgtgacagaagtggtattagaggaatattgactgtaggacgaaacctagatagaactggacaactcttacctacttaccttactctgagtcaattctaaacttatcttaatattttctcatctatttctgctttactctgattattcttaccttttctcttctaaagacaaaagtggatttcacactttgaaatcctatgcctaaagtgac

SEQ ID NO: 83201 - DNA, 3686 bp, Zea Mays
tgttgctcggcttcaccacgttcaactcccaggaaaacccccagccatcacctgccccagcgttcgctctccatgtttcctagccccagcggccagcctgtccttgctcgtttccaagctgtgctctagcaagcttctctgtagttcttccccaactgctcgctctcagcctgtccggtcctgcgtacttcaacactgttctacagccgtctgagctccacctcgtcgtcgacctgttgtttcagcgtcgtatccctcgacttcatcacagcatcaccggtgctctcgtcgtcgttgagctcttggcgcgacgtgacgtcatcgtcgttttctcgccagtcatgctcgacccacagctccttcgcgtcatcgtcttcgacaacccacaacctctgctctaacctcatcgcactcgcggaatcgtcgtgaagccgctagccgtcctcacacccgacaagctgtcgtgctcggtgtgttttctccgtgcggccttacgtgttcctctcgcttcatcggcttgtcgcgtgttagagcagagctccatgaagaagtggacatcaaagagaaattgctccagtacttgaatacccattggaaaggttttgatgtctttggcttcattagttgcttcatgtggaggtcttcaagcttagtttgcttatgtgtatttcttatggaaaggcttcacctttccaagtattgtaattaagttatgcacttcaaagactaacagaacttgcaaatattataactctttctagcatataaaacttgagttttggaaatgtaaataatgttttgtaagtcttccgctctatctccgaagtgtgtgtatatcaaatgtgaatactgtaatatacatgttttgtgggaaatccttgggccgataacacgggaggtgtaatacccaatttgtaagataatactagatgagacattagttcctatatgtgtaccatctctatttactatcacatgtgaatacctcatttaaaaacaaaggattaataaaagtcatgccactaaattgtgcatcatgctgaggttttattttgtgtgcatcttgtgacaacataaaaataatgtaaaaagaaatatattaaagtccaaagtggaatttaagatataaaagaattctagaatttagaagtggagaaagaaaagaaataccacataaaacataggaaataattatatacataaatatattcttttcatcaccaaatttgatttagtacatttgacttatgtgcaaatctacaactaaaattcaaatttaaatttgaaatcaaaaaggagaaaggaagaataaaaagaaaaagaaaacataaaataaaaagaaaaaccctcactaggcccaattccttgcctccagcccatctagcttccttcgcgcagcccatcatcgcgctcccacgaccacgtgctccaccgacaagggggccccacccgtcagccactctgcgcgccatcacatactcactgactttctgggccgcctcgtgagccgctcacctcaagtaacgcacctgcaccgaccagtgggtcctcccggtcagcctagtgtgccatgttcgcgtcgtccgtgcctgtgcgaatggaaccggctgtcaggcgccaccttcccctagctacccacctcgccgggatcggcggcggcgtgcgcagaaatcgcgcggggccattgtggtcaactcggttgcaggcgccgtatccgccgccctacaaatagcacgcccgtgccctgttgacctacctcgccccttcgacaactagcgttgtgccagaccaccttgtcgatagccatcgcaggcgttaaccaccgtcgctcccgttaaacactcatcgtgtgctctgggactaccctacgggagtgtggatcgtgtaccgaggagaattcgggcgtgagttacagcggcgtgaagggaattgctcgccgaagtggaaggagcaccgccgctccgcctagactcgagaacaacccgtctgcacgccgattctcggtaattttcacctcctccgtgttcgccgttgacataccttcatgtagtatgggttacttagggtttgggctcaaccacgcgcacggggcgatgtctccggcgagcgcgtcgccgggtggagctctctccgccgtatctgggcggtgaggtagaagacggattgtgtgctgttcatcttcgttgcaacggccacgattagatctaggacaacgcttcggtttggagtagcagtagccagtgtatttaaatcatgtggacgagatttggtttgaggcttttaaatcaggagcgccagatttagatcgtgcggtcctcgttccataccgattcgatcttggataggtctaatctaagccataaacttctaatccaatggccgagtgcgctgcgtaccccttcgccctatcgtttttacataagaaacctcctaaaaatagaaaatgaacccgccgtccagagcaacagcgctctgagtctctagaatttttgtagtttagcccctgttgtctctagaatttgaggcgcagcccagggaatttgtaaatcaggaaaattgaattggaaatctatttttaatgtaaagtaaatggctagaattggtttaaatcatagaaagttcatatgaactccaaattgatccatttcagtttctaaaattttgtaatattattgtttatccattagtaccgctgttttgacatgaaagtcacattaaaatttatttcccaactaatcttataccaaacacataaaatctttggaaagtcataacttaaaatccataattccagaattaatgattcctgttcctaggatcttattttaatatgtagattttattatgtattttgtttacatgtttggtgtgatgttaattttctctatatattgtgcttgtgtgtattgtggcgagtacaagagccagtggctgaggatcctggtgcccggcagatagaagttgctgagcaggagctcattgaaggcagttgtgcccttaatcacttcctttttacccagtcatattcttatcaatcataatgatctgcataggttaatttgatgggatccaatatgttaccctagttttggctatatttataccttgttttaccactgaatttttgggtagtatatgctattgctttatgtggttttgggtatagagatatacattacacatgttcacacttttgttattagtttattatttactgttcatgataagatcattatgttaatgggaacatggagaaccacccgggagaacagtgccaccacaagggtggtatgggacgcccttggctgactaattaggaaagctagtggaggactaccttacccgaaaggggcaagggcagtaggggagttgcatgcagggaggttatcgggttgattttgctgctatggcgctcagacgagggattcttgcaagtgctcttcccataaactgtagcgggttttcagaagctagtggaactttgtaaagggctcgtagtggatccctaaccgttcacctcggtagtgtctaagggccttgcaaaccctgatgacatgggatacacgacttgtgggtacagggtacaacctctacagagtgtaaaactggtatactaaccgtgctcacggtcatgagcgactcggacactcacatgattaatttatggaattaaattcaatttgtca

SEQ ID NO: 83202 - DNA, 3733 bp, Zea Mays
gagatagatgttcctggatggagaattcctcacgtcacctgcaactccaactgttgctcggcttcaccacgttcaactcccaggaaaacccccagccatcacctgccccagcgttcgctctccatgtttcctagccccagcggccagcctgtccttgctcgtttccaagctgtgctctagcaagcttctctgtagttcttccccaactgctcgctctcagcctcgtcgtatccctcgacttcatcacagcatcaccggtgctctcgtcgtcgttgagctcttggcgcgacgtgacgtcatcgtcgttttctcgccagtcatgctcgacccacagctccttcgcgtcatcgtcttcgacaacccacaacctctgctctaacctcatcgcactcgcggaatcgtcgtgaagccgctagccgtctgcctcgtcctcacacccgacaagctgtcgtgctcggtgtgttttctccgtgcggccttacgtgttcctctcgcttcatcggcttgtcgcgtgttagagcagagctccatgaagaagtggacatcaaagagaaattgctccagtacttgaatacccattggtgtggttccatctaactggttatctagtagaaggattttggatcttctctgcaacaaaggaaaggttttgatgtctttggcttcattagttgcttcatgtggaggtcttcaagcttagtttgcttatgtgtatttcttatggaaaggcttcacctttccaagtattgtaattaagttatgcacttcaaagactaacagaacttgcaaatattataactctttctagcatataaaacttgagttttggaaatgtaaataatgttttgtaagtcttccgctctatctccgaagtgtgtgtatatcaaatgtgaatactgtaatatacatgttttgtgggaaatccttgggccgataacacgggaggtgtaatacccaatttgtaagataatactagatgagacattagttcctatatgtgtaccatctctatttactatcacatgtgaatacctcatttaaaaacaaaggattaataaaagtcatgccactaaattgtgcatcatgctgaggttttattttgtgtgcatcttgtgacaacataaaaataatgtaaaaagaaatatattaaagtccaaagtggaatttaagatataaaagaattctagaatttagaagtggagaaagaaaagaaataccacataaaacataggaaataattatatacataaatatattcttttcatcaccaaatttgatttagtacatttgacttatgtgcaaatctacaactaaaattcaaatttaaatttgaaatcaaaaaggagaaaggaagaataaaaagaaaaagaaaacataaaataaaaagaaaaaccctcactaggcccaattccttgcctccagcccatctagcttccttcgcgcagcccatcatcgcgctcccacgaccacgtgctccaccgacaagggggccccacccgtcagccactctgcgcgccatcacatactcactgactttctgggccgcctcgtgagccgctcacctcaagtaacgcacctgcaccgaccagtgggtcctcccggtcagcctagtgtgccatgttcgcgtcgtccgtgcctgtgcgaatggaaccggctgtcaggcgccaccttcccctagctacccacctcgccgggatcggcggcggcgtgcgcagaaatcgcgcggggccattgtggtcaactcggttgcaggcgccgtatccgccgccctacaaatagcacgcccgtgccctgttgacctacctcgccccttcgacaactagcgttgtgccagaccaccttgtcgatagccatcgcaggcgttaaccaccgtcgctcccgttaaacactcatcgtgtgctctgggactaccctacgggagtgtggatcgtgtaccgaggagaattcgggcgtgagttacagcggcgtgaagggaattgctcgccgaagtggaaggagcaccgccgctccgcctagactcgagaacaacccgtctgcacgccgattctcggtaattttcacctcctccgtgttcgccgttgacataccttcatgtagtatgggttacttagggtttgggctcaaccacgcgcacggggcgatgtctccggcgagcgcgtcgccgggtggagctctctccgccgtatctgggcggtgaggtagaagacggattgtgtgctgttcatcttcgttgcaacggccacgattagatctaggacaacgcttcggtttggagtagcagtagccagtgtatttaaatcatgtggacgagatttggtttgaggcttttaaatcaggagcgccagatttagatcgtgcggtcctcgttccataccgattcgatcttggataggtctaatctaagccataaacttctaatccaatggccgagtgcgctgcgtaccccttcgccctatcgtttttacataagaaacctcctaaaaatagaaaatgaacccgccgtccagagcaacagcgctctgagtctctagaatttttgtagtttagcccctgttgtctctagaatttgaggcgcagcccagggaatttgtaaatcaggaaaattgaattggaaatctatttttaatgtaaagtaaatggctagaattggtttaaatcatagaaagttcatatgaactccaaattgatccatttcagtttctaaaattttgtaatattattgtttatccattagtaccgctgttttgacatgaaagtcacattaaaatttatttcccaactaatcttataccaaacacataaaatctttggaaagtcataacttaaaatccataattccagaattaatgattcctgttcctaggatcttattttaatatgtagattttattatgtattttgtttacatgtttggtgtgatgttaattttctctatatattgtgcttgtgtgtattgtggcgagtacaagagccagtggctgaggatcctggtgcccggcagatagaagttgctgagcaggagctcattgaaggcagttgtgcccttaatcacttcctttttacccagtcatattcttatcaatcataatgatctgcataggttaatttgatgggatccaatatgttaccctagttttggctatatttataccttgttttaccactgaatttttgggtagtatatgctattgctttatgtggttttgggtatagagatatacattacacatgttcacacttttgttattagtttattatttactgttcatgataagatcattatgttaatgggaacatggagaaccacccgggagaacagtgccaccacaagggtggtatgggacgcccttggctgactaattaggaaagctagtggaggactaccttacccgaaaggggcaagggcagtaggggagttgcatgcagggaggttatcgggttgattttgctgctatggcgctcagacgagggattcttgcaagtgctcttcccataaactgtagcgggttttcagaagctagtggaactttgtaaagggctcgtagtggatccctaaccgttcacctcggtagtgtctaagggccttgcaaaccctgatgacatgggatacacgacttgtgggtacagggtacaacctctacagagtgtaaaactggtatactaaccgtgctcacggtcatgagcgactcggacactcacatgattaatttatggaattaaattcaatttgtca

SEQ ID NO: 83203 - DNA, 3865 bp, Zea Mays
ttttcttatcccaacagctacgagctaccatattctttttcttttctctcatacgaatagagatagatgttcctggatggagaattcctcacgtcacctgcaactccaactgttgctcggcttcaccacgttcaactcccaggaaaacccccagccatcacctgccccagcgttcgctctccatgtttcctagccccagcggccagcctgtccttgctcgtttccaagctgtgctctagcaagcttctctgtagttcttccccaactgctcgctctcagcctgtccggtcctgcgtacttcaacactgttctacagccgtctgagctccacctcgtcgtcgacctgttgtttcagcgtcgtatccctcgacttcatcacagcatcaccggtgctctcgtcgtcgttgagctcttggcgcgacgtgacgtcatcgtcgttttctcgccagtcatgctcgacccacagctccttcgcgtcatcgtcttcgacaacccacaacctctgctctaacctcatcgcactcgcggaatcgtcgtgaagccgctagccgtctgcctcgtcctcacacccgacaagctgtcgtgctcggtgtgttttctccgtgcggccttacgtgttcctctcgcttcatcggcttgtcgcgtgttagagcagagctccatgaagaagtggacatcaaagagaaattgctccagtacttgaatacccattggtgtggttccatctaactggttatctagtagaaggattttggatcttctctgcaacaaaggaaaggttttgatgtctttggcttcattagttgcttcatgtggaggtcttcaagcttagtttgcttatgtgtatttcttatggaaaggcttcacctttccaagtattgtaattaagttatgcacttcaaagactaacagaacttgcaaatattataactctttctagcatataaaacttgagttttggaaatgtaaataatgttttgtaagtcttccgctctatctccgaagtgtgtgtatatcaaatgtgaatactgtaatatacatgttttgtgggaaatccttgggccgataacacgggaggtgtaatacccaatttgtaagataatactagatgagacattagttcctatatgtgtaccatctctatttactatcacatgtgaatacctcatttaaaaacaaaggattaataaaagtcatgccactaaattgtgcatcatgctgaggttttattttgtgtgcatcttgtgacaacataaaaataatgtaaaaagaaatatattaaagtccaaagtggaatttaagatataaaagaattctagaatttagaagtggagaaagaaaagaaataccacataaaacataggaaataattatatacataaatatattcttttcatcaccaaatttgatttagtacatttgacttatgtgcaaatctacaactaaaattcaaatttaaatttgaaatcaaaaaggagaaaggaagaataaaaagaaaaagaaaacataaaataaaaagaaaaaccctcactaggcccaattccttgcctccagcccatctagcttccttcgcgcagcccatcatcgcgctcccacgaccacgtgctccaccgacaagggggccccacccgtcagccactctgcgcgccatcacatactcactgactttctgggccgcctcgtgagccgctcacctcaagtaacgcacctgcaccgaccagtgggtcctcccggtcagcctagtgtgccatgttcgcgtcgtccgtgcctgtgcgaatggaaccggctgtcaggcgccaccttcccctagctacccacctcgccgggatcggcggcggcgtgcgcagaaatcgcgcggggccattgtggtcaactcggttgcaggcgccgtatccgccgccctacaaatagcacgcccgtgccctgttgacctacctcgccccttcgacaactagcgttgtgccagaccaccttgtcgatagccatcgcaggcgttaaccaccgtcgctcccgttaaacactcatcgtgtgctctgggactaccctacgggagtgtggatcgtgtaccgaggagaattcgggcgtgagttacagcggcgtgaagggaattgctcgccgaagtggaaggagcaccgccgctccgcctagactcgagaacaacccgtctgcacgccgattctcggtaattttcacctcctccgtgttcgccgttgacataccttcatgtagtatgggttacttagggtttgggctcaaccacgcgcacggggcgatgtctccggcgagcgcgtcgccgggtggagctctctccgccgtatctgggcggtgaggtagaagacggattgtgtgctgttcatcttcgttgcaacggccacgattagatctaggacaacgcttcggtttggagtagcagtagccagtgtatttaaatcatgtggacgagatttggtttgaggcttttaaatcaggagcgccagatttagatcgtgcggtcctcgttccataccgattcgatcttggataggtctaatctaagccataaacttctaatccaatggccgagtgcgctgcgtaccccttcgccctatcgtttttacataagaaacctcctaaaaatagaaaatgaacccgccgtccagagcaacagcgctctgagtctctagaatttttgtagtttagcccctgttgtctctagaatttgaggcgcagcccagggaatttgtaaatcaggaaaattgaattggaaatctatttttaatgtaaagtaaatggctagaattggtttaaatcatagaaagttcatatgaactccaaattgatccatttcagtttctaaaattttgtaatattattgtttatccattagtaccgctgttttgacatgaaagtcacattaaaatttatttcccaactaatcttataccaaacacataaaatctttggaaagtcataacttaaaatccataattccagaattaatgattcctgttcctaggatcttattttaatatgtagattttattatgtattttgtttacatgtttggtgtgatgttaattttctctatatattgtgcttgtgtgtattgtggcgagtacaagagccagtggctgaggatcctggtgcccggcagatagaagttgctgagcaggagctcattgaaggcagttgtgcccttaatcacttcctttttacccagtcatattcttatcaatcataatgatctgcataggttaatttgatgggatccaatatgttaccctagttttggctatatttataccttgttttaccactgaatttttgggtagtatatgctattgctttatgtggttttgggtatagagatatacattacacatgttcacacttttgttattagtttattatttactgttcatgataagatcattatgttaatgggaacatggagaaccacccgggagaacagtgccaccacaagggtggtatgggacgcccttggctgactaattaggaaagctagtggaggactaccttacccgaaaggggcaagggcagtaggggagttgcatgcagggaggttatcgggttgattttgctgctatggcgctcagacgagggattcttgcaagtgctcttcccataaactgtagcgggttttcagaagctagtggaactttgtaaagggctcgtagtggatccctaaccgttcacctcggtagtgtctaagggccttgcaaaccctgatgacatgggatacacgacttgtgggtacagggtacaacctctacagagtgtaaaactggtatactaaccgtgctcacggtcatgagcgactcggacactcacatgattaatttatggaattaaattcaatttgtca

SEQ ID NO: 83204 - DNA, 4945 bp, Zea Mays
gttaaacacagatcatcatcacttgatacaagtaaagaagaataatgctcaagtagttggctgctgatttcatcaggttgaaaagtgttgggcagagctagaagcatcattactattacacatatctgacggcaagtagctgttactactttacattatcgtaaatgttctgtttgtggcaagcaaaaatcgaacaaaaaactgtaggtgcatacagaagaaaaaaatacagtacaagctaattgtcaaacaagaagccaacaacatcagcagaatttccaaggcccaataacaaggtgcatgaatttccaaacacgcaagaactgcattaagttcaatggctcgtaaagagatcgatggtacatcgtcctacaccacgtaggaacttttcacttgtacttgacctataacataagcttgcttgctcatcagaaccaccagtgcctaccacttcacttctgaaaatatgtgatggcctatccattgcatttcaaacatgttccttcaactgcacaacgatcacttctgtaaattgaagggcaactggctttagcacaaaagtagggcggccaaataattctccaaaataagtctcatgaagaacagctacaatatctgcaagtattctttgatgcaaggccagaccatgtaatcccaacgttttgtgtgtacatggaaatcagctgcaagtcctgaactagggcacatttgtatgcttttacaaaaatcgtagtagagcattgcttggtggcatggggtacagatggctttggttacaaaaaaactgaccctggacagatttattaacaagagaactgtccaagacgccttatcaaataggagatggactatcttcatctttaggaagttccctcagattttgaactgcagcccaatagggaggataagcatatctttagcattgcttcatatggcagatacaccgcaaaggctgcttataaggatcttttcttggggtcaagctcctttggacattacatgacagattggctaagagagatctgaatcacccaagcaaatgtcctttatgtaaccaggaagctgaaacaataaatcatttgtttgtgtggtgtgtatttgcaagactcttctggtacaagatgttgagaaagattggtatgcattctttagcaccacaaccaggtgccacatccttctttgagtggtgggaaaaagcctcggaggctgtgaatgggctcttcaagaaaggacttgactccctcatcatcctgggtgcctgcatgatttggaagcaccgcaaatagatgtgttttttgataactggacacctagcctggctttaatcctaaatatcacttatgtttgagtttcacactatttcacctaaatatcacttcctttaagctaataataaattctgattatagaattgcagtgtgcatcaacttatccatgagccgaaatgaacttgcaccgattgcacattgaaagctcataaagcccaaaaatgttcatcgttgtcctgtgcaataaccaatgtgattatcaaaatcttgttagaatgtgtgtgtgggccggcggcactgttgggctgccggctgccagcccattagggttagggttgagtctctatatatatgtacttcatctcctatcaatacatccacttccatattcctacatggtatcaaaagattagggtttcctcacttctttccccagccgccaccccacctctgccctaggcacggcttccgcgccgccgccccgggaggctcatccttccctcctagggcagctcctctccagccgccggctcccagccatcctaggccggcgagcctccctgcgcgagatgtcctggagctcggtccctgccacctcccctcgtgtgcagggcgctgacgcacacactcctgggggcggcctccctcccctacgccgccagggcacctcctccccggccttgaaccgccgtcggacctccctgcaccggccgcgcgctacccctccctcccctacgccggcgcgaacaacagaggaggttggggccggggctgtccgcctggatctgcgctgccgctggcggatccgcctgaaccacagtagccgccgaccgcctctcaccccacagcagccgccaggaccgacgagccatcgcgtggatccgacggcggcctagttgcggccttccctggcgggcgcggcctctcccggtggcgcggttccccatggcgcgccggagcagcccctctgctctcgcccctctcctctccagctcggcagcaatggccgccctcagcttttcctctctctgctcatctcccatggcgctcaggtcctgtccctggtcgtcatccctctcctcaggaagccgacacccccatcttcttctccctgtttcctctacagcagccgctgctcttcctctctctggttcctctccggccgtctggctccctgctcggcgggcacaagcccccggacgcacggcgctctacctccagccccatggcggccgcggtctccaaccggcttcccacttcagctacctctcctaggtcgccagccaagcttcggatccatggcactcggctcctgagccccatttcccgcgcgttgagatgggacagggtgcgagcagtccctctgctcgttccctgttccccatggctgcctcccttggtcggcgtcctcctcttcgttgcgtccctcgcatgtgccccctcctcttcgctgcgtcctccgtcggcaccctcgcacgtgttgcccctcctcatcgcgttggccacctcctaaactgaccgcgctgatgcccagcagcgcgtcacccttcgagcttctcccgtcaccggtgtcgtcaacaccccttgctaggtccggcgcaggcccctgcccggctggacctgccccgccgcccacccccttcatcgccttcgctggatctgtcgctgtcgcggctttcccagccggatccacattgctgcgacctttccggctcgatctgccgtcccttttgctggatcgcttcttcccggctggatccgtcgctgtcgtggccttcccggccggatctgccgtttccccttctattctgccgcaggcgcggctaccatgaccggtgcagacgcgtgcgctgctgtcggcttccctggcggggctccttgacgcccggacgatcgaagaagcaggaaggccgacctgctggtgctcttttgttgtgtcgccctcgccaatcgttgacgctcgaacgtcgactcctcccgaagaacaggcttttgctgcgtgtctcctgaccgcgaccacctcgacttcggctacctcggcatctaggggctatcgtcttcttggagcacacaccaatctctactccagccgcaacattcgcaccatcacgacgctgcgactgcgggggatttcaacccgtcggctcctaccttcggcctctactccagtctcatcgtgtgtggtacccccgttgcgactgtgaggggatgttagactgtgtgtgtggaccggcgccactgttgggctgccggcccattagggttagggttgagtctctatatatatgtactccatctcctatcaatacatccactttcatattcctacacttgtaaacaaacaaattagcactacatatcccatactgaatatttgtctgcaatggggagataacggaagcaacgatctagcacataagaatgtgtgccaatttctaattacatgtattaacttgcacaccgtaaagcatttttccccagttgtctaagattccatcatgcatggagtattctatttaagcataggtataaaacaattctaggcagcaattggcatttttaaagcaaataaacagtaaacagttaaaacacctaagtgttcaacacaaaacatgtaaagcaaaatgtagaacacagtcattgtggatgtggtcacttacaaagatctcaggatgtgaggaagaaaagattacgtttttacaggaattgaaagatatcaggatgttatgtaatgagccgtggctgacagctggagatttcaacatgatttatcaggcttcagacaaaaataatgataatctggacagggacatgatgggaaggttttggagatttttaaataaatttgatttgaaagaaatccctctcctgggccgtaaatatacttggtccaacgagaggagttcacctactttggtaaggctggatagggccttttgctgtttggaatgggagaatatatttcctgattcagtcctccaaagttcggcgtctaatgtatccgatcattgccctttgattcttggtttaaaactccaaactaaaggcaagaggagatttcattttgaaagcttttgggcaaaagtgccaggattccttgaggtcgttcaacggaactgggaagctcatgtacagtccacaagtgcagtagagcgcctttttctcaagttgcaacggctcagtaaagatttacagaagtgggggcaaagaaaggttggtaacattaaattacatattgagatggctaaggaaataatacatagactggagattgcaagagattccagggatctttcaaacagggaagaatggctaaaaaagaagcttaaactacatctgcttggtcttgcttctttggaacgtaccattgctagactgcattctagaatcctttatctcaaggaaggagatgcaaataccttcttttttcaccatcaagcccgtttcagaaagaaaaagaattttattgctaagctgcatacagaaacctctatggctatcacacaagaagaaaagcaggcagcagtgctgaaattttatgaaaaggccttgggaacagctgaaagtcgccccctaactttaaatcttagtgagattggtatgcagcagcatgatttggccagcgtggacaacccattcacagaagagggattatgggcagcagttaaagacttacc

SEQ ID NO: 83205 - DNA, 2214 bp, Zea Mays
cctagccgccacccgccaggcgttaacgctcgacgggaccccgtcgtcttaaactccgcaagcgctgccagcggccgcccccgccgcgtgcttccgccgtcctcggtgcctcggccgcctggtccccaccggtccttccccttcctcaatcggcggccggcggctcccgtagccttgccgcgcgcgttagatttttcctaccaaataccataccagtaccaagcccctagccacacagttttatagcccgatgtatattcatttttcagctattttgctacgcgtttgtcttgaatagttgaatcggtgttgattgaatgattttgtctttagaacggcagtcattcgcttgatttttcctacacacaagtgtacgcctttgttgaatcgatggcttttgttttggttagctcgcaccattagccccctgctctcttgaggttggatgcagggaaaaatgcgagaaggttaccggtgccagattcatggaccgggcaggggctctatacttctggggaagccagtaaatttcctcagggtcatatcttctgtccacattgcatcatcttgatgctgttgacctgttgtctttgttgtattattcacatattttcgttgattcgcatgtgttcttcatcaatttcattttattgagtaattaagctctgtcacatggttagaagcgacatgaggagactgaaacatctgaaagttttcatgtggataatacacatatatggtcttcaaagttctctgatcgcttcatgtccaaagcttttctttcatgtgaaagcttttgaattatgccatctgaatttggccttagtgatgcttgggtctgaactgtagccatctgaatatgaccttagtgatgcttgagtcttaactgtagtgtttaagtcgttgagaaacaacatgaggaggtcatacattctgaagtatctgatgttgatacatacattcatggtcttcaaagttctctgattgtttcctttacccactccttatccaaatgatactttgttacgttcattttttctctccttgaatcatagcttcaaatttctaagttatatgtcttgccaagtttttgagatgcaacgaagcaaaatgaggagttcatatgatctgaagtatctatgtttgttgatatatccatttgtggtcttcaaagttctctgattgctttgtccaccacttcaccccatgctgcattgtctttattcaaatcatatttctccatcttcatttttctgtgtgtattgctatagctttacagcatttcttagttatgcttgaacaaattttattggaatttaagatgtcaaaagaagcaaaatgaggaggctgtattatctgaagtatctcttgttgatacagtattcatggtcttcaaagttctttgtttcctttgaaatattattctattaaagcatagcagtttatactttccagcctggaatactattcaaataatttttgcacgagttctttatgaattaacatattggcatgattgcctaatgcatctcttcgtctaaagcaaaattgtggtgacacctaattgtgatggtctcgctgtcaaaatatgatcttgattcttaaaggttgtgtcctcagcctgagagggactgtaagagagtcgcggcatgggattgctggcagggcggtcacagcctcaacgagtgctcggcgtcaacggcaatgagcgagtagaggcacgctcgaataggaagctcaacacggagaaggagacaggtgctgctcagcgaggccttcggtgacggctgcgagacgtcgtggcgcgcgaagaacgatcgcggacagaaacaatggcgaggtggctgtgtgcacgttcgggcggagccagtgcgtccggctgaggggagaaaagggcgagctgccaccctacttatagggagaggagaggggaagaaatcctgctgaatcatcataaaatcacggcaaaatttgaagcttccaagttcttgccgttaatggcggagagaagaaaggaaaggaaatccgcgagcagggaaagggaaaccagagaggaagagaaggaaatcgagggtggcggcgtgctctccacgacgaagggaggacggcaacaagggaaggcgagcacgcgaccgagagtttgtcgctgcatgcggcggcggtgcacagtgctgcgagtgccgacatcgagtagcaacggtatgttgaataatt

SEQ ID NO: 83206 - DNA, 1701 bp, Zea Mays
ttcttaatgcacacctaatgagaagataaggccattatttgtttcgtgaatctttgctatgtgagcttaaaatgtatttttttaaaagctcctagatttggttggcgcactggtaacccagcatgattggtttacatggtaactttagcgctatcaagcattagcttttactaacataaaaatgcaaaataaatatagattgtatcaagaccttaaacatatttttcgtagttaggtaaggttatcttgtatttacactttcattatgaaggtgtaatatacgccccctcccccaatgtattttttttatgaaaggctgtattttaataacatgtatatgtggtttgtggaataatctctctaggtcatcatgcacatgttctgaatcacaaagcaatggtcttttttaaagccaaccttgtgttattgtattttgaattcagttcatcgtggtgttggcttttgtgttttagaggcacccctcctccgagatcggatcatgctgctgcttgccatgctgaccgctatcttttgatttttggtgggggatctcatgcgacatgtttcaacgacctacatgtccttgatttgcagacgatggagtggtcaagacccaaacaacaaggcctgacgccaagcccaagagctggccatgctggtgcaactgtcggggagaactggtacatagttgggggtggcaataataaaagtggtgtctctgatactcttgttcttaacatgtcaactctgacatggtcagtggttagcactgcggaaggacgagttccccttgccagtgagggcatgactctagtgcatagcaattacaatggatacgattatctcatctcatttggaggatacaatggacgatacagcaatgaggtttatacacttagcctcaaatcagattttaagtccaccacaaaagaagaaactgtctcagatctagggtcgtcgaaccagaggttgaaatggtgattggcgtggacagtgctgattcagacctgtagtacagtactgatgaagcaagtgaacagttcttagcagctctcaaagctgagaaagaggaactagaagcgacacttaacagggaacagctgcaaactgtacaacttaaagaatacattgctcaagcagaatccagaaatgtggaactcacaaaggaacttcaagccgtccgtggccaacttgctgctgagcagtcaagatgtttcaaacttgaggtcgatgttgcggaactacgacagaagcttcaaagtatggatgcattggaaaaggaggtcgagctgcttcgacgacacagagccgcgtcagagcaagcagcgctggacgcaaagcagcggcaaagttctgggggcatgtggagctggctcgttggtacccctcctgatgataaatctgaatcgtgatcgcgtcgtgagggcagcactttagttcatacaggccgtgattcatatattatacttgtaacatttatatacccgttgatattttttttacagttactgaattcgtgttcattttgaccacagaagataaggaaatcattagttttatgccttgttttggcgtattgcaatcactcaaatgtatcaggaagtttcaacattatttcttgaaaagctagatttcaacattgtcatcatgtattggtcctccttttgacgacatggttcaatatatgttattcgtttgaga

SEQ ID NO: 83207 - DNA, 1709 bp, Zea Mays
ttcttaatgcacacctaatgagaagataaggccattatttgtttcgtgaatctttgctatgtgagcttaaaatgtatttttttaaaagctcctagatttggttggcgcactggtaacccagcatgattggtttacatggtaactttagcgctatcaagcattagcttttactaacataaaaatgcaaaataaatatagattgtatcaagaccttaaacatatttttcgtagttaggtaaggttatcttgtatttacactttcattatgaaggtgtaatatacgccccctcccccaatgtattttttttatgaaaggctgtattttaataacatgtatatgtggtttgtggaataatctctctaggtcatcatgcacatgttctgaatcacaaagcaatggtcttttttaaagccaaccttgtgttattgtattttgaattcagttcatcgtggtgttggcttttgtgttttagaggcacccctcctccgagatcggatcatgctgctgcttgccatgctgaccgctatcttttgatttttggtgggggatctcatgcgacatgtttcaacgacctacatgtccttgatttgcagacgatggagtggtcaagacccaaacaacaaggcctgacgccaagcccaagagctggccatgctggtgcaactgtcggggagaactggtacatagttgggggtggcaataataaaagtggtgtctctgatactcttgttcttaacatgtcaactctgacatggtcagtggttagcactgcggaaggacgagttccccttgccagtgagggcatgactctagtgcatagcaattacaatggatacgattatctcatctcatttggaggatacaatggacgatacagcaatgaggtttatacacttagcctcaaatcagattttaagtccaccacaaaagaagaaactgtctcagatctagggtcgtcgaaccagaggttgaaatggtgattggcgtggacagtgctgattcagacctgaagaacagtagtacagtactgatgaagcaagtgaacagttcttagcagctctcaaagctgagaaagaggaactagaagcgacacttaacagggaacagctgcaaactgtacaacttaaagaatacattgctcaagcagaatccagaaatgtggaactcacaaaggaacttcaagccgtccgtggccaacttgctgctgagcagtcaagatgtttcaaacttgaggtcgatgttgcggaactacgacagaagcttcaaagtatggatgcattggaaaaggaggtcgagctgcttcgacgacacagagccgcgtcagagcaagcagcgctggacgcaaagcagcggcaaagttctgggggcatgtggagctggctcgttggtacccctcctgatgataaatctgaatcgtgatcgcgtcgtgagggcagcactttagttcatacaggccgtgattcatatattatacttgtaacatttatatacccgttgatattttttttacagttactgaattcgtgttcattttgaccacagaagataaggaaatcattagttttatgccttgttttggcgtattgcaatcactcaaatgtatcaggaagtttcaacattatttcttgaaaagctagatttcaacattgtcatcatgtattggtcctccttttgacgacatggttcaatatatgttattcgtttgaga

SEQ ID NO: 83208 - DNA, 2463 bp, Zea Mays
caatcctgaaaaaaacttgaatcagcacgcggactatccgcgccactgaccgtgcgcgaggaccttgtgtgttcaacagttaacaccctgcactctgcaaatttccatttccacgcgacgacgacgaagaggaggtgggattcggaggagtaaatcctaacagccgtctcgcgccggtggtccggtgcccgcgcgagatcggggggggggggggggggggggggggggcgacatctagggcgcggtgccggccatggcgagctctggactcgcctaccccgaccgcttctacgccgccgcagcctacgcggggttcggcgctggtggggccacctcctcctctacggcctgcacagcaggtgatgcgtcagccgatgcttttgctaattttggcgatcaagccacagttggtccgtgcaatgtgcccaagccaagggcgtggaaccccgtggagcagagcaaatgggccagttggcacggacttggaagcatgccatcggctgaggcgatgcgtctttttgtcaaaatcttggaggaggaagatcctggatggtactcaagggttcctgagttcaactctgagcccattgtagatattcaaatgcataaaccaaaagaagagccacagattgtaccggcttcaacgaatggaacatcaatttcagaaccaaaaatcatttctgaaaatggaagttctgtggaaacacaggacatagatgttattttggaaggccttagtactgttagttctcttgacgaatggacaccattagctatcagtggccatcgtccgaagcctcgttatgaggataagatgtatatatttggcggaaaccataacgggtgttaccttagtgacctccaggctttggatctgaagaatttgacttggtcaaagattgatgccaaattggaagcagaatcttctgattcagcaaaaacctcacaaattgctccttgtgctggccattcattgtttttctccattgctgggcataccaaagatccatctgaaggtgttacagttaaggaatttgatccgcatacttgtacctggtctattgtcaggacttatggaaaatcaccggtttctcgcggaggtcagacagtgactcttgttggaacaacactagttttgttcggtggtgaagatgcaaaacggtgcctcttgaatgacttgcacattcttgatcttgaaaccatgacatgggatgatgtggatgcaataggcacccctcctccgagatcggatcatgctgctgcttgccatgctgaccgctatcttttgatttttggtgggggatctcatgcgacatgtttcaacgacctacatgtccttgatttgcagacgatggagtggtcaagacccaaacaacaaggcctgacgccaagcccaagagctggccatgctggtgcaactgtcggggagaactggtacatagttgggggtggcaataataaaagtggtgtctctgatactcttgttcttaacatgtcaactctgacatggtcagtggttagcactgcggaaggacgagttccccttgccagtgagggcatgactctagtgcatagcaattacaatggatacgattatctcatctcatttggaggatacaatggacgatacagcaatgaggtttatacacttagcctcaaatcagattttaagtccaccacaaaagaagaaactgtctcagatctagggtcgtcgaaccagaggttgaaatggtgattggcgtggacagtgctgattcagacctgaagaacagtagtacagtactgatgaagcaagtgaacagttcttagcagctctcaaagctgagaaagaggaactagaagcgacacttaacagggaacagctgcaaactgtacaacttaaagaatacattgctcaagcagaatccagaaatgtggaactcacaaaggaacttcaagccgtccgtggccaacttgctgctgagcagtcaagatgtttcaaacttgaggtcgatgttgcggaactacgacagaagcttcaaagtatggatgcattggaaaaggaggtcgagctgcttcgacgacacagagccgcgtcagagcaagcagcgctggacgcaaagcagcggcaaagttctgggggcatgtggagctggctcgttggtacccctcctgatgataaatctgaatcgtgatcgcgtcgtgagggcagcactttagttcatacaggccgtgattcatatattatacttgtaacatttatatacccgttgatattttttttacagttactgaattcgtgttcattttgaccacagaagataaggaaatcattagttttatgccttgttttggcgtattgcaatcactcaaatgtatcaggaagtttcaacattatttcttgaaaagctagatttcaacattgtcatcatgtattggtcctccttttgacgacatggttcaatatatgttattcgtttgaga

SEQ ID NO: 83209 - DNA, 2443 bp, Zea Mays
caatcctgaaaaaaacttgaatcagcacgcggactatccgcgccactgaccgtgcgcgaggaccttgtgtgttcaacagttaacaccctgcactctgcaaatttccatttccacgcgacgacgacgaagaggaggtgggattcggaggagtaaatcctaacagccgtctcgcgccggtggtccggtgcccgcgcgagatcggggggggggggggggggggggggggggcgacatctagggcgcggtgccggccatggcgagctctggactcgcctaccccgaccgcttctacgccgccgcagcctacgcggggttcggcgctggtggggccacctcctcctctacggcctgcacagcaggccacagttggtccgtgcaatgtgcccaagccaagggcgtggaaccccgtggagcagagcaaatgggccagttggcacggacttggaagcatgccatcggctgaggcgatgcgtctttttgtcaaaatcttggaggaggaagatcctggatggtactcaagggttcctgagttcaactctgagcccattgtagatattcaaatgcataaaccaaaagaagagccacagattgtaccggcttcaacgaatggaacatcaatttcagaaccaaaaatcatttctgaaaatggaagttctgtggaaacacaggacatagatgttattttggaaggccttagtactgttagttctcttgacgaatggacaccattagctatcagtggccatcgtccgaagcctcgttatgagcatggagcaactgtgttgcaggataagatgtatatatttggcggaaaccataacgggtgttaccttagtgacctccaggctttggatctgaagaatttgacttggtcaaagattgatgccaaattggaagcagaatcttctgattcagcaaaaacctcacaaattgctccttgtgctggccattcattgtttttctccattgctgggcataccaaagatccatctgaaggtgttacagttaaggaatttgatccgcatacttgtacctggtctattgtcaggacttatggaaaatcaccggtttctcgcggaggtcagacagtgactcttgttggaacaacactagttttgttcggtggtgaagatgcaaaacggtgcctcttgaatgacttgcacattcttgatcttgaaaccatgacatgggatgatgtggatgcaataggcacccctcctccgagatcggatcatgctgctgcttgccatgctgaccgctatcttttgatttttggtgggggatctcatgcgacatgtttcaacgacctacatgtccttgatttgcagacgatggagtggtcaagacccaaacaacaaggcctgacgccaagcccaagagctggccatgctggtgcaactgtcggggagaactggtacatagttgggggtggcaataataaaagtggtgtctctgatactcttgttcttaacatgtcaactctgacatggtcagtggttagcactgcggaaggacgagttccccttgccagtgagggcatgactctagtgcatagcaattacaatggatacgattatctcatctcatttggaggatacaatggacgatacagcaatgaggtttatacacttagcctcaaatcagattttaagtccaccacaaaagaagaaactgtctcagatctagggtcgtcgaaccagaggttgaaatggtgattggcgtggacagtgctgattcagacctgaagaacagtagtacagtactgatgaagcaagtgaacagttcttagcagctctcaaagctgagaaagaggaactagaagcgacacttaacagggaacagctgcaaactgtacaacttaaagaatacattgctcaagcagaatccagaaatgtggaactcacaaaggaacttcaagccgtccgtggccaacttgctgctgagcagtcaagatgtttcaaacttgaggtcgatgttgcggaactacgacagaagcttcaaagtatggatgcattggaaaaggaggtcgagctgcttcgacgacacagagccgcgtcagagcaagcagcgctggacgcaaagcagcggcaaagttctgggggcatgtggagctggctcgttggtacccctcctgatgataaatctgaatcgtgatcgcgtcgtgagggcagcactttagttcatacaggccgtgattcatatattatacttgtaacatttatatacccgttgatattttttttacagttactgaattcgtgttcattttgaccacagaagataaggaaatcattagttttatgccttgttttggcgtattgcaatcactcaaatgtatcaggaagtttcaacattatttcttgaaaagctagatttcaacattgtcatcatgtattggtcctccttttgacgacatggttcaatatatgttattcgtttgaga

SEQ ID NO: 83210 - DNA, 2368 bp, Zea Mays
caatcctgaaaaaaacttgaatcagcacgcggactatccgcgccactgaccgtgcgcgaggaccttgtgtgttcaacagttaacaccctgcactctgcaaatttccatttccacgcgacgacgacgaagaggaggtgggattcggaggagtaaatcctaacagccgtctcgcgccggtggtccggtgcccgcgcgagatcggggggggggggggggggggggggggggcgacatctagggcgcggtgccggccatggcgagctctggactcgcctaccccgaccgcttctacgccgccgcagcctacgcggggttcggcgctggtggggccacctcctcctctacggcctgcacagcaggccacagttggtccgtgcaatgtgcccaagccaagggcgtggaaccccgtggagcagagcaaatgggccagttggcacggacttggaagcatgccatcggctgaggcgatgcgtctttttgtcaaaatcttggaggaggaagatcctggatggtactcaagggttcctgagttcaactctgagcccattgtagatattcaaatgcataaaccaaaagaagagccacagattgtaccggcttcaacgaatggaacatcaatttcagaaccaaaaatcatttctgaaaatggaagttctgtggaaacacaggacatagatgttattttggaaggccttagtactgttagttctcttgacgaatggacaccattagctatcagtggccatcgtccgaagcctcgttatgagcatggagcaactgtgttgcaggataagatgtatatatttggcggaaaccataacgggtgttaccttagtgacctccaggctttggatctgaagaatttgacttggtcaaagattgatgccaaattggaagcagaatcttctgattcagcaaaaacctcacaaattgctccttgtgctggccattcattgtttttctccattgctgggcataccaaagatccatctgaaggtgttacagttaaggaatttgatccgcatacttgtacctggtctattgtcaggacttatggaaaatcaccggtttctcgcggaggtcagacagtgactcttgttggaacaacactagttttgttcggtggtgaagatgcaaaacggtgcctcttgaatgacttgcacattcttgatcttgaaaccatgacatgggatgatgtggatgcaatatctcatgcgacatgtttcaacgacctacatgtccttgatttgcagacgatggagtggtcaagacccaaacaacaaggcctgacgccaagcccaagagctggccatgctggtgcaactgtcggggagaactggtacatagttgggggtggcaataataaaagtggtgtctctgatactcttgttcttaacatgtcaactctgacatggtcagtggttagcactgcggaaggacgagttccccttgccagtgagggcatgactctagtgcatagcaattacaatggatacgattatctcatctcatttggaggatacaatggacgatacagcaatgaggtttatacacttagcctcaaatcagattttaagtccaccacaaaagaagaaactgtctcagatctagggtcgtcgaaccagaggttgaaatggtgattggcgtggacagtgctgattcagacctgaagaacagtagtacagtactgatgaagcaagtgaacagttcttagcagctctcaaagctgagaaagaggaactagaagcgacacttaacagggaacagctgcaaactgtacaacttaaagaatacattgctcaagcagaatccagaaatgtggaactcacaaaggaacttcaagccgtccgtggccaacttgctgctgagcagtcaagatgtttcaaacttgaggtcgatgttgcggaactacgacagaagcttcaaagtatggatgcattggaaaaggaggtcgagctgcttcgacgacacagagccgcgtcagagcaagcagcgctggacgcaaagcagcggcaaagttctgggggcatgtggagctggctcgttggtacccctcctgatgataaatctgaatcgtgatcgcgtcgtgagggcagcactttagttcatacaggccgtgattcatatattatacttgtaacatttatatacccgttgatattttttttacagttactgaattcgtgttcattttgaccacagaagataaggaaatcattagttttatgccttgttttggcgtattgcaatcactcaaatgtatcaggaagtttcaacattatttcttgaaaagctagatttcaacattgtcatcatgtattggtcctccttttgacgacatggttcaatatatgttattcgtttgaga

SEQ ID NO: 83211 - DNA, 2332 bp, Zea Mays
caatcctgaaaaaaacttgaatcagcacgcggactatccgcgccactgaccgtgcgcgaggaccttgtgtgttcaacagttaacaccctgcactctgcaaatttccatttccacgcgacgacgacgaagaggaggtgggattcggaggagtaaatcctaacagccgtctcgcgccggtggtccggtgcccgcgcgagatcggggggggggggggggggggggggggggcgacatctagggcgcggtgccggccatggcgagctctggactcgcctaccccgaccgcttctacgccgccgcagcctacgcggggttcggcgctggtggggccacctcctcctctacggcctgcacagcaggccacagttggtccgtgcaatgtgcccaagccaagggcgtggaaccccgtggagcagagcaaatgggccagttggcacggacttggaagcatgccatcggctgaggcgatgcgtctttttgtcaaaatcttggaggaggaagatcctggatggtactcaagggttcctgagttcaactctgagcccattgtagatattcaaatgcataaaccaaaagaagagccacagattgtaccggcttcaacgaatggaacatcaatttcagaaccaaaaatcatttctgaaaatggaagttctgtggaaacacaggacatagatgttattttggaaggccttagtactgttagttctcttgacgaatggacaccattagctatcagtggccatcgtccgaagcctcgttatgagcatggagcaactgtgttgcaggataagatgtatatatttggcggaaaccataacgggtgttaccttagtgacctccagtttttctccattgctgggcataccaaagatccatctgaaggtgttacagttaaggaatttgatccgcatacttgtacctggtctattgtcaggacttatggaaaatcaccggtttctcgcggaggtcagacagtgactcttgttggaacaacactagttttgttcggtggtgaagatgcaaaacggtgcctcttgaatgacttgcacattcttgatcttgaaaccatgacatgggatgatgtggatgcaataggcacccctcctccgagatcggatcatgctgctgcttgccatgctgaccgctatcttttgatttttggtgggggatctcatgcgacatgtttcaacgacctacatgtccttgatttgcagacgatggagtggtcaagacccaaacaacaaggcctgacgccaagcccaagagctggccatgctggtgcaactgtcggggagaactggtacatagttgggggtggcaataataaaagtggtgtctctgatactcttgttcttaacatgtcaactctgacatggtcagtggttagcactgcggaaggacgagttccccttgccagtgagggcatgactctagtgcatagcaattacaatggatacgattatctcatctcatttggaggatacaatggacgatacagcaatgaggtttatacacttagcctcaaatcagattttaagtccaccacaaaagaagaaactgtctcagatctagggtcgtcgaaccagaggttgaaatggtgattggcgtggacagtgctgattcagacctgaagaacagtagtacagtactgatgaagcaagtgaacagttcttagcagctctcaaagctgagaaagaggaactagaagcgacacttaacagggaacagctgcaaactgtacaacttaaagaatacattgctcaagcagaatccagaaatgtggaactcacaaaggaacttcaagccgtccgtggccaacttgctgctgagcagtcaagatgtttcaaacttgaggtcgatgttgcggaactacgacagaagcttcaaagtatggatgcattggaaaaggaggtcgagctgcttcgacgacacagagccgcgtcagagcaagcagcgctggacgcaaagcagcggcaaagttctgggggcatgtggagctggctcgttggtacccctcctgatgataaatctgaatcgtgatcgcgtcgtgagggcagcactttagttcatacaggccgtgattcatatattatacttgtaacatttatatacccgttgatattttttttacagttactgaattcgtgttcattttgaccacagaagataaggaaatcattagttttatgccttgttttggcgtattgcaatcactcaaatgtatcaggaagtttcaacattatttcttgaaaagctagatttcaacattgtcatcatgtattggtcctccttttgacgacatggttcaatatatgttattcgtttgaga

SEQ ID NO: 83212 - DNA, 2228 bp, Zea Mays
ctcacctaaccaatcctgaaaaaaacttgaatcagcacgcggactatccgcgccactgaccgtgcgcgaggaccttgtgtgttcaacagttaacaccctgcactctgcaaatttccatttccacgcgacgacgacgaagaggaggccacagttggtccgtgcaatgtgcccaagccaagggcgtggaaccccgtggagcagagcaaatgggccagttggcacggacttggaagcatgccatcggctgaggcgatgcgtctttttgtcaaaatcttggaggaggaagatcctggatggtactcaagggttcctgagttcaactctgagcccattgtagatattcaaatgcataaaccaaaagaagagccacagattgtaccggcttcaacgaatggaacatcaatttcagaaccaaaaatcatttctgaaaatggaagttctgtggaaacacaggacatagatgttattttggaaggccttagtactgttagttctcttgacgaatggacaccattagctatcagtggccatcgtccgaagcctcgttatgagcatggagcaactgtgttgcaggataagatgtatatatttggcggaaaccataacgggtgttaccttagtgacctccaggctttggatctgaagaatttgacttggtcaaagattgatgccaaattggaagcagaatcttctgattcagcaaaaacctcacaaattgctccttgtgctggccattcattgtttttctccattgctgggcataccaaagatccatctgaaggtgttacagttaaggaatttgatccgcatacttgtacctggtctattgtcaggacttatggaaaatcaccggtttctcgcggaggtcagacagtgactcttgttggaacaacactagttttgttcggtggtgaagatgcaaaacggtgcctcttgaatgacttgcacattcttgatcttgaaaccatgacatgggatgatgtggatgcaataggcacccctcctccgagatcggatcatgctgctgcttgccatgctgaccgctatcttttgatttttggtgggggatctcatgcgacatgtttcaacgacctacatgtccttgatttgcagacgatggagtggtcaagacccaaacaacaaggcctgacgccaagcccaagagctggccatgctggtgcaactgtcggggagaactggtacatagttgggggtggcaataataaaagtggtgtctctgatactcttgttcttaacatgtcaactctgacatggtcagtggttagcactgcggaaggacgagttccccttgccagtgagggcatgactctagtgcatagcaattacaatggatacgattatctcatctcatttggaggatacaatggacgatacagcaatgaggtttatacacttagcctcaaatcagattttaagtccaccacaaaagaagaaactgtctcagatctagggtcgtcgaaccagaggttgaaatggtgattggcgtggacagtgctgattcagacctgaagaacagtagtacagtactgatgaagcaagtgaacagttcttagcagctctcaaagctgagaaagaggaactagaagcgacacttaacagggaacagctgcaaactgtacaacttaaagaatacattgctcaagcagaatccagaaatgtggaactcacaaaggaacttcaagccgtccgtggccaacttgctgctgagcagtcaagatgtttcaaacttgaggtcgatgttgcggaactacgacagaagcttcaaagtatggatgcattggaaaaggaggtcgagctgcttcgacgacacagagccgcgtcagagcaagcagcgctggacgcaaagcagcggcaaagttctgggggcatgtggagctggctcgttggtacccctcctgatgataaatctgaatcgtgatcgcgtcgtgagggcagcactttagttcatacaggccgtgattcatatattatacttgtaacatttatatacccgttgatattttttttacagttactgaattcgtgttcattttgaccacagaagataaggaaatcattagttttatgccttgttttggcgtattgcaatcactcaaatgtatcaggaagtttcaacattatttcttgaaaagctagatttcaacattgtcatcatgtattggtcctccttttgacgacatggttcaatatatgttattcgtttgaga

SEQ ID NO: 83213 - DNA, 1393 bp, Zea Mays
gcgtgttccttctgccatgtgcgctactgtgctcttaagtccgaccgagcagccactgagctgaggaaaagcagcagctgcactcgcggactggtcgtgttggttgccacaatctcgatatctctcgccgccttttctttcctgaaaactgtagagaaataggaacggtacacacactatcgatccacgctaggagcgcgtagcgcaaagcaatgatctgcgcgcggcacactggaaacctggatcactatacacaaaaggatttggcgatgccggcggccaaggaacccgcccaggaccgctctcttccgcctcggcgcctcttctccgccattgcctcctcgggccgtcattgtcgccggcgtgaccttccaccacgtcccagtgatacacatctgcgaaaagatgaggttgctgcgcatctgcaaaaagatgagtgtgccactaggtgatgctttactgcctgatgctgcatctcacatctttgatgggtctggcctgattcataatccagcaccccagcacctagccgtatatactgtcacatacaaatttcgagctgggttgctaaatttctttgatgcaactgtgtccatagcctcccaaagagcatctccaggtcaggaactgtgcatgtcaaaatttgatctgtcagctgttgagctcaggggcaatagtgcttctaaacacagatgcatccatttcagagtatacaacacataccatttgctactgttttgcagtgtaagctagcttatcttctcttgcaatgttacttttgatgactgaatattgcttttgactgacatgtgagatcattgttttgacgacggaatgttgcaatgtcggcatgaagcacgaatgcttagcgaatatttgaaaagggacctgctgggtgattcagcctattatacttttgtgtcgttactactatttgttataccgttgtagttctaaataagccgaatgcaaccacaagaattctcaatgtcaactcgaccaataatacccgttaatatcgcacatggaccacgacctcggtccaagcatggctcgatacattaggtcaggctggctcaacactaaataatttcgggtcgtgtcatacctaggctgtgttttttgtgcttcggccaacccactaggcctagtccgaatgtacaactataaatgagatgacttagagacatgtaggaatcggggagagtatgtctatcagatgtattgcttgatcaacatcacattttactgttttatttatgtgagtttttctgtaaggttttcttatgtaaagtttttaataacgtaatgtcaggcatatgctatgttatatcatctattttcttactggatttttagaggatgaatttagcatgatggattcatggatatg

SEQ ID NO: 83214 - DNA, 1190 bp, Zea Mays
atgtccattgaacaaaagaatgagaaaaataggaagcgccgtgaagcacgtcaacgaaataaagcactacccctaaagtccgagtcatctagagaagacattaatacgaatcagacacgtgagacggttaacgttgaaataagtcgagatgtgcatcttggttcaggtcctattaaaaacactccatcgcctggtaattctatcgaacgaaagaggcaaagggatagagaaaggcgtgcaacaatgtcggttgaacaaaggaatgagtacaataacaagcgtcgtcaaatgcgtcaacgaaataagggacaaaatgtgatgcccaatgtttcaggagatggcgacaaaaaagtaaacgtggatccagatgatgatagcgactggctgcatcggaacgagacattccagtcaaacgactatgtcgcaacgacggaccttctgccaccagcttgtaccggaaggttatgtgtttgtgctgggagataacaacaacaatatcttcaagtaccaataatctgaaaagatggttccctactggttctgcatataggaagctgtgacataccatgtatttgtatctgaagaactgtttgacatatatttggttcctgattctacgatctgctgcaattgacatgcttttggttgattcagtttttcatattgagctgcacaagtgcagcacaagatatggccgcatatttacattacaaaggtgcagctttgctaacaggatctgcacgaaccagaaaccatcaggaataagcatcgctgtctgagaaatatggcccaggcttcagactgaatgtttggcatagcccgtgatacagcctacagcttcagcacgagaccaaggggactgtgatcactggcagaggtgtccggaataatatatgaatcatgcactttttctgcgattgattcggacacaagaaagtaatccaggcgccaaccttcaatccaatgaataaatcaaaacaagtgaaacggtgagagtgatcttgacttatgctggaataacaaatgggtataccaattttgatcagtgcttgtgcatgatggatgtaactcagaaaccttgctaaattacagaagtttccatgtattgtggcacaaattgctaaaatcgtaggtatgtttgtaaggggcacataatctcaaggatgtgtttgaaacagcattatgtctgt

SEQ ID NO: 83215 - DNA, 1143 bp, Zea Mays
tcagtaaagtatgggatgcacttactggggatgagctacattcatttgaacacaagcatatagttcgggcatgtgccttctctgaggatacacaccttttactcactggaggcatggaaaagattttgcgtgtgtatgatatgaatcgtcctgatgcagctccaagagagcttgacaaatcacctggttccgtccgaactgctgcttggcttcatagtgaccaaactatattgagttcctgcactgacatgggtggagtaaggctgtgggatgttagaactggaaaaattgtccaaactcttgaaaccaaggcttctgtcactagtgcagaagtaagccaggatggcaggttcatcactactgctgatggctcaagtgtaaaattctgggacgcgaatcactttggccttgttaaaagctatgatatgccatgcaatgtggaatcggcttcacttgaacctaagtctgggagtaaatttgtcgctggaggagaagatttatgggttcatgtatttgatttcttcactggtgaagaaatagcttgtaacaaaggacatcatggtccagtccactgtgtccggtttgcaccttgtggtgaatcatacgcatcgggttcagaagatggcaccattcggatctggcagcttagcccggctaatgctgatgacaatgaggtggccaatgcaaatggcaagacaactgctggggtaaacgaagttacaaccaagatcgaaggcttccacattcccaaggaggggcagaccgaggggtaggatctcatgtgttttgtggtgcttgtggttcttattgcgaggagattgccatcagagctgcagtggtcattcagtttccctctgcggagtcatcatgtctgcgatccaagggtatcctggcttcatgagtcatcatcagcactggggaaaaacaagcaagcaaatggtggtgggtttttggatggggccctcgctttgatagaacatagcaattgtagcgtcaaaaataaacaagagttgggtagtttaggtaccgtgtttgcgttcattaaagtgaagtattctgtatcaccacaggtaaccttgattgtggtgactatttttttttgaatgcaaatcgattgctctctccaatctgaataaataggac

SEQ ID NO: 83216 - DNA, 1197 bp, Zea Mays
aaggcgctaaagttcatcctgacactctgatcggccagcaacttgacacacaattagtaaagtatgggatgcacttactggggatgagctacattcatttgaacacaagcatatagttcgggcatgtgccttctctgaggatacacaccttttactcactggaggcatggaaaagattttgcgtgtgtatgatatgaatcgtcctgatgcagctccaagagagcttgacaaatcacctggttccgtccgaactgctgcttggcttcatagtgaccaaactatattgagttcctgcactgacatgggtggagtaaggctgtgggatgttagaactggaaaaattgtccaaactcttgaaaccaaggcttctgtcactagtgcagaagtaagccaggatggcaggttcatcactactgctgatggctcaagtgtaaaattctgggacgcgaatcactttggccttgttaaaagctatgatatgccatgcaatgtggaatcggcttcacttgaacctaagtctgggagtaaatttgtcgctggaggagaagatttatgggttcatgtatttgatttcttcactggtgaagaaatagcttgtaacaaaggacatcatggtccagtccactgtgtccggtttgcaccttgtggtgaatcatacgcatcgggttcagaagatggcaccattcggatctggcagcttagcccggctaatgctgatgacaatgaggtggccaatgcaaatggcaagacaactgctggggtaaacgaagttacaaccaagatcgaaggcttccacattcccaaggaggggcagaccgaggggtaggatctcatgtgttttgtggtgcttgtggttcttattgcgaggagattgccatcagagctgcagtggtcattcagtttccctctgcggagtcatcatgtctgcgatccaagggtatcctggcttcatgagtcatcatcagcactggggaaaaacaagcaagcaaatggtggtgggtttttggatggggccctcgctttgatagaacatagcaattgtagcgtcaaaaataaacaagagttgggtagtttaggtaccgtgtttgcgttcattaaagtgaagtattctgtatcaccacaggtaaccttgattgtggtgactatttttttttgaacagaaccaatcaattggataggggaatttcaagtttaagt

SEQ ID NO: 83217 - DNA, 1337 bp, Zea Mays
ctgacactctgatcggccagcaacttgacacacaattagtatgggatgcacttactggggatgagctacattcatttgaacacaagcatatagttcgggcatgtgccttctctgaggatacacaccttttactcactggaggcatggaaaagattttgcgtgtgtatgatatgaatcgtcctgatgcagctccaagagagcttgacaaatcacctggttccgtccgaactgctgcttggcttcatagtgaccaaactatattgagttcctgcactgacatgggtggagtaaggctgtgggatgttagaactggaaaaattgtccaaactcttgaaaccaaggcttctgtcactagtgcagaagtaagccaggatggcaggttcatcactactgctgatggctcaagtgtaaaattctgggacgcgaatcactttggccttgttaaaagctatgatatgccatgcaatgtggaatcggcttcacttgaacctaagtctgggagtaaatttgtcgctggaggagaagatttatgggttcatgtatttgatttcttcactggtgaagaaatagcttgtaacaaaggacatcatggtccagtccactgtgtccggtttgcaccttgtggtgaatcatacgcatcgggttcagaagatggcaccattcggatctggcagcttagcccggctaatgctgatgacaatgaggtggccaatgcaaatggcaagacaactgctggggtaaacgaagttacaaccaagatcgaaggcttccacattcccaaggaggggcagaccgaggggagattgccatcagagctgcagtggtcattcagtttccctctgcggagtcatcatgtctgcgatccaagggtatcctggcttcatgagtcatcatcagcactggggaaaaacaagcaagcaaatggtggtgggtttttggatggggccctcgctttgatagaacatagcaattgtagcgtcaaaaataaacaagagttgggtagtttaggtaccgtgtttgcgttcattaaagtgaagtattctgtatcaccacagtcccctaaaaaaatacttgaggccttcatcgttggaacaccgaccttcaaagctgtagaccacttcttgatcctgaggtatcccataaggagaacatctgggatatggcacatgtttcgttttgcagcgaacatccctgctttcgcaaaagggaatcgcgtcacatgccccgccatgtgagtcaaacttggctgaacggtgaatgcatctgatcggcctttctgcgatggtttcgggctgcggcgtccatgtgaaattactggccagaccagttgctgttca

SEQ ID NO: 83218 - DNA, 1460 bp, Zea Mays
ttttatctcaagcaagttgggatacaaatccaatgcttcgtaatggtgagactggcgactggattgggacttttcaaggtcataaaggagctgtttggagctgttgccttgacaggaatgctctgagggctgcatctgcttctgctgacttttcagctaaagtatgggatgcacttactggggatgagctacattcatttgaacacaagcatatagttcgggcatgtgccttctctgaggatacacaccttttactcactggaggcatggaaaagattttgcgtgtgtatgatatgaatcgtcctgatgcagctccaagagagcttgacaaatcacctggttccgtccgaactgctgcttggcttcatagtgaccaaactatattgagttcctgcactgacatgggtggagtaaggctgtgggatgttagaactggaaaaattgtccaaactcttgaaaccaaggcttctgtcactagtgcagaagtaagccaggatggcaggttcatcactactgctgatggctcaagtgtaaaattctgggacgcgaatcactttggccttgttaaaagctatgatatgccatgcaatgtggaatcggcttcacttgaacctaagtctgggagtaaatttgtcgctggaggagaagatttatgggttcatgtatttgatttcttcactggtgaagaaatagcttgtaacaaaggacatcatggtccagtccactgtgtccggtttgcaccttgtggtgaatcatacgcatcgggttcagaagatggcaccattcggatctggcagcttagcccggctaatgctgatgacaatgaggtggccaatgcaaatggcaagacaactgctggggtaaacgaagttacaaccaagatcgaaggcttccacattcccaaggaggggcagaccgaggggagattgccatcagagctgcagtggtcattcagtttccctctgcggagtcatcatgtctgcgatccaagggtatcctggcttcatgagtcatcatcagcactggggaaaaacaagcaagcaaatggtggtgggtttttggatggggccctcgctttgatagaacatagcaattgtagcgtcaaaaataaacaagagttgggtagtttaggtaccgtgtttgcgttcattaaagtgaagtattctgtatcaccacagtcccctaaaaaaatacttgaggccttcatcgttggaacaccgaccttcaaagctgtagaccacttcttgatcctgaggtatcccataaggagaacatctgggatatggcacatgtttcgttttgcagcgaacatccctgctttcgcaaaagggaatcgcgtcacatgccccgccatgtgagtcaaacttggctgaacggtgaatgcatctgatcggcctttctgcgatggtttcgggctgcggcgtccatgtgaaattactggccagaccagttgctgttca

SEQ ID NO: 83219 - DNA, 1900 bp, Zea Mays
cccgctacgacctacgatcatgaccaaaggaccgatcgagcgcgtgccgcttcgtctcggctcgtcccaagtcctaaccctatataagcacagggtctggcttcctgcccctgcccccctgccccacactttagcccaaggaggccggcctcgcctcgcctcgcctcgcttcatacgcccgcccgcccctgccgatccatccacccaataaagcgcctgtttcctctctttttcgatcggtgtgctagggtttgggcgcgcggaggcgtcgcattccagggtaatcattggttcgacgggctagggtgctttctcacccggggaacggaagcgaatccagacgatggagaagaagaaggtggcgataccgctggtgtgccacggccactcgcggccggtggtggacctcttctacagccccgtcacacccgatggctacttcctcatcagcgccagcaaggatacaaatccaatgcttcgtaatggtgagactggcgactggattgggacttttcaaggtcataaaggagctgtttggagctgttgccttgacaggaatgctctgagggctgcatctgcttctgctgacttttcagctaaagtatgggatgcacttactggggatgagctacattcatttgaacacaagcatatagttcgggcatgtgccttctctgaggatacacaccttttactcactggaggcatggaaaagattttgcgtgtgtatgatatgaatcgtcctgatgcagctccaagagagcttgacaaatcacctggttccgtccgaactgctgcttggcttcatagtgaccaaactatattgagttcctgcactgacatgggtggagtaaggctgtgggatgttagaactggaaaaattgtccaaactcttgaaaccaaggcttctgtcactagtgcagaagtaagccaggatggcaggttcatcactactgctgatggctcaagtgtaaaattctgggacgcgaatcactttggccttgttaaaagctatgatatgccatgcaatgtggaatcggcttcacttgaacctaagtctgggagtaaatttgtcgctggaggagaagatttatgggttcatgtatttgatttcttcactggtgaagaaatagcttgtaacaaaggacatcatggtccagtccactgtgtccggtttgcaccttgtggtgaatcatacgcatcgggttcagaagatggcaccattcggatctggcagcttagcccggctaatgctgatgacaatgaggtggccaatgcaaatggcaagacaactgctggggtaaacgaagttacaaccaagatcgaaggcttccacattcccaaggaggggcagaccgaggggagattgccatcagagctgcagtggtcattcagtttccctctgcggagtcatcatgtctgcgatccaagggtatcctggcttcatgagtcatcatcagcactggggaaaaacaagcaagcaaatggtggtgggtttttggatggggccctcgctttgatagaacatagcaattgtagcgtcaaaaataaacaagagttgggtagtttaggtaccgtgtttgcgttcattaaagtgaagtattctgtatcaccacagtcccctaaaaaaatacttgaggccttcatcgttggaacaccgaccttcaaagctgtagaccacttcttgatcctgaggtatcccataaggagaacatctgggatatggcacatgtttcgttttgcagcgaacatccctgctttcgcaaaagggaatcgcgtcacatgccccgccatgtgagtcaaacttggctgaacggtgaatgcatctgatcggcctttctgcgatggtttcgggctgcggcgtccatgtgaaattactggccagaccagttgctgttca

SEQ ID NO: 83220 - DNA, 1926 bp, Zea Mays
gttttctcttcgccttttcctcccctactttttcctgctactgttcacgctctacagtacggaggctcctacgtgcaggtagctcccaggaccagatccgaaccctaaccctagccaatttggtcggtgatggaagagcacgtgcctcgaggcggcggcggcgggaggcccccgatcccggcggcggcggcgaggaagccggcgctcgcgcggcactcctcttttatttttgatgggcatggtggaaagcatgcagctgattttgtgtgcagtaatttaccaaggtttattgtcgaggatgaggattttcctagggagatagtgaaagcaatgtcctctgcattcttgcaggctgatgcttcttttgcagatgcttgttctctgaactgctctctttcttctggtacaactgctcttgcagcacttgtggttgggaggtaatattcttattaatttctgcaactgtgatccatacaaaatcattgtatagaataggtgtcactggctcactgctatttgatgtttctcactacatatggacgatggggggcctttttttgtttttatccaatctgccaaaatcaattctgacacatggtaactactatatgaagtttatcatttacttatgcaggtgggagcctttcctatttgtggtttatataccatcatgtgcccttttgtcccacctgactaaatctgttctggcacctgcactcatgtgtattattgcaaacaagctgcatgtgccttcacttgtttcctacaaggatctgcatcccctgccctttggtgactgcatatattcaaattttcgtggtgcatgcatgtgttttttagcgctgttcgttgctcttctatggaatgtcctgaagatagctaaatttgttaatttttaatttgttagttctggcccctcaaatttgcacatgcttttcacttaaatcctcagatgctgtcatatttctgtgtctggatgctcaacagatcacttctggtcgcgaatgctggtgactgccgagcagtactttgtcgtcgtggaaaggcaattgagatgtccagggatcacaaaccatcttgcaacagggagaagatacgtattgaggcattgggtggatatgtcgatgatggctacctgaatgggcagcttaatgtcgctcgagcaattggggactggcatatggaaggcatgaaggcatgtggtggtcttggtcctcttactgccgagcctgaggtaatgacaatggatctaactgatgaggacgaattcctgatcatgggctgtgatgggatctgggatgtattcctcagccaaaatgcagtagattttgctcgccgtaagctccaagaacacaatgacccggctgcctgctgtaaagaactagttgatgaggccattaagaggaagagtggtgataacctttctgtggttgtcgtctgcttcaactctaggccgcctcctgttctaacaactcctaggcctcgtgtacagaggagcatatctgcagaaggcctgagagagctgcagagcttccttgatagtttggccgattgacatggggttctagcagccccactataagttttgaccttttccatagcttagcttggaaaataggtttagcatgtgctgtctcataacttcgctgagatggctgctgttgagtaatctagagttgtaaaatatgctgcggctaactgtgtcagcagttgagagcgtttatcagttgagagtatttatcagcatgttgactttgtgagtcctgaatgattagtcggcatttcttaggtctccataaatcggtggttcatcgttgtaaaaggctgttaatgcccttggatattttcctgtattgttcgctttggacaagttattaactgggaaaactgctgtttttgctgcgaagtggttgaattttcttgggt

SEQ ID NO: 83221 - DNA, 1497 bp, Zea Mays
gttttctcttcgccttttcctcccctactttttcctgctactgttcacgctctacagtacggaggctcctacgtgcaggtagctcccaggaccagatccgaaccctaaccctagccaatttggtcggtgatggaagagcacgtgcctcgaggcggcggcggcgggaggcccccgatcccggcggcggcggcgaggaagccggcgctcgcgcggcactcctcttttgtgaggagtcctgcaaacaatacaaagcctgcaactgagagagcttttgaaggcatggacactgaatttatccctattgtacgatctggtgggtgggctgatattggctccaggcacacaatggaggatgtctttatctgctttgataatttcatgcaagattttggaattgaaagttttgaagaaggacccagtgccttttatgggatttttgatgggcatggtggaaagcatgcagctgattttgtgtgcagtaatttaccaagatgcttgttctctgaactgctctctttcttctggtacaactgctcttgcagcacttgtggttgggagatcacttctggtcgcgaatgctggtgactgccgagcagtactttgtcgtcgtggaaaggcaattgagatgtccagggatcacaaaccatcttgcaacagggagaagatacgtattgaggcattgggtggatatgtcgatgatggctacctgaatgggcagcttaatgtcgctcgagcaattggggactggcatatggaaggcatgaaggcatgtggtggtcttggtcctcttactgccgagcctgaggtaatgacaatggatctaactgatgaggacgaattcctgatcatgggctgtgatgggatctgggatgtattcctcagccaaaatgcagtagattttgctcgccgtaagctccaagaacacaatgacccggctgcctgctgtaaagaactagttgatgaggccattaagaggaagagtggtgataacctttctgtggttgtcgtctgcttcaactctaggccgcctcctgttctaacaactcctaggcctcgtgtacagaggagcatatctgcagaaggcctgagagagctgcagagcttccttgatagtttggccgattgacatggggttctagcagccccactataagttttgaccttttccatagcttagcttggaaaataggtttagcatgtgctgtctcataacttcgctgagatggctgctgttgagtaatctagagttgtaaaatatgctgcggctaactgtgtcagcagttgagagcgtttatcagttgagagtatttatcagcatgttgactttgtgagtcctgaatgattagtcggcatttcttaggtctccataaatcggtggttcatcgttgtaaaaggctgttaatgcccttggatattttcctgtattgttcgctttggacaagttattaactgggaaaactgctgtttttgctgcgaagtggttgaattttcttgggt

SEQ ID NO: 83222 - DNA, 2208 bp, Zea Mays
ctcaaataaaaaatccaagagagtacagcctaacagcacccacgaatttacccaaacgcccctgtggtgccgctcgttttctcttcgccttttcctcccctactttttcctgctactgttcacgctctacagtacggaggctcctacgtgcaggtagctcccaggaccagatccgaaccctaaccctagccaatttggtcggtgatggaagagcacgtgcctcgaggcggcggcggcgggaggcccccgatcccggcggcggcggcgaggaagccggcgctcgcgcggcactcctcttttgtgaggagtcctgcaaacaatacaaagcctgcaactgagagagcttttgaaggcatggacactgaatttatccctattgtacgatctggtgggtgggctgatattggctccaggcacacaatggaggatgtctttatctgctttgataatttcatgcaagattttggaattgaaagttttgaagaaggacccagtgccttttatgggatttttgatgggcatggtggaaagcatgcagctgattttgtgtgcagtaatttaccaaggtttattgtcgaggatgaggattttcctagggagatagtgaaagcaatgtcctctgcattcttgcaggctgatgcttcttttgcagatgcttgttctctgaactgctctctttcttctggtacaactgctcttgcagcacttgtggttgggaggtaatattcttattaatttctgcaactgtgatccatacaaaatcattgtatagaataggtgtcactggctcactgctatttgatgtttctcactacatatggacgatggggggcctttttttgtttttatccaatctgccaaaatcaattctgacacatggtaactactatatgaagtttatcatttacttatgcaggtgggagcctttcctatttgtggtttatataccatcatgtgcccttttgtcccacctgactaaatctgttctggcacctgcactcatgtgtattattgcaaacaagctgcatgtgccttcacttgtttcctacaaggatctgcatcccctgccctttggtgactgcatatattcaaattttcgtggtgcatgcatgtgttttttagcgctgttcgttgctcttctatggaatgtcctgaagatagctaaatttgttaatttttaatttgttagttctggcccctcaaatttgcacatgcttttcacttaaatcctcagatgctgtcatatttctgtgtctggatgctcaacagatcacttctggtcgcgaatgctggtgactgccgagcagtactttgtcgtcgtggaaaggcaattgagatgtccagggatcacaaaccatcttgcaacagggagaagatacgtattgaggcattgggtggatatgtcgatgatggctacctgaatgggcagcttaatgtcgctcgagcaattggggactggcatatggaaggcatgaaggcatgtggtggtcttggtcctcttactgccgagcctgaggtaatgacaatggatctaactgatgaggacgaattcctgatcatgggctgtgatgggatctgggatgtattcctcagccaaaatgcagtagattttgctcgccgtaagctccaagaacacaatgacccggctgcctgctgtaaagaactagttgatgaggccattaagaggaagagtggtgataacctttctgtggttgtcgtctgcttcaactctaggccgcctcctgttctaacaactcctaggcctcgtgtacagaggagcatatctgcagaaggcctgagagagctgcagagcttccttgatagtttggccgattgacatggggttctagcagccccactataagttttgaccttttccatagcttagcttggaaaataggtttagcatgtgctgtctcataacttcgctgagatggctgctgttgagtaatctagagttgtaaaatatgctgcggctaactgtgtcagcagttgagagcgtttatcagttgagagtatttatcagcatgttgactttgtgagtcctgaatgattagtcggcatttcttaggtctccataaatcggtggttcatcgttgtaaaaggctgttaatgcccttggatattttcctgtattgttcgctttggacaagttattaactgggaaaactgctgtttttgctgcgaagtggttgaattttcttgggt

SEQ ID NO: 83223 - DNA, 1911 bp, Zea Mays
gctgtagctatttctgggcgcttcgctgttcggcctgctagcgtccgggccgtgacagctggggtgaatcgcgggagttcagggtccttgccccggctggatctcgagttcaggaaaccttgcgcccctcttccttctcgtttacgccgctagatttgggttgctgccgcttattttcttggattgagatcccggattcagacaggtgctaccattcgatttgatttggcgcggagcactttcctatggccgcctccatcgcggcctcgtccttctttccagggtcaccggcgccggccgctcctaagaacggccttggggagcgcccagagagcctggacgtccgcggcgttgcggcgaagccgggagcctcgtctagtgccgtgagggcgagcaagacgcgcgcccacgctgcggtccccaagatgaacggtgggggcaagtccgcggtggcggatggggagcacgaaaccgtaccttcttcggtgccgaagactttctacaaccagcttcccgactggagcatgctccttgcggccatcaccaccatcttcttggccgcagagaagcagtggacgatgcttgactggaagcctaggaggcctgacatgctcactgacacgtttgggtttggccggatcatacatgatgggctcatgttcaggcagaacttctccattaggtcctatgagattggggcagataggacggcatctatagagacgctgatgaaccatttgcaggaaacggcactcaatcatgtgaagaccgctgggctgctaggtgatggatttggctccacaccagagatgagtaaacgaaacttgttctgggtggttagccaaatgcaggccatcatcgagcgttatccatgctggggtgatactgttgaagtagatacatgggttagtgctaatggtaaaaatggaatgcgtagggattggcatatacgcgatcctataacaggcctcacgatactgaaggcaacaagtaaatgggttatgatgaacaaactcactaggaagcttgcaagaattccagatgaagtgcggactgaaatagagccatacttttttgagcattctgctattgttgacgaagacaaccgcaagcttccaaaactgccagagggacaaagcacgtctgtagctaaatatgtgaggacaggcctgactcctcgttgggctgatcttgatataaatcagcatgtcaataatgttaaatacattgcgtggattcttgagagtgcacccatctctattcttgagaatcatgagctggcgagcattgtgctggattacaaaagggagtgtggccgggatagtgtgctgcaatcacacacctctgtgcacacggattgcaacagtgagtctggagaaacaaccttgcactgtgagcatgtgctgagccttgaatcaggtccgaccatggtgaaggcccggaccatgtggaggcctaagagaaccaaggcccaagaaacagttgttccatcttcaatttgaattgtgtgagacgttcgggatggtgattttggcaacaaactactactatttggcaaaaagatcagaatggttactagcgtcctctattggaagcaagtcacacagggcgagacctaaactaatttaattatgaagtgtgaacaatagaggagatataaatagtgtgaacaatggactggaagagacagaagcggggggagatcgaagacaagggaggcctcatgtgcatgacaatcttcggtcgcacaaatgggtgttgtaagtattgatctgtaagctacaaatgtatgaaggggagtgagtgcttcccatacatgttccttctggggctatgtccatatgctataagcccctcgaaaacattgtcgcagccatatattcatgcagaggattttaatctcgtaaaaat

SEQ ID NO: 83224 - DNA, 1902 bp, Zea Mays
atttgacagcgggttggtttgaccgtcgttttgtccctgcacttcctcgcaagctctggccatttctacccgtgatgcgcctgtagtattgagatcccggattcagacaggtgctaccattcgatttgatttggcgcggagcactttcctatggccgcctccatcgcggcctcgtccttctttccagggtcaccggcgccggccgctcctaagaacggccttggggagcgcccagagagcctggacgtccgcggcgttgcggcgaagccgggagcctcgtctagtgccgtgagggcgagcaagacgcgcgcccacgctgcggtccccaagatgaacggtgggggcaagtccgcggtggcggatggggagcacgaaaccgtaccttcttcggtgccgaagactttctacaaccagcttcccgactggagcatgctccttgcggccatcaccaccatcttcttggccgcagagaagcagtggacgatgcttgactggaagcctaggaggcctgacatgctcactgacacgtttgggtttggccggatcatacatgatgggctcatgttcaggcagaacttctccattaggtcctatgagattggggcagataggacggcatctatagagacgctgatgaaccatttgcaggaaacggcactcaatcatgtgaagaccgctgggctgctaggtgatggatttggctccacaccagagatgagtaaacgaaacttgttctgggtggttagccaaatgcaggccatcatcgagcgttatccatgctggggtgatactgttgaagtagatacatgggttagtgctaatggtaaaaatggaatgcgtagggattggcatatacgcgatcctataacaggcctcacgatactgaaggcaacaagtaaatgggttatgatgaacaaactcactaggaagcttgcaagaattccagatgaagtgcggactgaaatagagccatacttttttgagcattctgctattgttgacgaagacaaccgcaagcttccaaaactgccagagggacaaagcacgtctgtagctaaatatgtgaggacaggcctgactcctcgttgggctgatcttgatataaatcagcatgtcaataatgttaaatacattgcgtggattcttgagagtgcacccatctctattcttgagaatcatgagctggcgagcattgtgctggattacaaaagggagtgtggccgggatagtgtgctgcaatcacacacctctgtgcacacggattgcaacagtgagtctggagaaacaaccttgcactgtgagcatgtgctgagccttgaatcaggtccgaccatggtgaaggcccggaccatgtggaggcctaagagaaccaaggcccaagaaacagttgttccatcttcaatttgaattgtgtgagacgttcgggatggtgattttggcaacaaactactactatttggcaaaaagatcagaatggttactagcgtcctctattggaagcaagtcacacagggcgagacctaaactaatttaattatgaagtgtgaacaatagaggagatataaatagtgtgaacaatggactggaagagacagaagcggggggagatcgaagacaagggaggcctcatgtgcatgacaatcttcggtcgcacaaatgggtgttgtaagtattgatctgtaagctacaaatgtatgaaggggagtgagtgcttcccatacatgttccttctggggctatgtccatatgctataagcccctcgaaaacattgtcgcagccatatattcatgcagaggattttaatctcgtacgtatattgtatttgctgatattaagattgatattattactacttttctccaggctgccaaagcgttttgaaacttggacagatattgaaa

SEQ ID NO: 83225 - DNA, 1883 bp, Zea Mays
gctgtagctatttctgggcgcttcgctgttcggcctgctagcgtccgggccgtgacagctggggtgaatcgcgggagttcagggtccttgccccggctggatctcgagttcaggaaaccttgcgcccctcttccttctcgtttacgccgctagatttgggttgctgccgcttattttcttggattgagatcccggattcagacaggtgctaccattcgatttgatttggcgcggagcactttcctatggccgcctccatcgcggcctcgtccttctttccagggtcaccggcgccggccgctcctaagaacggccttggggagcgcccagagagcctggacgtccgcggcgttgcggcgaagccgggagcctcgtctagtgccgtgagggcgagcaagacgcgcgcccacgctgcggtccccaagatgaacggtgggggcaagtccgcggtggcggatggggagcacgaaaccgtaccttcttcggtgccgaagactttctacaaccagcttcccgactggagcatgctccttgcggccatcaccaccatcttcttggccgcagagaagcagtggacgatgcttgactggaagcctaggaggcctgacatgctcactgacacgtttgggtttggccggatcatacatgatgggctcatgttcaggcagaacttctccattaggtcctatgagattggggcagataggacggcatctatagagacgctgatgaaccatttgcaggaaacggcactcaatcatgtgaagaccgctgggctgctaggtgatggatttggctccacaccagagatgagtaaacgaaacttgttctgggtggttagccaaatgcaggccatcatcgagcgttatccatgctgtaaatgggttatgatgaacaaactcactaggaagcttgcaagaattccagatgaagtgcggactgaaatagagccatacttttttgagcattctgctattgttgacgaagacaaccgcaagcttccaaaactgccagagggacaaagcacgtctgtagctaaatatgtgaggacaggcctgactcctcgttgggctgatcttgatataaatcagcatgtcaataatgttaaatacattgcgtggattcttgagagtgcacccatctctattcttgagaatcatgagctggcgagcattgtgctggattacaaaagggagtgtggccgggatagtgtgctgcaatcacacacctctgtgcacacggattgcaacagtgagtctggagaaacaaccttgcactgtgagcatgtgctgagccttgaatcaggtccgaccatggtgaaggcccggaccatgtggaggcctaagagaaccaaggcccaagaaacagttgttccatcttcaatttgaattgtgtgagacgttcgggatggtgattttggcaacaaactactactatttggcaaaaagatcagaatggttactagcgtcctctattggaagcaagtcacacagggcgagacctaaactaatttaattatgaagtgtgaacaatagaggagatataaatagtgtgaacaatggactggaagagacagaagcggggggagatcgaagacaagggaggcctcatgtgcatgacaatcttcggtcgcacaaatgggtgttgtaagtattgatctgtaagctacaaatgtatgaaggggagtgagtgcttcccatacatgttccttctggggctatgtccatatgctataagcccctcgaaaacattgtcgcagccatatattcatgcagaggattttaatctcgtacgtatattgtatttgctgatattaagattgatattattactacttttctccaggctgccaaagcgttttgaaacttggacagatattgaaa

SEQ ID NO: 83226 - DNA, 1430 bp, Zea Mays
tgtaggtgttgttacattatcctatggtcttggtcaagactctaagttagagaagcgacttaggacaaaaccaaagggaactgtaattaggaacgaggtattcacagtagagtactctttaatttgtaagatacatgagtatgcaaaaccttatatatgcttgatggatggagtgacaatgggatttggaattgggctatcagggcatggccgctaccgcattattacagagagaacactcctagccatgcctgaaaatggtattggcctgttcccagatgttggctttgcttacattggtgcaaaagcaccaggagggggtgcagttggagtttaccttgggattactggaaaaaggatatcatcacctgctgatgctatgttcataggccttggtactcactatgtaccttctgcaaatttgggttcactcaaggagtccctgctgagtgctaacttcaccaatgatcctcatagagacgttgagtcagttctgacaggatacaagaaagaaccagagtctgaaccacaactaaaaaagcttttgccatatatcatttcttctttcagtcctgataaatcagtggctgaatctgtggaagagctaaagaaatgtagccgaagtggtgatgctgcagtggcagaatgggccaatgaagctttagcaggaattgagaaaggcgctccattttctctttgtttaacacagaagcatttctctcaagttgcatcagcatatgggactagtgaacactatttatctaagctggctggtgttatgaaattggaatatcgcattgccttgaggtcgtcgattagaaacgattttgttgaaggtgtgcgtgctgttttagttgacaaggaccagaatccgaagtggaatccagccactctggaagaagtaaacatggccgaggtcgaatcagttttcgagccattaggggccgaggctgagttgagtgtgtgaaatatggcctgccacactcagttttcttatttgtgctgcaataataatgtatacaaaacagaaatgcgatgcccacagaaacaataaatgctgtgtcttcatgaactaactggagtggttccattttctcgaaaggggcgcgtgggaatctaaggtctgttgcttgctttcctgcctctgcctgcaatattccagccatggtaccaggtggatggccaaatactctagaagcgtttgccctgggcacttgcatgtagcttgatgtgagtagtgtaagaacaaccgggtacggaaaccgttgtctggccagcagatttcaaggcgtgtttagacaagtgtacaactgacgcgcacagatgtacggagtatatattatatgaaatatggcactaaaactcttttcccaggggctttgacgcaggcccggccgcggaaaaaagaaagaaaaaaatattacaactag

SEQ ID NO: 83227 - DNA, 1542 bp, Zea Mays
atttgacctccgaggaccctctggccagggatctcaataaataaacttagtcggaaatggatgttagatacaaggcacttcttgatgaatgggaaacaaatccaagtgtcaagtgtattcttgtggaaagcagctcttctcgtgccttctcagcaggtggggatgtgaagagacttgctaatgattgcaccatgccagaaataatagaggtattcacagtagagtactctttaatttgtaagatacatgagtatgcaaaaccttatatatgcttgatggatggagtgacaatgggatttggaattgggctatcagggcatggccgctaccgcattattacagagagaacactcctagccatgcctgaaaatggtattggcctgttcccagatgttggctttgcttacattggtgcaaaagcaccaggagggggtgcagttggagtttaccttgggattactggaaaaaggatatcatcacctgctgatgctatgttcataggccttggtactcactatgtaccttctgcaaatttgggttcactcaaggagtccctgctgagtgctaacttcaccaatgatcctcatagagacgttgagtcagttctgacaggatacaagaaagaaccagagtctgaaccacaactaaaaaagcttttgccatatatcatttcttctttcagtcctgataaatcagtggctgaatctgtggaagagctaaagaaatgtagccgaagtggtgatgctgcagtggcagaatgggccaatgaagctttagcaggaattgagaaaggcgctccattttctctttgtttaacacagaagcatttctctcaagttgcatcagcatatgggactagtgaacactatttatctaagctggctggtgttatgaaattggaatatcgcattgccttgaggtcgtcgattagaaacgattttgttgaaggtgtgcgtgctgttttagttgacaaggaccagaatccgaagtggaatccagccactctggaagaagtaaacatggccgaggtcgaatcagttttcgagccattaggggccgaggctgagttgagtgtgtgaaatatggcctgccacactcagttttcttatttgtgctgcaataataatgtatacaaaacagaaatgcgatgcccacagaaacaataaatgctgtgtcttcatgaactaactggagtggttccattttctcgaaaggggcgcgtgggaatctaaggtctgttgcttgctttcctgcctctgcctgcaatattccagccatggtaccaggtggatggccaaatactctagaagcgtttgccctgggcacttgcatgtagcttgatgtgagtagtgtaagaacaaccgggtacggaaaccgttgtctggccagcagatttcaaggcgtgtttagacaagtgtacaactgacgcgcacagatgtacggagtatatattatatgaaatatggcactaaaactcttttcccaggggctttgacgcaggcccggccgcggaaaaaagaaagaaaaaaatattacaactag

SEQ ID NO: 83228 - DNA, 1645 bp, Zea Mays
aaaagttagaaaattaattctgcgttagttactccaggcttaaggttaagcacctcccaaacacgcctatgagggccctcgtccggatccacctgcccacggccatctccaccggatccttcctccacacctcctcaaccgccgcctccaagaccctagtaccgaaccccaacctcgtcccgctccggctcgtccgccacttcccggccatggccgccaccgccgcagacgagttcgtgaagggccgcgtcttccccaacggcgtcgccgtcatcacgctcgaccgacccaaggccctcaacgccatgaacctcgaaatggatgttagatacaaggcacttcttgatgaatgggaaacaaatccaagtgtcaagtgtattcttgtggaaagcagctcttctcgtgccttctcagcagggatggatattaagggggttgccgtggaaatacaaaaagacaaaaaaacaccacttgtgcaaaagggcatggccgctaccgcattattacagagagaacactcctagccatgcctgaaaatggtattggcctgttcccagatgttggctttgcttacattggtgcaaaagcaccaggagggggtgcagttggagtttaccttgggattactggaaaaaggatatcatcacctgctgatgctatgttcataggccttgcaccaatgatcctcatagagacgttgagtcagttctgacaggatacaagaaagaaccagagtctgaaccacaactaaaaaagcttttgccatatatcatttcttctttcagtcctgataaatcagtggctgaatctgtggaagagctaaagaaatgtagccgaagtggtgatgctgcagtggcagaatgggccaatgaagctttagcaggaattgagaaaggcgctccattttctctttgtttaacacagaagcatttctctcaagttgcatcagcatatgggactagtgaacactatttatctaagctggctggtgttatgaaattggaatatcgcattgccttgaggtcgtcgattagaaacgattttgttgaaggtgtgcgtgctgttttagttgacaaggaccagaatccgaagtggaatccagccactctggaagaagtaaacatggccgaggtcgaatcagttttcgagccattaggggccgaggctgagttgagtgtgtgaaatatggcctgccacactcagttttcttatttgtgctgcaataataatgtatacaaaacagaaatgcgatgcccacagaaacaataaatgctgtgtcttcatgaactaactggagtggttccattttctcgaaaggggcgcgtgggaatctaaggtctgttgcttgctttcctgcctctgcctgcaatattccagccatggtaccaggtggatggccaaatactctagaagcgtttgccctgggcacttgcatgtagcttgatgtgagtagtgtaagaacaaccgggtacggaaaccgttgtctggccagcagatttcaaggcgtgtttagacaagtgtacaactgacgcgcacagatgtacggagtatatattatatgaaatatggcactaaaactcttttcccaggggctttgacgcaggcccggccgcggaaaaaagaaagaaaaaaatattacaactag

SEQ ID NO: 83229 - DNA, 1817 bp, Zea Mays
gcaaaagttagaaaattaattctgcgttagttactccaggcttaaggttaagcacctcccaaacacgcctatgagggccctcgtccggatccacctgcccacggccatctccaccggatccttcctccacacctcctcaaccgccgcctccaagaccctagtaccgaaccccaacctcgtcccgctccggctcgtccgccacttcccggccatggccgccaccgccgcagacgagttcgtgaagggccgcgtcttccccaacggcgtcgccgtcatcacgctcgaccgacccaaggccctcaacgccatgaacctcgaaatggatgttagatacaaggcacttcttgatgaatgggaaacaaatccaagtgtcaagtgtattcttgtggaaagcagctcttctcgtgccttctcagcagggatggatattaagggggttgccgtggaaatacaaaaagacaaaaaaacaccacttgtgcaaaaggtattcacagtagagtactctttaatttgtaagatacatgagtatgcaaaaccttatatatgcttgatggatggagtgacaatgggatttggaattgggctatcagggcatggccgctaccgcattattacagagagaacactcctagccatgcctgaaaatggtattggcctgttcccagatgttggctttgcttacattggtgcaaaagcaccaggagggggtgcagttggagtttaccttgggattactggaaaaaggatatcatcacctgctgatgctatgttcataggccttggtactcactatgtaccttctgcaaatttgggttcactcaaggagtccctgctgagtgctaacttcaccaatgatcctcatagagacgttgagtcagttctgacaggatacaagaaagaaccagagtctgaaccacaactaaaaaagcttttgccatatatcatttcttctttcagtcctgataaatcagtggctgaatctgtggaagagctaaagaaatgtagccgaagtggtgatgctgcagtggcagaatgggccaatgaagctttagcaggaattgagaaaggcgctccattttctctttgtttaacacagaagcatttctctcaagttgcatcagcatatgggactagtgaacactatttatctaagctggctggtgttatgaaattggaatatcgcattgccttgaggtcgtcgattagaaacgattttgttgaaggtgtgcgtgctgttttagttgacaaggaccagaatccgaagtggaatccagccactctggaagaagtaaacatggccgaggtcgaatcagttttcgagccattaggggccgaggctgagttgagtgtgtgaaatatggcctgccacactcagttttcttatttgtgctgcaataataatgtatacaaaacagaaatgcgatgcccacagaaacaataaatgctgtgtcttcatgaactaactggagtggttccattttctcgaaaggggcgcgtgggaatctaaggtctgttgcttgctttcctgcctctgcctgcaatattccagccatggtaccaggtggatggccaaatactctagaagcgtttgccctgggcacttgcatgtagcttgatgtgagtagtgtaagaacaaccgggtacggaaaccgttgtctggccagcagatttcaaggcgtgtttagacaagtgtacaactgacgcgcacagatgtacggagtatatattatatgaaatatggcactaaaactcttttcccaggggctttgacgcaggcccggccgcggaaaaaagaaagaaaaaaatattacaactag

SEQ ID NO: 83230 - DNA, 748 bp, Zea Mays
acagacgacccgtacgacccttacctctgcctttcccttttctcctcctatccctaacgcactcgccgccgctcggctctcccttgtcaatgcacacatgcactcgccgccgccgctcgactctcccctcccaatggcaccccgtcgctcaccatcaaatatttcctcccctgcaagtgcaagatcaccaacgaggagatattgatggcgctgttggtggacccacctgacatcaagagggagatgcagcccgcaccaccaccatctgctgcggcgtcggcatcgcagatggcgtggccgctggattggccggtggacgggtgctcgctcaatcctccatcaccgcccctatatcagtcgagtgtttggactggaatgctcacagtctgttactttgatggcaaaacatatgaattggttggacagagccgccaacgaagtaccatgggatgtgctgaacaatgaaagcttctgtcttgaaacaataggatataagaagcttgcaagtggttttgtgaaggcttttgtgaatcacttgaatcattagttcttttaagaatggttttgtaaagcgttagcaaatatgtgtaaaacacaataagatgtgtggcaaagtcagtgatctagttgtacaattttttgtgtttatgtgatatgtggatatttcattgtggaatgttaatgaactgtgtatgtctatgtgattatgtgtataaaatatatgttttgtggtgcttttgtgataata

SEQ ID NO: 83231 - DNA, 1498 bp, Zea Mays
acgttgggctcctacataacacgcgcccccgcttccactcggcgaccaccggtccaccgcgcatcgaacccccacttgtgctgattctgctgatccctcgccgacaacggccggagaatcgacaccatggccgctgcgcgccggggccgtggcgacggcgccaacggcgtcgtccgtccccgcccccgcgaccgcggcatcggcggcgggagcatggcggggcgcgtggccgtcctcgccttctgtgtcgcagggatctggtccgcctacatctaccagggcgtcctccaggagactctatcgacgaagcggttcgggccggatgcgcggcggttcgagcacctcgcgttcctcaacttcgcgcagaacgtcatctgcttcgtctggtccttcataatgattaagctgtggtcgggcgggagtagctccaatggcagcgcaccgatatggaagtactggggcgtcagcgtcaccaataccatcgggccgaccatggggatcgaggctctcaagtacatcagctacccggctcaggtgttggcaaaatcttctaagatgattcctgtacacacttccagagtatttatgcacctttcttgttgccggcggtgtgtcctcctttgcgttgttgaagacaagctccaagacaattaagaagcttgccaaccctaatgcacctcttggttacacattgtgcttcctcaacttagcttttgatggatatactaactcgacccaagatttaataaagtcaaggtacccaaaaacaaacccatgggatataatgcttggcatgaacctctgggggaccatatataatgctgtaattatgtttgttgcgccattactattcagtaactggccatatgcaaatggttttgaggcattgagattttgccaggagaacccagaggtggcctgggacattttcctattctgcctatgtggcgccgtggggcagaacttcatcttcttaaccatcagccggtttggctctcttactaacacaacaatcactaccacccgtaaattcatgagcattgtggtttcatccgtcatcagtggcaatccattatctttgaagcaatggggtagtgttgtgatggtcttcttaggcctctctatccaaatatatctcaaatggaagagaaagaaaggcagagagcacaaggagtaagcttgattcttcaaccttttctgatttgtaacttcaattggacagatctcttgtgaggttgaccaggataacgttaatgcagtctgtttgaaattaggaacttttacatggattattatgagtgataccaagtgtgaggctgagctattggtaacagctctaatttatgttctagagggaggattcatgtgtttcacttaaatgttgatctcgtggatttgtcttatgctactagaagaaaatacccacctaaacaatataaggaatatacgaatagtccttaactcaggagcctaactcggtgaacatagcagttttttt

SEQ ID NO: 83232 - DNA, 2255 bp, Zea Mays
acgttgggctcctacataacacgcgcccccgcttccactcggcgaccaccggtccaccgcgcatcgaacccccacttgtgctgattctgctgatccctcgccgacaacggccggagaatcgacaccatggccgctgcgcgccggggccgtggcgacggcgccaacggcgtcgtccgtccccgcccccgcgaccgcggcatcggcggcgggagcatggcggggcgcgtggccgtcctcgccttctgtgtcgcagggatctggtccgcctacatctaccagggcgtcctccaggagactctatcgacgaagcggttcgggccggatgcgcggcggttcgagcacctcgcgttcctcaacttcgcgcagaacgtcatctgcttcgtctggtccttcataatgattaagctgtggtcgggcgggagtagctccaatggcagcgcaccgatatggaagtactggggcgtcagcgtcaccaataccatcgggccgaccatggggatcgaggctctcaagtacatcagctacccggctcaggtgttggcaaaatcttctaagatgattcctggtaagtttacatttacttatacacactacagtgtatatgtatcacaacataaaagtattcacagcttgttcttttcttcttgaacagtccaatttaatttatttcactgagtaaagaaaactacaaagagcagaataaaagtgcaatgaaagataatccctttttcttttatgttgagacataccatgctcaacactattatgagtataattctacattagtaggaacaatgacagggatatttttattgatatccatgttggctcgatgtgtttattaagtatcataagatattagattggccctgacatctaagtccatacggttctaagaaaacgaatatatttgtgtcttctttttgttgacaaaatcatcatagggtgaatatattaattaaggtagatctcttttgccaactaaactcatggtcattctatcttatgtgcttacatgatttaaccgttgaagccatcaatatgcaatgagttgttggatcttatgtgcaattatgcattgcttaccgaaactattctaatagtttatagaactgaaactattctctgagttgtcggatttgtatttgttctatgtatctaagtacttttgggtcagtaattgtttctatgtatttaagtatttttcttaaagaaatgcattcttcctcaacattgcatgctgcgtatttgacgcttctcctctaacttcctattcaatttatttagtaatgttgatgggaactcttctctatggtgtgaagtacacacttccagagtatttatgcacctttcttgttgccggcggtgtgtcctcctttgcgttgttgaagacaagctccaagacaattaagaagcttgccaaccctaatgcacctcttggttacacattgtgcttcctcaacttagcttttgatggatatactaactcgacccaagatttaataaagtcaaggtacccaaaaacaaacccatgggatataatgcttggcatgaacctctgggggaccatatataatgctgtaattatgtttgttgcgccattactattcagtaactggccatatgcaaatggttttgaggcattgagattttgccaggagaacccagaggtggcctgggacattttcctattctgcctatgtggcgccgtggggcagaacttcatcttcttaaccatcagccggtttggctctcttactaacacaacaatcactaccacccgtaaattcatgagcattgtggtttcatccgtcatcagtggcaatccattatctttgaagcaatggggtagtgttgtgatggtcttcttaggcctctctatccaaatatatctcaaatggaagagaaagaaaggcagagagcacaaggagtaagcttgattcttcaaccttttctgatttgtaacttcaattggacagatctcttgtgaggttgaccaggataacgttaatgcagtctgtttgaaattaggaacttttacatggattattatgagtgataccaagtgtgaggctgagctattggtaacagctctaatttatgttctagagggaggattcatgtgtttcacttaaatgttgatctcgtggatttgtcttatgctactagaagaaaatacccacctaaacaatataaggaatatacgaatagtccttaactcaggagcctaactcggtgaacatagcagttttttt

SEQ ID NO: 83233 - DNA, 1435 bp, Zea Mays
acgttgggctcctacataacacgcgcccccgcttccactcggcgaccaccggtccaccgcgcatcgaacccccacttgtgctgattctgctgatccctcgccgacaacggccggagaatcgacaccatggccgctgcgcgccggggccgtggcgacggcgccaacggcgtcgtccgtccccgcccccgcgaccgcggcatcggcggcgggagcatggcggggcgcgtggccgtcctcgccttctgtgtcgcagggatctggtccgcctacatctaccagggcgtcctccaggagactcttgattaagctgtggtcgggcgggagtagctccaatggcagcgcaccgatatggaagtactggggcgtcagcgtcaccaataccatcgggccgaccatggggatcgaggctctcaagtacatcagctacccggctcaggtgttggcaaaatcttctaagatgattcctgtaatgttgatgggaactcttctctatggtgtgaagtacacacttccagagtatttatgcacctttcttgttgccggcggtgtgtcctcctttgcgttgttgaagacaagctccaagacaattaagaagcttgccaaccctaatgcacctcttggttacacattgtgcttcctcaacttagcttttgatggatatactaactcgacccaagatttaataaagtcaaggtacccaaaaacaaacccatgggatataatgcttggcatgaacctctgggggaccatatataatgctgtaattatgtttgttgcgccattactattcagtaactggccatatgcaaatggttttgaggcattgagattttgccaggagaacccagaggtggcctgggacattttcctattctgcctatgtggcgccgtggggcagaacttcatcttcttaaccatcagccggtttggctctcttactaacacaacaatcactaccacccgtaaattcatgagcattgtggtttcatccgtcatcagtggcaatccattatctttgaagcaatggggtagtgttgtgatggtcttcttaggcctctctatccaaatatatctcaaatggaagagaaagaaaggcagagagcacaaggagtaagcttgattcttcaaccttttctgatttgtaacttcaattggacagatctcttgtgaggttgaccaggataacgttaatgcagtctgtttgaaattaggaacttttacatggattattatgagtgataccaagtgtgaggctgagctattggtaacagctctaatttatgttctagagggaggattcatgtgtttcacttaaatgttgatctcgtggatttgtcttatgctactagaagaaaatacccacctaaacaatataaggaatatacgaatagtccttaactcaggagcctaactcggtgaacatagcagttttttt

SEQ ID NO: 83234 - DNA, 1479 bp, Zea Mays
ggcaaaaatggcaattggccggtgccaaagggctttccttcttggcggtgcctccctctaatgtttaggagaggtgttggtgtgttgtttgtatgcctgtttctttagtgtccagatggatagttatttgtatgcctgtttctggcctccataagggaaaggtcttgtattttgggtcttctatagacctcttgttttctcttctaatataattaaaaggagtagctctcctactcttttcgagaaaaaaagtgatatgtaagcagctcccttgcatatttgagataaacagctcgagatggcagaagaatgtcttcttcaagctacagactttagtgggttattgcttctatattcatcacttggagatgctgaagggataacaaaactggcatccatgtctaaagaactaggaaagaacaatgttgctttcctttgcttgtttatgttaggcaaattggaagaatgtcttcaattgttggttgatagtaatcgtattccagaagcagcactgatggcacgatcttaccttccaagcaaagtttctgatattgtctcaatatggaaaaaggacctccaaaaggtgaattccaaagctgcagaatctctggcagatcctgctgagtacccaaacctgttcgaggactggcagattgctctgaatgtagaagctactgttgctcccaagaggggtgtctacccacctgctgaggagtacatgacttatgcggagaggtctaatgacagccttgtggaagttttcaaaagtatgaatgtggaagaagtaccaagtgataatggagatcctgttcatgaggtcactgaggatgacggagtcgagggaagtatggatgatgttgttgaagttgaacccgatgattcaacagatggcggtgtccttgtgaatgggaatgatgtgcttactcctgaccagcagtagagatatcacgacaacattctgcaccagcagattagttgcctattgtaaaaaattgtaggtcgccacatgttcagactcgatagtcatgtaaaagaagttcctccccatttgtacaaggcgttgtgcgtggtctagtattgcggttacagaaacagtcttggatggtaattagcatttggtctagataagaaattttgtaattcgattcattttgggtgggcattgtagatttgtggtatgttatagattatctacccttgtatgtttaccacatgatacgatactaacattctttaaggttggaatttgttcaccgacacatgggctgcgacctgcatagcatgtgaaagttgtatttttggttccccagttgtcgataacttgatccttggtttctgccatgtattgtactgccttcttgtaacttattttgccttttttagatgtactgtttttagtatatagtgtatttagatacaatgtataaccagttgtataataaaaactagttaagtgtccgtacgtcgctacgacacata

SEQ ID NO: 83235 - DNA, 1589 bp, Zea Mays
aaatgcgcaggagaactgcacaactttgtattaagcagagaattaaagcggagagaactccaatacaccacacacacccacactagaaactaacttgtgatcaccggctaacaggaaaaaacacgatcaacagagctgttttaagccagcagctcttcgaccttgagcaaagacagggccttggctccagccaaggaccaaagcaccgtctcttccttacaccctaagggttgtgaccaagctaggattacattcatcaaagacacatctatgcctatgtttccatatggtccaagcacctagaattactaaggaattgaagcccttcctcatttgatcagttgtccgagagctgctagtccttcaccacgactggaaggaatcctcctcgagatggcagaagaatgtcttcttcaagctacagactttagtgggttattgcttctatattcatcacttggagatgctgaagggataacaaaactggcatccatgtctaaagaactaggaaagaacaatgttgctttcctttgcttgtttatgttaggcaaattggaagaatgtcttcaattgttggttgatagtaatcgtattccagaagcagcactgatggcacgatcttaccttccaagcaaagtttctgatattgtctcaatatggaaaaaggacctccaaaaggtgaattccaaagctgcagaatctctggcagatcctgctgagtacccaaacctgttcgaggactggcagattgctctgaatgtagaagctactgttgctcccaagaggggtgtctacccacctgctgaggagtacatgacttatgcggagaggtctaatgacagccttgtggaagttttcaaaagtatgaatgtggaagaagtaccaagtgataatggagatcctgttcatgaggtcactgaggatgacggagtcgagggaagtatggatgatgttgttgaagttgaacccgatgattcaacagatggcggtgtccttgtgaatgggaatgatggtgaggaacactgggtgcttactcctgaccagcagtagagatatcacgacaacattctgcaccagcagattagttgcctattgtaaaaaattgtaggtcgccacatgttcagactcgatagtcatgtaaaagaagttcctccccatttgtacaaggcgttgtgcgtggtctagtattgcggttacagaaacagtcttggatggtaattagcatttggtctagataagaaattttgtaattcgattcattttgggtgggcattgtagatttgtggtatgttatagattatctacccttgtatgtttaccacatgatacgatactaacattctttaaggttggaatttgttcaccgacacatgggctgcgacctgcatagcatgtgaaagttgtatttttggttccccagttgtcgataacttgatccttggtttctgccatgtattgtactgccttcttgtaacttattttgccttttttagatgtactgtttttagtatatagtgtatttagatacaatgtataaccagttgtataataaaaactagttaagtgtccgtacgtcgctacgacacata

SEQ ID NO: 83236 - DNA, 1853 bp, Zea Mays
tttctaaatcctgagccctatgaacaattttatcttcctccacacgtaatcgtaatgatactcagattctccccacatccagattctccccacagctagatttttaaaaaagctggtcagaaaaaagctgaaccaaacaagccctataccacttatctctcaactgtttaggacacatcgtccaagaaattctccttaagcgcaccgccgcaccctgaattctagttgctttgcaggaaattgctattgaggcacatagtgaatcaaagtggaagcagttgggggaactcgctatgtccactggaaagctcgagatggcagaagaatgtcttcttcaagctacagactttagtgggttattgcttctatattcatcacttggagatgctgaagggataacaaaactggcatccatgtctaaagaactaggaaagaacaatgttgctttcctttgcttgtttatgttaggcaaattggaagaatgtcttcaattgttggttgatagtaatcgtattccagaagcagcactgatggcacgatcttaccttccaagcaaagtttctgatattgtctcaatatggaaaaaggacctccaaaaggtgaattccaaagctgcagaatctctggcagatcctgctgagtacccaaacctgttcgaggactggcagattgctctgaatgtagaagctactgttgctcccaagaggggtgtctacccacctgctgaggagtacatgacttatgcggagaggtctaatgacagccttgtggaagttttcaaaagtatgaatgtggaagaagtaccaagtgataatggagatcctgttcatgaggtcactgaggatgacggagtcgagggaagtatggatgatgttgttgaagttgaacccgatgattcaacagatggcggtgtccttgtgaatgggaatgatggtgaggaacactgggtgcttactcctgaccagcagtagagatatcacgacaacattctgcaccagcagattagttgcctattgtaaaaaagtaagtaccattatgtatacgcacaagtcaagaaaaaattaaattgacaaagaaccgtgctcccatacccttgaataaatctatgttgtatgtaatgttttctaggcctaagtagtatgtaatattcttcatgtttggcgtgtaagggcgagtttgagaaccctatttttcaaagggttttcattttttcaaagaaaattagttcatttaaccttaggaatatagtaatcctttggaaaaatggagttcccaaactagtcctaaaacaaattatctgcccgcatgccatggtagaccgtcaattttcctagtatattttgtggtttaaactttcttctcacagttgtaggtcgccacatgttcagactcgatagtcatgtaaaagaagttcctccccatttgtacaaggcgttgtgcgtggtctagtattgcggttacagaaacagtcttggatggtaattagcatttggtctagataagaaattttgtaattcgattcattttgggtgggcattgtagatttgtggtatgttatagattatctacccttgtatgtttaccacatgatacgatactaacattctttaaggttggaatttgttcaccgacacatgggctgcgacctgcatagcatgtgaaagttgtatttttggttccccagttgtcgataacttgatccttggtttctgccatgtattgtactgccttcttgtaacttattttgccttttttagatgtactgtttttagtatatagtgtatttagatacaatgtataaccagttgtataataaaaactagttaagtgtccgtacgtcgctacgacacata

SEQ ID NO: 83237 - DNA, 1372 bp, Zea Mays
gtcagcttctataaaattcgttggagcaaaaatcatctaaaatcaacataaacacataatggttgagtcggtgtaatagtaggaatccgtcactttctaaatcctgagccctatgaacaattttatcttcctccacacgtaatcgtaatgatactcagattctccccacatccagattctccccacagctagatttttaaaaaagctggtcagaaaaaagctgaaccaaacaagccctataccacttatctctcaactgtttaggacacatcgtccaagaaattctccttaagcgcaccgccgcaccctgaattctagttgctttgcaggaaattgctattgaggcacatagtgaatcaaagtggaagcagttgggggaactcgctatgtccactggaaagtaatcgtattccagaagcagcactgatggcacgatcttaccttccaagcaaagtttctgatattgtctcaatatggaaaaaggacctccaaaagaatctctggcagatcctgctgagtacccaaacctgttcgaggactggcagattgctctgaatgtagaagctactgttgctcccaagaggggtgtctacccacctgctgaggagtacatgacttatgcggagaggtctaatgacagccttgtggaagttttcaaaagtatgaatgtggaagaagtaccaagtgataatggagatcctgttcatgaggtcactgaggatgacggagtcgagggaagtatggatgatgttgttgaagttgaacccgatgattcaacagatggcggtgtccttgtgaatgggaatgatgtgcttactcctgaccagcagtagagatatcacgacaacattctgcaccagcagattagttgcctattgtaaaaaattgtaggtcgccacatgttcagactcgatagtcatgtaaaagaagttcctccccatttgtacaaggcgttgtgcgtggtctagtattgcggttacagaaacagtcttggatggtaattagcatttggtctagataagaaattttgtaattcgattcattttgggtgggcattgtagatttgtggtatgttatagattatctacccttgtatgtttaccacatgatacgatactaacattctttaaggttggaatttgttcaccgacacatgggctgcgacctgcatagcatgtgaaagttgtatttttggttccccagttgtcgataacttgatccttggtttctgccatgtattgtactgccttcttgtaacttattttgccttttttagatgtactgtttttagtatatagtgtatttagatacaatgtataaccagttgtataataaaaactagttaagtgtccgtacgtcgctacgacacata

SEQ ID NO: 83238 - DNA, 3299 bp, Zea Mays
atggggcggttcggtcatgctcctagcctttgtctgtgcgtgccgtcgaggaggacatggtggcgcatgccacgcttaggttatctcaacgatgaggagttcaggtctgagatattggacaaccaaggcccgtattgtggcagcagtcggcatattcctacggagttggtggtggtgttgtgtcacctcgtccgcttcgcgaaaaacgctagatcccgatgcgaccttgtcacttcatatcccgctggacgcattgatgctttccgagccgagatccccattcaaatcctttttttgccgctccagttagagatcaagaggaagctcgcgcagaggtcggagagggtcaagtccgtggacctgcatcccacggaaccatggatcatgtcaagtctttattctggcagtgtctgcatctggaactaccagactcagacaatggtgaaatcttttgaagtcagtgagttaccagttcgttcggctaaatttattgcacagaagcaatgggttgttgctggtgccgatgacatgttcatccgtgtgtataactataataccatggataaggtcaagttgttcgaagctcatactgattacatcaggtgtgtggctgttcatccgaccctgccatatgtgttgtcatcatcagatgacatgcttataaagctttgggactgggataagggttggatgtgtactcaaatttttgagggccactctcactatgtcatgcaagtcacatttaaccccaaagacacaaatacttttgctagtgcttctcttgatcgtactgtaaagatttggagtcttggttcccctgatcctaatttcacattggatggtcattcaaaaggtgtcaattgtgttgattacttcactggtggtgaccggccatatctaattacaggctctgatgaccaaactgcaaaggtttgggattatcaaacaaagagctgtgttcaaacacttgaaggacatgcacataatgtctctgctgtatgtttccatcctgagcttccaataataatgacaggttcagaggatggaactgttcgcctatggcactccactacttacaggcttgagaatacacttaactatggccttgaacgagtttgggcattaggttacatgaagggctcacgaagagtcgtgattggatatgacgaaggaacaataatgattaagattgggcgtgaagcacctgttgctagtatggatagcagtggtaaaatcatatgggccaaacataacgaagttcaaactgtcaatatcaaggcagttggtgcggatgctgagattgcagatggagaacgtctgccattggctgtgaaggagctaggaagttgcgacctttacccacaaagtttacggcacaatccaaatgggaggtttgttgctgtatgtggagatggagagtacattatctacacagcgctagcatggagaaatagatcctttgggtctgctcttgaaattgtttggtcaactgaaggagagtatgctgcaagggaaagcacatcaaaaataaagatctacagtaaaaactttcaggagaggaaaagtataagaccagcattctctggagaacgtatatatgggggagtattgcttgctatatgtacaaatgatttcatttgtttttatgactgggcagagtgcaggttgatacgtcgaattgacgtgaatgtaaaaaatgtatattgggctgacagtggtgatttggtgacaatagcaagcgattcgtcattctacattttgaagtacaatagggatctagtttcttctcatctagatggaggggcatcagttggcgaggaaggtgttgaagatgcctttgaattgcttcatgagataaatgaacgtgtccgtactgggttatgggtcggagactgttttatatacaataattcttcatggcgcctgaactactgcgttggaggagaggttactacaatgtttcacttggatcggcctatgtatttattaggatatcttgctaaccaaagtcgtgtatatcttattgacaaggaatttaatgtggtgggttatactttactactcagtttgattgagtacaaaacacttgtgatgcgtggggatttggaacatgcgaatattattttaccatccataccaaaggaacaacacaacagtgtggcacatttccttgaatcacgtggcatgttggaggaagcccttgatatagccactgaccctaattacagatttgatctggctgtgcagcttggaagcctcgaagttgcaaaggaaattgctattgaggcacatagtgaatcaaagtggaagcagttgggggaactcgctatgtccactggaaagctcgagatggcagaagaatgtcttcttcaagctacagactttagtgggttattgcttctatattcatcacttggagatgctgaagggataacaaaactggcatccatgtctaaagaactaggaaagaacaatgttgctttcctttgcttgtttatgttaggcaaattggaagaatgtcttcaattgttggttgatagtaatcgtattccagaagcagcactgatggcacgatcttaccttccaagcaaagtttctgatattgtctcaatatggaaaaaggacctccaaaaggtgaattccaaagctgcagaatctctggcagatcctgctgagtacccaaacctgttcgaggactggcagattgctctgaatgtagaagctactgttgctcccaagaggggtgtctacccacctgctgaggagtacatgacttatgcggagaggtctaatgacagccttgtggaagttttcaaaagtatgaatgtggaagaagtaccaagtgataatggagatcctgttcatgaggtcactgaggatgacggagtcgagggaagtatggatgatgttgttgaagttgaacccgatgattcaacagatggcggtgtccttgtgaatgggaatgatggtgaggaacactgggtgcttactcctgaccagcagtagagatatcacgacaacattctgcaccagcagattagttgcctattgtaaaaaagttggaatttgttcaccgacacatgggctgcgacctgcatagcatgtgaaagttgtatttttggttccccagttgtcgataacttgatccttggtttctgccatgtattgtactgccttcttgtaacttattttgccttttttagatgtactgtttttagtatatagtgtatttagatacaatgtataaccagttgtataataaaaactagttaagtgtccgtacgtcgctacgacacata

SEQ ID NO: 83239 - DNA, 3545 bp, Zea Mays
atggggcggttcggtcatgctcctagcctttgtctgtgcgtgccgtcgaggaggacatggtggcgcatgccacgcttaggttatctcaacgatgaggagttcaggtctgagatattggacaaccaaggcccgtattgtggcagcagtcggcatattcctacggagttggtggtggtgttgtgtcacctcgtccgcttcgcgaaaaacgctagatcccgatgcgaccttgtcacttcatatcccgctggacgcattgatgctttccgagccgagatccccattcaaatcctttttttgccgctccagttagagatcaagaggaagctcgcgcagaggtcggagagggtcaagtccgtggacctgcatcccacggaaccatggatcatgtcaagtctttattctggcagtgtctgcatctggaactaccagactcagacaatggtgaaatcttttgaagtcagtgagttaccagttcgttcggctaaatttattgcacagaagcaatgggttgttgctggtgccgatgacatgttcatccgtgtgtataactataataccatggataaggtcaagttgttcgaagctcatactgattacatcaggtgtgtggctgttcatccgaccctgccatatgtgttgtcatcatcagatgacatgcttataaagctttgggactgggataagggttggatgtgtactcaaatttttgagggccactctcactatgtcatgcaagtcacatttaaccccaaagacacaaatacttttgctagtgcttctcttgatcgtactgtaaagatttggagtcttggttcccctgatcctaatttcacattggatggtcattcaaaaggtgtcaattgtgttgattacttcactggtggtgaccggccatatctaattacaggctctgatgaccaaactgcaaaggtttgggattatcaaacaaagagctgtgttcaaacacttgaaggacatgcacataatgtctctgctgtatgtttccatcctgagcttccaataataatgacaggttcagaggatggaactgttcgcctatggcactccactacttacaggcttgagaatacacttaactatggccttgaacgagtttgggcattaggttacatgaagggctcacgaagagtcgtgattggatatgacgaaggaacaataatgattaagattgggcgtgaagcacctgttgctagtatggatagcagtggtaaaatcatatgggccaaacataacgaagttcaaactgtcaatatcaaggcagttggtgcggatgctgagattgcagatggagaacgtctgccattggctgtgaaggagctaggaagttgcgacctttacccacaaagtttacggcacaatccaaatgggaggtttgttgctgtatgtggagatggagagtacattatctacacagcgctagcatggagaaatagatcctttgggtctgctcttgaaattgtttggtcaactgaaggagagtatgctgcaagggaaagcacatcaaaaataaagatctacagtaaaaactttcaggagaggaaaagtataagaccagcattctctggagaacgtatatatgggggagtattgcttgctatatgtacaaatgatttcatttgtttttatgactgggcagagtgcaggttgatacgtcgaattgacgtgaatgtaaaaaatgtatattgggctgacagtggtgatttggtgacaatagcaagcgattcgtcattctacattttgaagtacaatagggatctagtttcttctcatctagatggaggggcatcagttggcgaggaaggtgttgaagatgcctttgaattgcttcatgagataaatgaacgtgtccgtactgggttatgggtcggagactgttttatatacaataattcttcatggcgcctgaactactgcgttggaggagaggttactacaatgtttcacttggatcggcctatgtatttattaggatatcttgctaaccaaagtcgtgtatatcttattgacaaggaatttaatgtggtgggttatactttactactcagtttgattgagtacaaaacacttgtgatgcgtggggatttggaacatgcgaatattattttaccatccataccaaaggaacaacacaacagtgtggcacatttccttgaatcacgtggcatgttggaggaagcccttgatatagccactgaccctaattacagatttgatctggctgtgcagcttggaagcctcgaagttgcaaaggaaattgctattgaggcacatagtgaatcaaagtggaagcagttgggggaactcgctatgtccactggaaagctcgagatggcagaagaatgtcttcttcaagctacagactttagtgggttattgcttctatattcatcacttggagatgctgaagggataacaaaactggcatccatgtctaaagaactaggaaagaacaatgttgctttcctttgcttgtttatgttaggcaaattggaagaatgtcttcaattgttggttgatagtaatcgtattccagaagcagcactgatggcacgatcttaccttccaagcaaagtttctgatattgtctcaatatggaaaaaggacctccaaaaggtgaattccaaagctgcagaatctctggcagatcctgctgagtacccaaacctgttcgaggactggcagattgctctgaatgtagaagctactgttgctcccaagaggggtgtctacccacctgctgaggagtacatgacttatgcggagaggtctaatgacagccttgtggaagttttcaaaagtatgaatgtggaagaagtaccaagtgataatggagatcctgttcatgaggtcactgaggatgacggagtcgagggaagtatggatgatgttgttgaagttgaacccgatgattcaacagatggcggtgtccttgtgaatgggaatgatggtgaggaacactgggtgcttactcctgaccagcagtagagatatcacgacaacattctgcaccagcagattagttgcctattgtaaaaaattgtaggtcgccacatgttcagactcgatagtcatgtaaaagaagttcctccccatttgtacaaggcgttgtgcgtggtctagtattgcggttacagaaacagtcttggatggtaattagcatttggtctagataagaaattttgtaattcgattcattttgggtgggcattgtagatttgtggtatgttatagattatctacccttgtatgtttaccacatgatacgatactaacattctttaaggttggaatttgttcaccgacacatgggctgcgacctgcatagcatgtgaaagttgtatttttggttccccagttgtcgataacttgatccttggtttctgccatgtattgtactgccttcttgtaacttattttgccttttttagatgtactgtttttagtatatagtgtatttagatacaatgtataaccagttgtataataaaaactagttaagtgtccgtacgtcgctacgacacata

SEQ ID NO: 83240 - DNA, 3530 bp, Zea Mays
atggggcggttcggtcatgctcctagcctttgtctgtgcgtgccgtcgaggaggacatggtggcgcatgccacgcttaggttatctcaacgatgaggagttcaggtctgagatattggacaaccaaggcccgtattgtggcagcagtcggcatattcctacggagttggtggtggtgttgtgtcacctcgtccgcttcgcgaaaaacgctagatcccgatgcgaccttgtcacttcatatcccgctggacgcattgatgctttccgagccgagatccccattcaaatcctttttttgccgctccagttagagatcaagaggaagctcgcgcagaggtcggagagggtcaagtccgtggacctgcatcccacggaaccatggatcatgtcaagtctttattctggcagtgtctgcatctggaactaccagactcagacaatggtgaaatcttttgaagtcagtgagttaccagttcgttcggctaaatttattgcacagaagcaatgggttgttgctggtgccgatgacatgttcatccgtgtgtataactataataccatggataaggtcaagttgttcgaagctcatactgattacatcaggtgtgtggctgttcatccgaccctgccatatgtgttgtcatcatcagatgacatgcttataaagctttgggactgggataagggttggatgtgtactcaaatttttgagggccactctcactatgtcatgcaagtcacatttaaccccaaagacacaaatacttttgctagtgcttctcttgatcgtactgtaaagatttggagtcttggttcccctgatcctaatttcacattggatggtcattcaaaaggtgtcaattgtgttgattacttcactggtggtgaccggccatatctaattacaggctctgatgaccaaactgcaaaggtttgggattatcaaacaaagagctgtgttcaaacacttgaaggacatgcacataatgtctctgctgtatgtttccatcctgagcttccaataataatgacaggttcagaggatggaactgttcgcctatggcactccactacttacaggcttgagaatacacttaactatggccttgaacgagtttgggcattaggttacatgaagggctcacgaagagtcgtgattggatatgacgaaggaacaataatgattaagattgggcgtgaagcacctgttgctagtatggatagcagtggtaaaatcatatgggccaaacataacgaagttcaaactgtcaatatcaaggcagttggtgcggatgctgagattgcagatggagaacgtctgccattggctgtgaaggagctaggaagttgcgacctttacccacaaagtttacggcacaatccaaatgggaggtttgttgctgtatgtggagatggagagtacattatctacacagcgctagcatggagaaatagatcctttgggtctgctcttgaaattgtttggtcaactgaaggagagtatgctgcaagggaaagcacatcaaaaataaagatctacagtaaaaactttcaggagaggaaaagtataagaccagcattctctggagaacgtatatatgggggagtattgcttgctatatgtacaaatgatttcatttgtttttatgactgggcagagtgcaggttgatacgtcgaattgacgtgaatgtaaaaaatgtatattgggctgacagtggtgatttggtgacaatagcaagcgattcgtcattctacattttgaagtacaatagggatctagtttcttctcatctagatggaggggcatcagttggcgaggaaggtgttgaagatgcctttgaattgcttcatgagataaatgaacgtgtccgtactgggttatgggtcggagactgttttatatacaataattcttcatggcgcctgaactactgcgttggaggagaggttactacaatgtttcacttggatcggcctatgtatttattaggatatcttgctaaccaaagtcgtgtatatcttattgacaaggaatttaatgtggtgggttatactttactactcagtttgattgagtacaaaacacttgtgatgcgtggggatttggaacatgcgaatattattttaccatccataccaaaggaacaacacaacagtgtggcacatttccttgaatcacgtggcatgttggaggaagcccttgatatagccactgaccctaattacagatttgatctggctgtgcagcttggaagcctcgaagttgcaaaggaaattgctattgaggcacatagtgaatcaaagtggaagcagttgggggaactcgctatgtccactggaaagctcgagatggcagaagaatgtcttcttcaagctacagactttagtgggttattgcttctatattcatcacttggagatgctgaagggataacaaaactggcatccatgtctaaagaactaggaaagaacaatgttgctttcctttgcttgtttatgttaggcaaattggaagaatgtcttcaattgttggttgatagtaatcgtattccagaagcagcactgatggcacgatcttaccttccaagcaaagtttctgatattgtctcaatatggaaaaaggacctccaaaaggtgaattccaaagctgcagaatctctggcagatcctgctgagtacccaaacctgttcgaggactggcagattgctctgaatgtagaagctactgttgctcccaagaggggtgtctacccacctgctgaggagtacatgacttatgcggagaggtctaatgacagccttgtggaagttttcaaaagtatgaatgtggaagaagtaccaagtgataatggagatcctgttcatgaggtcactgaggatgacggagtcgagggaagtatggatgatgttgttgaagttgaacccgatgattcaacagatggcggtgtccttgtgaatgggaatgatgtgcttactcctgaccagcagtagagatatcacgacaacattctgcaccagcagattagttgcctattgtaaaaaattgtaggtcgccacatgttcagactcgatagtcatgtaaaagaagttcctccccatttgtacaaggcgttgtgcgtggtctagtattgcggttacagaaacagtcttggatggtaattagcatttggtctagataagaaattttgtaattcgattcattttgggtgggcattgtagatttgtggtatgttatagattatctacccttgtatgtttaccacatgatacgatactaacattctttaaggttggaatttgttcaccgacacatgggctgcgacctgcatagcatgtgaaagttgtatttttggttccccagttgtcgataacttgatccttggtttctgccatgtattgtactgccttcttgtaacttattttgccttttttagatgtactgtttttagtatatagtgtatttagatacaatgtataaccagttgtataataaaaactagttaagtgtccgtacgtcgctacgacacata

SEQ ID NO: 83241 - DNA, 8059 bp, Zea Mays
gtactgtcttctccttccctcgccccttccctccactcgcgatctcgcgccctgccctcccctcggctccctccgcctctcggacagagggtgagagggtattctaacagcccccatatacaccccaccggcgccggaacctacgacgtcgcaatgccgctccagttagagatcaagaggaagctcgcgcagaggtcggagagggtcaagtccgtggacctgcatcccacggaaccatggatcatgtcaagtctttattctggcagtgtctgcatctggaactaccagactcagacaatggtgaaatcttttgaagtcagtgagttaccagttcgttcggctaaatttattgcacagaagcaatgggttgttgctggtgccgatgacatgttcatccgtgtgtataactataataccatggataaggtcaagttgttcgaagctcatactgattacatcaggtgtgtggctgttcatccgaccctgccatatgtgttgtcatcatcagatgacatgcttataaagctttgggactgggataagggttggatgtgtactcaaatttttgagggccactctcactatgtcatgcaagtcacatttaaccccaaagacacaaatacttttgctagtgcttctcttgatcgtactgtaaagatttggagtcttggttcccctgatcctaatttcacattggatggtcattcaaaaggtgtcaattgtgttgattacttcactggtggtgaccggccatatctaattacaggctctgatgaccaaactgcaaaggtttgggattatcaaacaaagagctgtgttcaaacacttgaaggacatgcacataatgtctctgctgtatgtttccatcctgagcttccaataataatgacaggttcagaggatggaactgttcgcctatggcactccactacttacaggcttgagaatacacttaactatggccttgaacgagtttgggcattaggttacatgaagggctcacgaagagtcgtgattggatatgacgaaggaacaataatgattaagattgggcgtgaagcacctgttgctagtatggatagcagtggtaaaatcatatgggccaaacataacgaagttcaaactgtcaatatcaaggcagttggtgcggatgctgagattgcagatggagaacgtctgccattggctgtgaaggagctaggaagttgcgacctttacccacaaagtttacggcacaatccaaatgggaggtttgttgctgtatgtggagatggagagtacattatctacacagcgctagcatggagaaatagatcctttgggtctgctcttgaaattgtttggtcaactgaaggagagtatgctgcaagggaaagcacatcaaaaataaagatctacagtaaaaactttcaggagaggaaaagtataagaccagcattctctggagaacgtatatatgggggagtattgcttgctatatgtacaaatgatttcatttgtttttatgactgggcagagtgcaggttgatacgtcgaattgacgtgaatgtaaaaaatgtatattgggctgacagtggtgatttggtgacaatagcaagcgattcgtcattctacattttgaagtacaatagggatctagtttcttctcatctagatggaggggcatcagttggcgaggaaggtgttgaagatgcctttgaattgcttcatgagataaatgaacgtgtccgtactgggttatgggtcggagactgttttatatacaataattcttcatggcgcctgaactactgcgttggaggagaggttactacaatgtttcacttggatcggcctatgtatttattaggatatcttgctaaccaaagtcgtgtatatcttattgacaaggaatttaatgtggtgggttatactttactactcagtttgattgagtacaaaacacttgtgatgcgtggggatttggaacatgcgaatattattttaccatccataccaaaggaacaacacaacagtgtggcacatttccttgaatcacgtggcatgttggaggaagcccttgatatagccactgaccctaattacagatttgatctggctgtgcagcttggaagcctcgaagttgcaaaggcatagtgcaattatagtattatgggcctgtttgtttcggtttctagcagcttctggccaccaaaagctgctgcggactaccaaacgttcagcttttcagtcagcttctataaaattcgttggagcaaaaatcatctaaaatcaacataaacacataatggttgagtcggtgtaatagtaggaatccgtcactttctaaatcctgagccctatgaacaattttatcttcctccacacgtaatcgtaatgatactcagattctccccacatccagattctccccacagctagatttttaaaaaagctggtcagaaaaaagctgaaccaaacaagccctataccacttatctctcaactgtttaggacacatcgtccaagaaattctccttaagcgcaccgccgcaccctgaattctagttgctttgcaggaaattgctattgaggcacatagtgaatcaaagtggaagcagttgggggaactcgctatgtccactggaaaggtatttgtgtcaatttttttttttctgaaatgcgcaggagaactgcacaactttgtattaagcagagaattaaagcggagagaactccaatacaccacacacacccacactagaaactaacttgtgatcaccggctaacaggaaaaaacacgatcaacagagctgttttaagccagcagctcttcgaccttgagcaaagacagggccttggctccagccaaggaccaaagcaccgtctcttccttacaccctaagggttgtgaccaagctaggattacattcatcaaagacacatctatgcctatgtttccatatggtccaagcacctagaattactaaggaattgaagcccttcctcatttgatcagttgtccgagagctgctagtccttcaccacgactggaaggaatcctcgtgagtgggacacaactcctgcatccccactgtcaaattttcatgcatgcacaaatcacagatgtgcttcacttgatatgttttttccctaaattactagtatatctatctctgacatttgtactagttacaatttacttagtaattgggatggttagcttgcagtcttaatgacatttctcaattttacaaatcttgagtcttctatcataattttccattagattgagctttctgcttcctccttgtcatgtatttgccctgcgtttctggaggaccattctgcttttccaaccggacacaaggagcttgggctgaaaaacttcattagcaaagtcagtagagttacaacagagcttcttccaacaccaaaatctaaccagaaggccccgaccacacagtccgtcaatgcccagcaggcgtattgcaggaattggagtggaatacagcatgcaatattggaacaaacgatcagtcagaacagccatgagagccttgcgcatcatcaatgaagctgaagaagttagtcaggaagcctgaatgaatatgccatgctattcaaacgccccttgacgcaaacccaggtggaggcccttgcagctctattcggctggtctactccagtggacttagagtcccagtagcccccccccctcgggtgtgttttttttgttgataatccttgttcatggatccttccaaaattctagtctggaatgtaaggggtcttaactcctcggttaggcaatatgcgatgagggatgttgtaaactctactcaagtggatgtgctctgttgccaggaaacaaaaatgcaacatattttccagaggaattatactctctatgttgggaacagagtttactgaatttatttatctgtcttctgtggggtctagtggtggcatctttgttgcttggaaaagacatgttgggcacataggattacagagagtggataaccactgtgtttctattcagttctgcagagaagaaggtcaaccttggtggttaacctgtgtgtatggccctcagggggattttgataaagttcttttcctccaagaattaagggatgttaaggctgcttgttctggcccttgggtggtggcaggagacttcaacctgatctatagaagctctgataaaaataactccaatctgaatagggccatgatgggtcgttttaggacagtgatcaatgatctcgctctcaaagaaattcagctccatggctgcaaattcacttggtctaaccgtctaaccaacaggacaaccctgtgctggttaagttggacagggtcttttgctcagttttgtgggaatccatcttccccaatgtggttctccaaagtacagcctctcatgattcagaccactgcccattgatccttggcctcaaagaataacctgtggaaaaaagaggtttgactttgaatctttctggaccaagttagaaggctttcatgaatcatgatactgttcaggctgcttggattttagtggaaccttccagatatccttttctgaccttggaaagaaaactaaaggagagtgataaaaaagtgtgacacgtgacctcccagttatatctggcaaaagagctactaagagctactgcataaattagaaatagctcaagatcatagggtattttcaccggctgagttatggctcaagaataagctcaagaagcattccctgccgctggcctccttcaaaagaataatggcaagattgagatcgagaattttgtggttgaaggagggggatgcaaataccaaattctttcacatgcatgctaggcatcgaaaaagaaagaatctggtggtcaggctaagggatgatgagtgtatccttatcaatcatgctgaaaaagcagctctggtggatcagttcttctctaatctcattggtcggtctgaagacagaaatagatccattgatcttggggctcttggtttgccaacacataaccttgctgatttggactcaccttttacagaacaggaagtgtggggaaccatcaggactcaggagtctacctgcaaggccccagggacagatgggttcactggaagattctataaagtgtgttggaacttggaacattatcaaggaagatgtgctaaatgcaatgtctgcaatttggagcagaaattttgcaaaccttcacagactcaatacagcatacatcacaatggtgccaaagagagagggggctaaccaggttacagatttcagaccaataagtgtagtgcacagctttgcaaagttagtcaccaaggtccttgctaacaggctggctaaaagattaaatggtatggtctctccaatccaaagcacattcattcaagtaaggtttatacaggataacttcatgctagtgcagcagacttcaagactgctacatcaacaaaatttggcaactcttttgtttaaattagacataacaaaagcttttgattctgtgtcttggccattcttgattgaggtaatgcaacaaatgggttttggacaactttggagagatcatttgtgggcttcttggctcttccaccacacaagtgcttctcaatggatgtccaggaaaaaggatacaacacagaagagggcttagacaggggatcccctttccccaatattgttcattcttgcaatggatgttctgggtcttctttcctccaaaactgaagatgctggatttctgcagcagttgtccagaaaaagaagctacacagaatctctatttatgccgatgatgtggccttattcctgcacccctctgttgctgatatctccaccactcttgatattctctacctttttggggatgcctctggtctgcacaacaacacccagaaatcaaatgtttatcctatcagatgctctgaagagatcattgtggaggtccaaaataggttgccttgtgcaattgcttcctttccctgcaaatacttgggccttcctctatccttgcacaaattatccaaacaacagttctttcctctggtggaaaagattgcagatcgtctcccaagctggaaggctgatttgatgaatagggctagcagaaaagtgcttgtgcaacatgttctttctggaatgacagtctttgctgcaatggcgatcgactttccccattgggctatttgaagccattgataaaataagaaaatgtttcttgtagagaggtagaaaagaagcaaaaggggggcattgtctagtcgcttggaacaaggtgtgcaaacccttgcacttggggggtctggggatttctagcttacaagacctctgctgggctcttcgcatgcaatggttatggctggagaaaactgatcctaccaggcattgagcagagctcccaattcaagtccctagtaaagccaaatccttcttctctgcagtcttgatcactgagattggtaatggatccaacactttgttctagatagatagatggataaatggtaaaagagtctcagatattgctctaagactgtttgccataatcccaaaaagaataatatacaggagaattgtgcaagaggccttgctaaacagaaggtggatttcaaatataaagggtgctctgactatgggagccctgatagactatctacatctttgggattctctttctggcctgagtctgcagccgaacatggaggatagacacatttttaccagggcatcggatggcaaatactcagcaaaatctgcttataatggcctcttcttaggctcaagctcctttggtcatcacaaaaggatttggagatcttgggccccctccaaatgccggttctttatgtgcatggtggcttagaatagatgttggactgcaacactgacaaaaagaggcttgaatcatcctgctagctgtcctctctgtgaccaagaactggaaaccatcaaccacctgctggtgtcctatgttttcacaagaggcttctggtacaccatgctaagaaaatttggtcttcgcagtctaggccctcagccggatgctacatctactggtggaagaaatattcagacattgtttctggattagttaagggtctggattgcctcatcatcttgggtgcctggatggtttggaagcatcggaatagggtggtgtttgatggagccactccagacctcacccttctcctcagatctgctgaggaggaaaggcaaaaatggcaattggccggtgccaaagggctttccttcttggcggtgcctccctctaatgtttaggagaggtgttggtgtgttgtttgtatgcctgtttctttagtgtccagatggatagttatttgtatgcctgtttctggcctccataagggaaaggtcttgtattttgggtcttctatagacctcttgttttctcttctaatataattaaaaggagtagctctcctactcttttcgagaaaaaaagtgatatgtaagcagctcccttgcatatttgagataaacagctcgagatggcagaagaatgtcttcttcaagctacagactttagtgggttattgcttctatattcatcacttggagatgctgaagggataacaaaactggcatccatgtctaaagaactaggaaagaacaatgttgctttcctttgcttgtttatgttaggcaaattggaagaatgtcttcaattgttggttgatagtaatcgtattccagaagcagcactgatggcacgatcttaccttccaagcaaagtttctgatattgtctcaatatggaaaaaggacctccaaaagaatctctggcagatcctgctgagtacccaaacctgttcgaggactggcagattgctctgaatgtagaagctactgttgctcccaagaggggtgtctacccacctgctgaggagtacatgacttatgcggagaggtctaatgacagccttgtggaagttttcaaaagtatgaatgtggaagaagtaccaagtgataatggagatcctgttcatgaggaacagctgggatcagctcagaaacatatgctatattt

SEQ ID NO: 83242 - DNA, 592 bp, Zea Mays
gtcaagcagcagctgctagagcaaacctaagagccaagcggcagcagccagctaataattaagcagccaaattaagtgcgacgatggcgtcgtccatcgccagaaccgcatgtctcctcgtgctcacactgttcgtcgtctccgcggcgatcatcttgcccagctccctgtgccatggagcccgcggcgtcggtatcggcggcggcgctttggaccctgaccgtccagcgtgcgtcggggtcggggcatgcccagttcgtgggcgcccctttcctatcgtcaaaccgtcccccccatccaacggaggggacccacatcactgatgcctgcctcggatcacgcgccctccgtcgtatcggtctgtctacgatggaacgatgcaccgtgcacgagcacgactgcatgctactagctactagctatctcgtgtacctgtacagtcgtcgtgcttatgtacgtacgtatggtcaattaataaaactggagtgggatgatgatggtgagaatttcttgtactggatgatgacatgcatatgtcgttggttcatatagacgaccacttgcaaaataaatgaatatatggtgatatggg

SEQ ID NO: 83243 - DNA, 535 bp, Zea Mays
aagcaagcagcacagcagctatagatagcgcgcgctcatcaccaaagccgagagccaagcagccagctaattaagcagccaaattcagtgcgatggcgtcgtccgtcaccagaaccgcatgtctcctcgtgctcacactgttcgtcgtctccgcggcggtgatcttgcccacctccctgtgccatggagcccgtggcgtcgggttacgtatcggtttggaccctaaccatcctgcgtgcatcggggcatgctcagttcctgggggctcctacactcaccttcccccctatcgcggtggcggccctgtgaaaccgcttcccccaccgaacggagggaacccgtgacgccgcctgcctcccatcacgcgcgctctacgatggaacgatgcaccacgcacaactgtatcttagctgtgcttgtatagtactccctccgtttctttttatttgtcgcttgcactatccagcgacaaataaaaagaaacggagagagtatatgatgatcaataaaactggagtagtactggaatggtgag

SEQ ID NO: 83244 - DNA, 422 bp, Zea Mays
ccattattatcaacaacaacctccgctgcctggatcaagaacccgccgcgggaaccggaaaaggcgaaggcttttttttttgggtcacccacctcaagccgagagcgcggccgcccggcacgccggagacggtcacggcatgcgcgcgcggtcgcttgctactgggaagagctagcaaggaggagcagtgcgcgatggtcggcgaggcatgtggtgtgccgggtgcggaggtggtgtgtgtgcgtgagtggcagtggtggccgcgggctcgctcgctttcagcagctgtcgttgcttgtgtgtgccgcagccgcacccaacaagcatatggagggcgtgactgccgtttctctccagctccgtcttcctcacttcagttttagtacgcttacgcctgagcttggccagcgaggagagaagac

SEQ ID NO: 83245 - DNA, 542 bp, Zea Mays
ctgcccccatacccgtctcgcctacaaatagcgcatccttcggcctcgtccactcgtgccctttttccgccgccgctactccacaccacccattgcgtcgccgcatcccacgaggagacaaatcaccgccgtcacggatagccatctgcagtggggttcggcccccatcgtggccacccgagtctcaggctgattgcatagaagccgtgggagagagtaatcgaaagggacctagctaagtccatgggaatccttcgccggagttgggatttccatcgcgctcgcgccccaccgtgaacagcccgtgcgtgactttgtgtttgacgggcaagtgactgaggaggagctcgttgaaggagaagaacatgtggcgcaagaggaggtctacggcgaagagtataagcttatctaggtggcgtctcccagtcagctttatggtgccaaggaataatttttagtccattttattgctatcatttatttatgtaagactcttccgccatgtaataatgatatttatgacatttatgtctatacacttg

SEQ ID NO: 83246 - DNA, 509 bp, Zea Mays
ctgcccccatacccgtctcgcctacaaatagcgcatccttcggcctcgtccactcgtgccctttttccgccgccgctactccacaccacccattgcgtcgccgcatcccacgaggagacaaatcaccgccgtcacggatagccatctgcagtggggttcggcccccatcgtggccacccgagtctcaggctgattgcatagaagccgtgggagagagtaatcgaaagggacctagctaagtccatgggaatccttcgccggagttgggatttccatcgcgctcgcgccccaccgtgaacagcccgtgcgtgactttgtgtttggagaagaacatgtggcgcaagaggaggtctacggcgaagagtataagcttatctaggtggcgtctcccagtcagctttatggtgccaaggaataatttttagtccattttattgctatcatttatttatgtaagactcttccgccatgtaataatgatatttatgacatttatgtctatacacttg

SEQ ID NO: 83247 - DNA, 1353 bp, Zea Mays
gagtcggagaccccaaacctctgtcgaaagtttcacctccggtcgctggtttcctccaatctccgtggtagttcagcgcgagcgggcggcggggtttgagctcgatggtcacttccggcgaacaatcggctggcggcgggtctgcggcgagggcgtcgaagctgcggtacccgctgcggtcggcgagcaaggggaaggcggcggtcgtttccccggcggctgatgctcctcccaccatctctgctccgcgacgggcaaaaccatcttcagatgtcagcaagagcatgtgtttagacctttctgtgaaggataattctgccaaacccccacggaggcactcaatacaaaccaagccaggagctagcccaaggccaacaccttctggaactgtgactccggtgtctggggttcggtcaaagaggtcggaaagccaggggaggtttgataccccgacatcagaagtgtccatgtccatctcaaggcgcaagttcagcacgctttcttcaatctcgtactggatgacacagatcaggctggcagaggctgcttccaagcactcggtttctctgggcttctttaagcttgctcttgaatcagaatgtgagcctttggaccggatgagggaagaactcaagtcctacgtagcacggcatggcctggcgacagaattggaggacccagttaaggacattctccaggtttatgatattttggatgattttgagaagctgaagatctctgcagagccctcacagcaaccaaaaaagtctgacaaggctgctcgtactgccacaaatgcgtcaccgaatggtaacctgaagccaaggtcactgaactctgatgctactgaaagcaaggaagctgtaaagaaagagagcattcagaaagtaaatcctggtgcaaggatcagaggctcctgtaacaggaatccagtcaaaaacaccaccgcaaaggaagcagttgccaagaacaccgctgatgttgtgaaggagatcacccatgaagataaagagaacatgggcgatattgaaatggcagtggatgttgccgtagcccaagatatctagaacagccggaccaacttcagattcgatccccttttttttctatcgctgaagatgaagtgttagcgtgtggttgcttattttggttttcaattgttaatatgttattagtagagcttgtctgtgtgattgctgtctggctggaccttgaacggtcttcaagagcgtgtcataagttgatgattgctttcattcctctgtcaagtttgcggctttgcatgtgctaatccgtgcaactgaatatagttgaatttatctattctcgtggttcctccgggcacaagatcct

SEQ ID NO: 83248 - DNA, 895 bp, Zea Mays
caacgactttgggtcacggaacgtggcatcgtctccatttcttatgactatggcacaaacaagtccatctagatgcagagttccggaacactgggctggagagatcagaggcactcaaaaaggatctggaatggttcaggcaacagggccacacaattccagaaccatcgccccctggcaccacatacgctactctactggaagaactgtctgagaaggacccccaggcatttatctgccatttctataacgtctactttgctcatactgctggaggccaaatgattggcaaaaaggtttctgagaagattctggacaagaaagagctggagttctacaagtgggagggcaatctctcccagctgctgcagaacgtccgcaacaagcttaaccaagtcgcttcaagctggtctcgggaggagaaggatcactgcctggaggagacggagaagtcgttcgcctactcaggaggcctcctccgccacatattcacctgacttaacactgttggctgatccagtttcaaatgctgtacatacataacctttgactgttaaaactttattactggtgagggggatctccctcccccagatacgttttacctgcaaccaagttgccaagtgttgaataaacctccctgcattgctggtgttgggtaaatgctgagcgatgccgctgactgtgaaggtatatgttttctgtaatggaatcggatggcacagcaccatgcccctagacctggacaccggtggatggcgctgccacaacacacggctgccgttgagatgcgatgcagtggatagccgtaggtcgtttcatgaccactagaatcggccgttccagtactgcactattgctaatggcaaagaggagcccttttattataaaattg

SEQ ID NO: 83249 - DNA, 1646 bp, Zea Mays
ctcgtttccgcgtcttcggtccctcctccctcccgcgcacgccgcacgccactccgcactgtcggcgctcaaacacagcgctccaatggctgccaccgatgcctttcccccgctggctataagagcgggccacagctctcaccgccacatgccacccgcattgctctcaacctcggtcaacgatcgtgcctcgtgaatttgctctccgatctgaagcagtagtacactactaacctggcctgtccctgcccgtgtggtgttgttgatcgtgttccatccatccagcactttggcaccatggcgcccgcatggctctccgttcccagcgccgccctctccctcctcgacggccagcgtccccgcgagtgggagtggcttccgctccgaaccgcctgcccgagcggtggccgtcgtgtgcgtgtgccgtgccgccggcccaggacgaccgggttttctgtcgcggcgcagaggaggctggtcgtggcggcggcggcgatggagatgacccctgccgcgggagaaaaggaggcggacgccccgttcaccgaggagatgcgggcggcggccatgcggctgcactccagggaccaggccagggacggcaagaaggaggcgcccctggagccgcccgtcgccaagtggcagaccaccgtcgaggggtacctccgcttcctcgtcgacagcaagctcgtcttccagacgctcgaggccatcgtcgaccgcgccgtcgttccctggtatgccgagttcagggatactggtttagtggtttggagagatcggagccgctcggcagggatctggaatggttcaggcagcaaggtcacgcagttccggaaccatctgctcctggcattgcgtacgcttcctttctggtagagctgtctgagaagaaccccccggcgtttgtttgccatttctacaacgtgtacttcgctcatgctgccggaggccgaatcatcggcaaaaaggttgctgagaagctcagtctgcagaaagagctagagttctacgaatgggagggcgatctgtcgcagctgcagcggaatgtccggtcgaggcttaaccgagtcgcttccggttggtctcgagtagagaaggaccgctgcctgggcgagatggagaaggcgtttacctgttcagttgacctccgccgccatatgtttccctgctgatctaaagttcgttcgttgcctgatgcgatgcgaccataaacgttgtctgtcagtttctgtttacgtgtccactagatccactggatccatgtttagttactattgtccaagatatttactccctccgtttcgttttagttgtcgctggatagtgcaaaattgcactgtccagcgacaactaaaacgaaacggagggaatagtattcagccacccaaatcaccaccattcggcttatttagagctagtttggaaatcacattttttgtgagagattttcatttcccaagggaaaataaactaattttctttcgaaaaatggaaatctcttagaaaaatggattttccaaactagtcttaagtagtagtacaaaaatttacaacgtcttcttttatctaggtcaaggaacggattgacatgattacatgtacggttaaaagtgcagactgcagaggactcactacagtaaaat

SEQ ID NO: 83250 - DNA, 5813 bp, Zea Mays
cacccccacccggccccggcccccgggtccctgtcttccccgtctccgcttccgtccacctcacgtcggcgtcttccatcgaagtggccttttcggcggcgagtgagagggcgaggaataaaactcgcgtcgcgcacgcaccgcaacaataatatccttccacgcgaatattcgccgcttcccacctcccccgccccgcatatccttccgtccgtccgttcgtctcccccctttcccttcccctctatttcaccaccccatcagccgcccgccaccgcgacgatcaccggcgcaatccgttcaccccaccactcatccactccccctccgcgaatctcatttctttactgcggctaggaggaggcggcggcggcgatgaagttcggcaagagcctgagcggacagatcgtggagacgctcccggagtggcgcgacaagttcctgtcctacaaggatctcaagaagcgcctcaagctcatcggcgccgggaacggggctgagcggcagccgaagcgggcccgccgcgacgactccggggaggctgacgcggccgcggccgcggcggcaatgacgccagaggaggcggagttcatgcagctcctggaggctgagctcgacaaattcaactcttttttcgtcgagaaagaggaggagtacatcatccgtcagaaggagctgcaggaccgggtggccagggcggccgggcgggagtccaaggaggagctcatgcgggtgcgcaaggagattgtcgacttccacggcgagatggtgctgctggagaactacagcgccctcaactacacagtagctagtagcaacttagcctggactgtggctgtgaattagggatgaagcctctagattcctggggctaacaatcagtgtttgccatagctaacatgggtcaaataaagagacgaattgctgtgttgcttgtcagcaagggacaatacatgtcagtgtcgttgagtatgcatactagtgactgagttgaaatagcaagagtccatttattctcgctattaacaaaggaatgttgctaaaaattaatctatgccgagaaattgtggcctgcggtaattgcgttgatttctcgcgagaaattagctatatctcgtacatgagtgcaagtacatcttttagtttggatgcatctagattctcggaacactcgtggcgaaagaacggttactaaaaaaacagtttggtgataccattcttgatagtaaagaaacgaaagaaaaacagggctctcttttttgtagtcaaccatacagtcgcacatctgacatgtttaagagttaacatgttatacagagcactttgctcagattgaggttaactatggatgttatcttggactatggtgtattcctcattttttgttagattagtaagacaaaaaaaactccatgctgttagactatgtgtgtgtgagtgtgtgtgggtcggcaccattgttgggctgccggcccattagggttagggttcctgtgtctctatatattgtaaccccatctattatcaatacaacagttcatcttcctacatggtatcagattagggtttctcctacctcccactgcagcagccggcggctccttcctcccgcaacagccaccggccgcctccaacctctacagtcgtcgccccgggaggctcatccctcatccctccctcccggggcggctcccttcccagccgccggccatccctccagccgctcctccccatctctcggcagcggccggcgctcagatccgccgccccgcagcaccctcccgcgccggcagcaaccacgacgccggcagcaaccacgacgagcggccccggcgcgggcgcgcgttcccctgcgcggggcggccacggcgagcggccccggcgcgggcgcacgattaccctgcgcggggcggccacggcgcgggctggctcgacggcggccatggcgcacgcggccagcggcctcacggcctctcgtcggcgctctcctctctcactcctcttctctctctccctgccttccctgccttcccttgctcctgcgcgcagccgccagggaccgagcccgacgcgcccagagcgctctctcgtcggcgctctcctctctcactcctcttctctctctccctgccttcccttgctcctgcgcgcagccgccagggaccgagcccgacgcgcccagggcgcagccgcgccaggacgccgcgccaggacgccgcgccaggacgccgccccttccctgcagcccggcgtcgtggccgcccctcccctctgcccaccaccgcctgctccctctccactgcgtcctccgccggcaccctcgcccgtgacgcctctcatcgtgtggcctcctcctaactgctcgcgttgatgcccagcagcgcctcacccttcaagcttctcccggcgccggcgccgtcatcgtccctagccaggtccggcgcaggcccctgcctggttggaaccgccccgtcgccctccccttcctcgccttcgttggatccgtcgctgccgcggccttcccggccggatccacgttgctgcgtccttctcagctcgatctgccgtccctttggctggatcgcgtctccccgtccggatccgtcgctgccgtggccttcccggccggatccgacattccccttcttttctgccgcgggcgcggacaccttgaccagcgcagccgcgtgcgctgctgtcggcctctctggcggggctccttaacgtctggtcgatcgaagaagcaggaaggtcggcctgtcggtgcccttttgctgtgtcgccctgccgatcgttgacgctcgaacgtcgacccctcccgaagatcaggcttttgctgcgcgtcttccgaccgcgaccacctcgacttcggctacctcggcatctaggggctatcgtcttcttggagcacacaccgttctctactccagccgcaacattcgcaccatcacgacgctgcgactgcggggggatttcaacccgtcggctcctaccttcggcctctactccagtctcatcgtgtgtggtgcccccgttgcgactgcggggggatgttagactatgtgtgagtgtgtgtgtgtgggtcggcaccattgttgggctgccggcccattagggttagggttcctgtgtctctatatattgtaaccccatctattatcaatacaacactttacattcctacacatgccgttttgctttattgttaagtgcccaggtgtcatctgtgccgttataatactgtatttaatctcagaagaatactgtcttcagtatgctatgaattaattcttgttgtttactgtcaagatatttttttctgcaccatcttaggattcactgtcataatggggtttgttttagacagtaagatcttgcagtaactttcctgttctgttttgactcatggtttcatgaatatacactatctaaaccttttttttggccacttagaattggtgctatgttggcaatttgaatttttgtggaatttgttcattttaagtgttctagttttttttaactaaatagataggtatttaaaagtaggcaacaactaatatgcaatcatgcgttatatgcaagtgtgcaagcaagtctcttggtctattagatagattatgatccaactatagacataatcgtggtttgttaggggggtttctataaatctacacgagctgctgatggtggaagggtttaactgtgaaatgtgatatatggttggatcatcatctaatggaccaaaagccttgcttgtacgcttgcacataagaactgattgcgtattagttgttacaactaatatgcaatcaggccttatttgcaagcgtgcaagcgagtctcttggtccattagattatgatccaactgtagacataatcgtggtttgttagggtttggctgaattgtgggatgctggcttgctttgaggacaatgctagcttgcacatgggcttatgcacgggatcaagcagggacaattgtactatggaggcctggataaagggttgtgcaagaagccaattagactcgtagtgttcaagcatgcacttagaaccagttgtttgagtcactcttatctttgatcagctgacttgtctagtttattaaattgcatctgaatttaaactcatgaagtttatttggctttcaaattgacacactgtgacattgaaggcacaacttttgaggttcttattttgtggactataaaaaactgatttaatcttgcaagctgtttaatacaaaccttatacttatcactttctttctagttgtgggatagctgtgcttgaatgttgtaccatttgtgttttgtaattacatgactcatggtggatgtgagatggcaataagatatgattatctcagccaagcttgtagtgggtgatttcgtcttgaacgtaattagtgcgtatacccctaagcagggcatggtgagagtgctaagagacttctaggaagacttagatggcatggttaaaactatacctattagcgtgaagcttttcataagagacctcaatgggcatgcatgtgcaacaagtgtaggttttgagacggttcatggaggttttgggtatggtagtggtagtaggaatcgggagggagaggtcttgaactttgcagtagcttttgacaatagctaacactttagaatcccatttagtgacctatacctatagtagcggccaacattttagtcagattaactttcgcctcacaagaagaggttttgagacggttcatggaatttttgggtatggtagtggtagtagcaattgggagggagaggtcttgaactttgcagtagcttttgacagtagtcaacactttagaaagagagaatcccatttagtgacctatacctatagtagcagccaacattctagttagattaactttgtcctcacaagaagaggacaaacaagcatgtttggattgcaaggtgatatttggggagtgagttgcctctcaacataagattgtggtgacggtgtttcgttcagctgcattcccgtaaggataaacaaaccaaaattgagagaataaagtggtggaagctgaaagggggaggcactagaagtcatcaatggccatcaaagatggcattttaaagatgacgcaaacaacatatgagagaagatggcaacctacattcggaaggtggcccttagagttgtgtggagcaaccaaagggagtggagacgaagataaagatacttgtggttgaatatgtaagtccaaatggctattaaaaaaagaaaaaaatggtagacatttatatcatgacgggtgtgtggacaacatagagaagtacaagttagtaaagaagaccacacaacgagctgtaatgtgcaaatggtagggtgtaccagaatctttaccatcgtttgagtacgaaggaaggatggaatgacatacataggattgaccaggatccttgagaggaatacaagggatttcaatcaagttaagtgcattaaggatgaaactgagcaccccttggtgaaggaggatgacatcaggcatagatggtgagagtattttgacaaattgttcaatgagaagaatcgggacacaacctttcagttggataaaaggttgaatgactcttttgatgataccattaggcggtttgtgcataagatccaaaaaattgaggttagagaggcattgaaaaggatgaaagggggctctggtggtatcccaattgagccatggagatgcctcggggacatagctatagtatggctaactaagttgttcaaccatatcttctagtcgaacatgatgcttgactagtgaag

SEQ ID NO: 83251 - DNA, 5810 bp, Zea Mays
cacccccacccggccccggcccccgggtccctgtcttccccgtctccgcttccgtccacctcacgtcggcgtcttccatcgaagtggccttttcggcggcgagtgagagggcgaggaataaaactcgcgtcgcgcacgcaccgcaacaataatatccttccacgcgaatattcgccgcttcccacctcccccgccccgcatatccttccgtccgtccgttcgtctcccccctttcccttcccctctatttcaccaccccatcagccgcccgccaccgcgacgatcaccggcgcaatccgttcaccccaccactcatccactccccctccgcgaatctcatttctttactgcggctaggaggaggcggcggcggcgatgaagttcggcaagagcctgagcggacagatcgtggagacgctcccggagtggcgcgacaagttcctgtcctacaaggatctcaagaagcgcctcaagctcatcggcgccgggaacggggctgagcggcagccgaagcgggcccgccgcgacgactccggggaggctgacgcggccgcggccgcggcggcaatgacgccagaggaggcggagttcatgcagctcctggaggctgagctcgacaaattcaactcttttttcgtcgagaaagaggaggagtacatcatccgtcagaaggagctgcaggaccgggtggccagggcggccgggcgggagtccaaggaggagctcatgcgggtgcgcaaggagattgtcgacttccacggcgagatggtgctgctggagaactacagcgccctcaactacacagctagtagcaacttagcctggactgtggctgtgaattagggatgaagcctctagattcctggggctaacaatcagtgtttgccatagctaacatgggtcaaataaagagacgaattgctgtgttgcttgtcagcaagggacaatacatgtcagtgtcgttgagtatgcatactagtgactgagttgaaatagcaagagtccatttattctcgctattaacaaaggaatgttgctaaaaattaatctatgccgagaaattgtggcctgcggtaattgcgttgatttctcgcgagaaattagctatatctcgtacatgagtgcaagtacatcttttagtttggatgcatctagattctcggaacactcgtggcgaaagaacggttactaaaaaaacagtttggtgataccattcttgatagtaaagaaacgaaagaaaaacagggctctcttttttgtagtcaaccatacagtcgcacatctgacatgtttaagagttaacatgttatacagagcactttgctcagattgaggttaactatggatgttatcttggactatggtgtattcctcattttttgttagattagtaagacaaaaaaaactccatgctgttagactatgtgtgtgtgagtgtgtgtgggtcggcaccattgttgggctgccggcccattagggttagggttcctgtgtctctatatattgtaaccccatctattatcaatacaacagttcatcttcctacatggtatcagattagggtttctcctacctcccactgcagcagccggcggctccttcctcccgcaacagccaccggccgcctccaacctctacagtcgtcgccccgggaggctcatccctcatccctccctcccggggcggctcccttcccagccgccggccatccctccagccgctcctccccatctctcggcagcggccggcgctcagatccgccgccccgcagcaccctcccgcgccggcagcaaccacgacgccggcagcaaccacgacgagcggccccggcgcgggcgcgcgttcccctgcgcggggcggccacggcgagcggccccggcgcgggcgcacgattaccctgcgcggggcggccacggcgcgggctggctcgacggcggccatggcgcacgcggccagcggcctcacggcctctcgtcggcgctctcctctctcactcctcttctctctctccctgccttccctgccttcccttgctcctgcgcgcagccgccagggaccgagcccgacgcgcccagagcgctctctcgtcggcgctctcctctctcactcctcttctctctctccctgccttcccttgctcctgcgcgcagccgccagggaccgagcccgacgcgcccagggcgcagccgcgccaggacgccgcgccaggacgccgcgccaggacgccgccccttccctgcagcccggcgtcgtggccgcccctcccctctgcccaccaccgcctgctccctctccactgcgtcctccgccggcaccctcgcccgtgacgcctctcatcgtgtggcctcctcctaactgctcgcgttgatgcccagcagcgcctcacccttcaagcttctcccggcgccggcgccgtcatcgtccctagccaggtccggcgcaggcccctgcctggttggaaccgccccgtcgccctccccttcctcgccttcgttggatccgtcgctgccgcggccttcccggccggatccacgttgctgcgtccttctcagctcgatctgccgtccctttggctggatcgcgtctccccgtccggatccgtcgctgccgtggccttcccggccggatccgacattccccttcttttctgccgcgggcgcggacaccttgaccagcgcagccgcgtgcgctgctgtcggcctctctggcggggctccttaacgtctggtcgatcgaagaagcaggaaggtcggcctgtcggtgcccttttgctgtgtcgccctgccgatcgttgacgctcgaacgtcgacccctcccgaagatcaggcttttgctgcgcgtcttccgaccgcgaccacctcgacttcggctacctcggcatctaggggctatcgtcttcttggagcacacaccgttctctactccagccgcaacattcgcaccatcacgacgctgcgactgcggggggatttcaacccgtcggctcctaccttcggcctctactccagtctcatcgtgtgtggtgcccccgttgcgactgcggggggatgttagactatgtgtgagtgtgtgtgtgtgggtcggcaccattgttgggctgccggcccattagggttagggttcctgtgtctctatatattgtaaccccatctattatcaatacaacactttacattcctacacatgccgttttgctttattgttaagtgcccaggtgtcatctgtgccgttataatactgtatttaatctcagaagaatactgtcttcagtatgctatgaattaattcttgttgtttactgtcaagatatttttttctgcaccatcttaggattcactgtcataatggggtttgttttagacagtaagatcttgcagtaactttcctgttctgttttgactcatggtttcatgaatatacactatctaaaccttttttttggccacttagaattggtgctatgttggcaatttgaatttttgtggaatttgttcattttaagtgttctagttttttttaactaaatagataggtatttaaaagtaggcaacaactaatatgcaatcatgcgttatatgcaagtgtgcaagcaagtctcttggtctattagatagattatgatccaactatagacataatcgtggtttgttaggggggtttctataaatctacacgagctgctgatggtggaagggtttaactgtgaaatgtgatatatggttggatcatcatctaatggaccaaaagccttgcttgtacgcttgcacataagaactgattgcgtattagttgttacaactaatatgcaatcaggccttatttgcaagcgtgcaagcgagtctcttggtccattagattatgatccaactgtagacataatcgtggtttgttagggtttggctgaattgtgggatgctggcttgctttgaggacaatgctagcttgcacatgggcttatgcacgggatcaagcagggacaattgtactatggaggcctggataaagggttgtgcaagaagccaattagactcgtagtgttcaagcatgcacttagaaccagttgtttgagtcactcttatctttgatcagctgacttgtctagtttattaaattgcatctgaatttaaactcatgaagtttatttggctttcaaattgacacactgtgacattgaaggcacaacttttgaggttcttattttgtggactataaaaaactgatttaatcttgcaagctgtttaatacaaaccttatacttatcactttctttctagttgtgggatagctgtgcttgaatgttgtaccatttgtgttttgtaattacatgactcatggtggatgtgagatggcaataagatatgattatctcagccaagcttgtagtgggtgatttcgtcttgaacgtaattagtgcgtatacccctaagcagggcatggtgagagtgctaagagacttctaggaagacttagatggcatggttaaaactatacctattagcgtgaagcttttcataagagacctcaatgggcatgcatgtgcaacaagtgtaggttttgagacggttcatggaggttttgggtatggtagtggtagtaggaatcgggagggagaggtcttgaactttgcagtagcttttgacaatagctaacactttagaatcccatttagtgacctatacctatagtagcggccaacattttagtcagattaactttcgcctcacaagaagaggttttgagacggttcatggaatttttgggtatggtagtggtagtagcaattgggagggagaggtcttgaactttgcagtagcttttgacagtagtcaacactttagaaagagagaatcccatttagtgacctatacctatagtagcagccaacattctagttagattaactttgtcctcacaagaagaggacaaacaagcatgtttggattgcaaggtgatatttggggagtgagttgcctctcaacataagattgtggtgacggtgtttcgttcagctgcattcccgtaaggataaacaaaccaaaattgagagaataaagtggtggaagctgaaagggggaggcactagaagtcatcaatggccatcaaagatggcattttaaagatgacgcaaacaacatatgagagaagatggcaacctacattcggaaggtggcccttagagttgtgtggagcaaccaaagggagtggagacgaagataaagatacttgtggttgaatatgtaagtccaaatggctattaaaaaaagaaaaaaatggtagacatttatatcatgacgggtgtgtggacaacatagagaagtacaagttagtaaagaagaccacacaacgagctgtaatgtgcaaatggtagggtgtaccagaatctttaccatcgtttgagtacgaaggaaggatggaatgacatacataggattgaccaggatccttgagaggaatacaagggatttcaatcaagttaagtgcattaaggatgaaactgagcaccccttggtgaaggaggatgacatcaggcatagatggtgagagtattttgacaaattgttcaatgagaagaatcgggacacaacctttcagttggataaaaggttgaatgactcttttgatgataccattaggcggtttgtgcataagatccaaaaaattgaggttagagaggcattgaaaaggatgaaagggggctctggtggtatcccaattgagccatggagatgcctcggggacatagctatagtatggctaactaagttgttcaaccatatcttctagtcgaacatgatgcttgactagtgaag

SEQ ID NO: 83252 - DNA, 779 bp, Zea Mays
taacactttatttgggcagacagacaggagagacgctacttgttgctgtccattatggtatggatggtctgcgtgcgtgccggccggctgcaccagttgcgtgtatgcaattgcaatgcaagcaatacacccagcatggacgcttggacggacggacggaaaccgacggatggtaccgactaccgagcgagaagcgcaagaagaagaagcgggagatggcgcgccgcggcagccagaagcgggtgcgcttcgcggacgacgtcgtgggcagggacaatgccgcctccgccgccgccgccgcgccaagggaggaggccgagccgtcgtgcgccgcagcgctcaggacgcccatgccggccaaccgggaggcgctgtaccgcggcatgctccgcggccgctccatgctcagggtcgcctgctcctactagctagctacagtagcaccaccgtgccggccccgacgtaacccgctccactccattaatctgtgtgtgtgtgtgtctctctctctatctcttgtgtacgttgcgtgctgccaactagtggcgccgccggccagttaatccgggcctagctagctctctccctcgcccattgccgggaaagttttgtaattaattagtggccgtcccgcgagggagcttgtggtccgcgcgtgcgtcttggtacgtgctgtgttgtctgctggttagcttccttttcttcctttctttcttgtacattaacacgtcctgagtgatgagcagcgaacgattcctcgctgtcaacgcttccatcca

SEQ ID NO: 83253 - DNA, 1128 bp, Zea Mays
taacactttatttgggcagacagacaggagagacgctacttgttgctgtccattatggtatggatggtctgcgtgcgtgccggccggctgcaccagttgcgtgtatgcaattgcaatgcaagcaatacacccagcatggacgcttggacggacggacggaaaccgacggatggtaccgactaccgagcgagcggcgtgctgcgtgcgccactgcaagactcttctgctacggtgctcgcttctctgtctcggtcggcggactctgtcgctcctcctcctagcgcgagcgagcgagctagctcacctactctgtggctggacctcgcgcgcgggatggcgccgtcgtcctcgccctcgccttcggcggccggctcccacgcgggcctcgccatcgcggccaccgccatggcgctctccggcacgctcgtcctctactccctgtgccgcgcgaagcagcagcgcctggtgctcccctcctcttcctccgacgacgccccgtcccctcgccctcggctccgcccgtgcctctcctcgtccgagaagcgcaagaagaagaagcgggagatggcgcgccgcggcagccagaagcgggtgcgcttcgcggacgacgtcgtgggcagggacaatgccgcctccgccgccgccgccgcgccaagggaggaggccgagccgtcgtgcgccgcagcgctcaggacgcccatgccggccaaccgggaggcgctgtaccgcggcatgctccgcggccgctccatgctcagggtcgcctgctcctactagctagctacagtagcaccaccgtgccggccccgacgtaacccgctccactccattaatctgtgtgtgtgtgtgtctctctctctatctcttgtgtacgttgcgtgctgccaactagtggcgccgccggccagttaatccgggcctagctagctctctccctcgcccattgccgggaaagttttgtaattaattagtggccgtcccgcgagggagcttgtggtccgcgcgtgcgtcttggtacgtgctgtgttgtctgctggttagcttccttttcttcctttctttcttgtacattaacacgtcctgagtgatgagcagcgaacgattcctcgctgtcaacgcttccatcca

SEQ ID NO: 83254 - DNA, 1775 bp, Zea Mays
caaagtccaaacgctgcccccaccctctcggcctccgccaccgccgcggtccttccctcccctgcccaccgagtagatttgaggatctccagctttttgaggacaatccagttttcgtcgaagttcaaaatgacggtggtggaggcgggggaagtgttgaacttgaaggtgggcgagaaccctctactggaggatgaggccaagacggggtacgtctcgcccgacgaccaagacggggagaccgccagcgaaaaacccagcggcgcgccccagctgaagaagggcccctggagtcccgatgaagataagcttctcaaaaattatgtcgaggcacacggcgaggggaaatggaacaaggtgcagcgcaactccgggctcaatcgctgtggcaagagctgccgcctccgctggaccaaccacctcaggcccgatctcaagaaagggtctttcgacaatgaggagatcgacaagattttgaagttttacctcaagtggggccccaagtgggccaagatagcctcgcgattgcctggtcgcacagataatgaaataaaaaacttttggaataccagaataaagaagactgagaaacagggtttgcctatctatccggaacatgtgctttctcaggttaagcaaccgcaacaagacatgaactgtgaaactcctggattgtcacatggcaagaaacggataagagagattgagattcatgatcttatggatgtcaaaatcttatttcagcaccttgactatcataaggatctagtggttccaacaaaacctttgaaacgccgtgcatctattggtagtctgaaaatttctggtgagactaaggaaacctattgttccactgatttgaactatgtattggcaaggagtgagtcggtgcctactggtagtgccattgccagtggttatccagtcgagctcccttcagtccaaagttccagctctaccctaagtaatgactggttgcttcaatgtgtttcggcttctgtcgaacaacagattcatagctccattcaatctacagaaaccatttcatcgcaaaccactggcctgctccccacaatgtctgaaatatcttttgaaacactgattccaatggtataccctatgattcattcttttggctactctgaacatgaaagctctccgaatactgatattcaagctgcaaacttatctttagatgatgttagccagtattatcaagttgctagtttttttgatcctggggtccctgatacagagctaggggcaagtttcttcaatgacacaccaccagaaacaagttttttgaaccaacagaagcaagtatcttgaatggtacaccaccagaagcaagtatcttgaatgatatagcactagaagcaagtttcttgaatggtacacaactagaagcaagtttcttgaatggtacacaactagaagcaagtttcttgaatgataattcgaaggaccattcacatctttactgtcaggagcctaagcctgattgatggaggccaatggtttgatctgtgtcgcaagcccaggtccgtgagcagcagttctccgttgcacaatcagggtcagtgcgacaaccatgattagatactcttgtcttcctagcattttgttaaggtcacagagccttgtgttgtttcaggcagtttgtgtataaagacataccttgagtgcttgaacttcatattcatttattttgatgtgctgcgaccatctgaactgaaatttcgttctttgatgtgatgtgatttatcgggacataa

SEQ ID NO: 83255 - DNA, 1560 bp, Zea Mays
cgaaaacctggaaatgcgtccccgtccccatccgtggttagcttggcgccgacagcttcctcgtctcctccttccacgcgcccaacaccgaggaggacggcaacaaggtctaggccttcctcgcggagatggagagcaccatcagggaccacccgctctgggccaacgccaccgactaggagatcgaccacgcgcttgagggcctggagaagtatgtcatgaccaaattgttcgaccgcacgtttgggacttccactgaggatgccgtttccgacatggacatcttagagaagattggtctcttgcagcagtttgttaagcctcatcacttggatatacccaaggtcctgcataacgaggcatcgtggctggtaactcattctgagcttgaagcatccacaatgcgatttcagtccttgatgtttgtcataagttctaaggatgggagtaattggtgcatttcacattttaatagcattgtgtgtttgatcaaaatgaagcccccaaaatagtattacttggatataaatttgctagcctcgatattcaaaagggtgtcaattgttaagcattcagctctattttccccctctgttatcaattatgctctgattgtactgtgtatattcaagaagttgctggttttaatcatgtaaaatccaaaattttaaattatccaaagttcccatgaaagaaatcgttccagtgatacagccaaagctcatactgactgagaccattctttctctgcacatgccacttcagcttgcagtgaaagagctgcagaagattaattcctttaaagcaccacgtgagaagcttctgtgcatcatgagctgttgtcaagtcatcaataacagctgatccttgcccggaagtcagctcagaggtcgcgagtgaggaagttgcagtacatctccgagctcgagcgcagcgtcacaacactgcagaaatggtatgatacaactggagtccaccttcaccataggcaggcaacaattatccatgctgatgatctgccatattcttcaaagtcgtttgaaagggcgatgttttcccaacctgtgtctgattgaattctacaccagttcttggaagagaaagcctcaccaagtcatcatctccaggaacgatgttagcgaaagtcaatttaatctggtgctgaacattgagttgcaacaaatcatcgatagagactgagtcaccgcagctagaaaccactgtctcaaggtgctgaacattgagttgcaacaaatcatcgatggagaccgagtcaccgcagccagaaaaccattgtctcaatttgaggagattttccatctatgtttgttagaaggcataatgctatttatctcttgtattcgaacatttggcaattaagaaatagaagattacttccccaatatcccttcttcctaatctcacctttcacggcttctatggaacaatcacttactattactgactgacatgtccactcctcatatgtgagatattggggttgatatatatgttgttcgtttccatgtacttgttatgcactaacatttatcgaataat

SEQ ID NO: 83256 - DNA, 1325 bp, Zea Mays
taatgtaccccagacgaaaacctggaaatgcgtccccgtccccatccgtggttagcttggcgccgacagcttcctcgtctcctccttccacgcgcccaacaccgaggaggacggcaacaaggtctaggccttcctcgcggagatggagagcaccatcagggaccacccgctctgggccaacgccaccgactaggagatcgaccacgcgcttgagggcctggagaagtatgtcatgaccaaattgttcgaccgcacgtttgggacttccactgaggatgccgtttccgacatggacatcttagagaagattggtctcttgcagcagtttgttaagcctcatcacttggatatacccaaggtcctgcataacgaggcatcgtggctgactgaaacagtcctttgcttgcgccgaaattcttccaggatccttgcccggaagtcagctcagaggtcgcgagtgaggaagttgcagtacatctccgagctcgagcgcagcgtcacaacactgcagaaatggtatgatacaactggagtccaccttcaccataggcaggcaacaattatccatgctgatgatctgccatattcttcaaagtcgtttgaaagggcgatgttttcccgtatgtatattccatttggttgaacacatgttcctttctctaaattttcacactaatctttttcttcagaacatgatgttatgtttaggctaatgatacagatgatgaattgaacaatgctctctttatagtgtgtctgattgaacaatgctctctttataacaaatcagaacattatgccttctaacatatactaaatttcagaacctgtgtctgattgaattctacaccagttcttggaagagaaagcctcaccaagtcatcatctccaggaacgatgttagcgaaagtcaatttaatctggtgctgaacattgagttgcaacaaatcatcgatagagactgagtcaccgcagctagaaaccactgtctcaaggtgctgaacattgagttgcaacaaatcatcgatggagaccgagtcaccgcagccagaaaaccattgtctcaatttgaggagattttccatctatgtttgttagaaggcataatgctatttatctcttgtattcgaacatttggcaattaagaaatagaagattacttccccaatatcccttcttcctaatctcacctttcacggcttctatggaacaatcacttactattactgactgacatgtccactcctcatatgtgagatattggggttgatatatatgttgttcgtttccatgtacttgttatgcactaacatttatcgaataat

SEQ ID NO: 83257 - DNA, 1165 bp, Zea Mays
aaaacaaaaacctgactacatgttcttttgatacaattgtcttttaatgtaccccagacgaaaacctggaaatgcgtccccgtccccatccgtggttagcttggcgccgacagcttcctcgtctcctccttccacgcgcccaacaccgaggaggacggcaacaaggtctaggccttcctcgcggagatggagagcaccatcagggaccacccgctctgggccaacgccaccgactaggagatcgaccacgcgcttgagggcctggagaagtatgtcatgaccaaattgttcgaccgcacgtttgggacttccactgaggatgccgtttccgacatggacatcttagagaagattggtctcttgcagcagtttgttaagcctcatcacttggatatacccaaggtcctgcataacgaggcatcgtggctgactgaaacagtcctttgcttgcgccgaaattcttccaggatccttgcccggaagtcagctcagaggtcgcgagtgaggaagttgcagtacatctccgagctcgagcgcagcgtcacaacactgcagaaatggtatgatacaactggagtccaccttcaccataggcaggcaacaattatccatgctgatgatctgccatattcttcaaagtcgtttgaaagggcgatgttttcccaacctgtgtctgattgaattctacaccagttcttggaagagaaagcctcaccaagtcatcatctccaggaacgatgttagcgaaagtcaatttaatctggtgctgaacattgagttgcaacaaatcatcgatagagactgagtcaccgcagctagaaaccactgtctcaaggtgctgaacattgagttgcaacaaatcatcgatggagaccgagtcaccgcagccagaaaaccattgtctcaatttgaggagattttccatctatgtttgttagaaggcataatgctatttatctcttgtattcgaacatttggcaattaagaaatagaagattacttccccaatatcccttcttcctaatctcacctttcacggcttctatggaacaatcacttactattactgactgacatgtccactcctcatatgtgagatattggggttgatatatatgttgttcgtttccatgtacttgttatgcactaacatttatcgaataat

SEQ ID NO: 83258 - DNA, 3295 bp, Zea Mays
aaaacaaaaacctgactacatgttcttttgatacaattgtcttttaatgtaccccagacgaaaacctggaaatgcgtccccgtccccatccgtggttagcttggcgccgacagcttcctcgtctcctccttccacgcgcccaacaccgaggaggacggcaacaaggtctaggccttcctcgcggagatggagagcaccatcagggaccacccgctctgggccaacgccaccgactaggagatcgaccacgcgcttgagggcctggagaagtatgtcatgaccaaattgttcgaccgcacgtttgggacttccactgaggatgccgtttccgacatggacatcttagagaagattggtctcttgcagcagtttgttaagcctcatcacttggatatacccaaggtcctgcataacgaggcatcgtggctggtaactcattctgagcttgaagcatccacaatgcgatttcagtccttgatgtttgtcataagttctaaggatgggagtaattggtgcatttcacattttaatagcattgtgtgtttgatcaaaatgaagcccccaaaatagtattacttggatataaatttgctagcctcgatattcaaaagggtgtcaattgttaagcattcagctctattttccccctctgttatcaattatgctctgattgtactgtgtatattcaagaagttgctggttttaatcatgtaaaatccaaaattttaaattatccaaagttcccatgaaagaaatcgttccagtgatacagccaaagctcatactgactgagaccattctttctctgcacatgccacttcagcttgcagtgaaagagctgcagaagattaattcctttaaagcaccacgtgagaagcttctgtgcatcatgagctgttgtcaagtcatcaataacagctgtgagttgagaattacacataggaaggtggtatcttgttcctgatagccttggctcactagagttttgtagcattgtggtgccttgcattacttgtacttaggttgggggtcctttattcactaggatggatcttctgaaattagtgctgaaggaactgaaaattggcacacatgacatattgccttctaactggtacaatctgccaccagatgtctcacagttttggtgccgatcggcttcctgcaatggagaatgtgaaaatcgaacctggaatgtagggcagaaaaccactactgaggcaggtggggataaagatggagtcacataggctgggagtatgtgttggatcccaatgttctgtagttagtgttgaggcttgaggttttagagctgtagttttggggaaaatgtgagttgtgacactgatttttaacaactgatgtgctgctccagtgctccgggcaaattcagtcgggcgttatgctaatgaagattatgtcaaaggaaaatatgaccaagggtgaaaggagatttatgtagttcccttttagttacatattcgattttattttaaacaggtacggatgagggatatcccatggttaagtttgatgcttcaggaccaatatcgttgcgtgtcgatgctggtggtatctacattttcatagttacagaacaggcttctgatttgttgtttctgcagtagatgctactatagtcgatcatgatgattcaaaatgttcttttcactcatccgattttattttccaatttggttagtaaacacatggtgtagttttagtgcttgtagtgtcacatgaaccaacttgtatgatggttactatcgctcaaaaaactacagcactgtatgacattcctatgtggtaaatcctaggatagtgtagtgtcttacatcatgtaaactgttatttacgaaactatgtaatacataactggctaaagaactactaactaaacatacatgtgtagttgcaaaaatacagaactgcccaggaaacaaatatatattgggatggaaaaatcagatagataaatttgaaaaaactagctgaaaacaccatgcagcagctgttgttgcataatgcattagtcttgtttttccccctctccaatgcataatgtataagtcctgatatcagatttgcttcttcctttagacatatgaggtcaggcttgcttgtatagttaaacaattaccttatgagaaaagtatagagaactgaaactcatagcagtagcactggcattggcacactttaatcacttcacagttcacaatgtttatttttgctttgaaggtggtctgtttttttgccaagcgtgcatgcatgcgccttgttagttgtggttctaggcaggcaggcggacaatgcgttctgcaagaaattcatcttcttttgatctgcatgcagactgaaacagtcctttgcttgcgccgaaattcttccaggatccttgcccggaagtcagctcagaggtcgcgagtgaggaagttgcagtacatctccgagctcgagcgcagcgtcacaacactgcagaaatggtatgatacaactggagtccaccttcaccataggcaggcaacaattatccatgctgatgatctgccatattcttcaaagtcgtttgaaagggcgatgttttcccgtatgtatattccatttggttgaacacatgttcctttctctaaattttcacactaatctttttcttcagaacatgatgttatgtttaggctaatgatacagatgatgaattgaacaatgctctctttatagtgtgtctgattgaacaatgctctctttataacaaatcagaacattatgccttctaacatatactaaatttcagaacctgtgtctgattgaattctacaccagttcttggaagagaaagcctcaccaagtcatcatctccaggaacgatgttagcgaaagtcaatttaatctggtgctgaacattgagttgcaacaaatcatcgatagagactgagtcaccgcagctagaaaccactgtctcaaggtgctgaacattgagttgcaacaaatcatcgatggagaccgagtcaccgcagccagaaaaccattgtctcaatttgaggagattttccatctatgtttgttagaaggcataatgctatttatctcttgtattcgaacatttggcaattaagaaatagaagattacttccccaatatcccttcttcctaatctcacctttcacggcttctatggaacaatcacttactattactgactgacatgtccactcctcatatgtgagatattggggttgatatatatgttgttcgtttccatgtacttgttatgcactaacatttatcgaataat

SEQ ID NO: 83259 - DNA, 1181 bp, Zea Mays
tttgataagggaaattttattgcttcaagataatcataagtcacaactctcttgaaaacaaaaacctgactacatgttcttttgatacaattgtcttttaatgtaccccagacgaaaacctggaaatgcgtccccgtccccatccgtggttagcttggcgccgacagcttcctcgtctcctccttccacgcgcccaacaccgaggaggacggcaacaaggtctaggccttcctcgcggagatggagagcaccatcagggaccacccgctctgggccaacgccaccgactaggagatcgaccacgcgcttgagggcctggagaagtatgtcatgaccaaattgttcgaccgcacgtttgggacttccactgaggatgccgtttccgacatggacatcttagagaagattggtctcttgcagcagtttgttaagcctcatcacttggatatacccaaggtcctgcataacgaggcatcgtggctggatccttgcccggaagtcagctcagaggtcgcgagtgaggaagttgcagtacatctccgagctcgagcgcagcgtcacaacactgcagaaatggtatgatacaactggagtccaccttcaccataggcaggcaacaattatccatgctgatgatctgccatattcttcaaagtcgtttgaaagggcgatgttttcccaacctgtgtctgattgaattctacaccagttcttggaagagaaagcctcaccaagtcatcatctccaggaacgatgttagcgaaagtcaatttaatctggtgctgaacattgagttgcaacaaatcatcgatagagactgagtcaccgcagctagaaaccactgtctcaaggtgctgaacattgagttgcaacaaatcatcgatggagaccgagtcaccgcagccagaaaaccattgtctcaatttgaggagattttccatctatgtttgttagaaggcataatgctatttatctcttgtattcgaacatttggcaattaagaaatagaagattacttccccaatatcccttcttcctaatctcacctttcacggcttctatggaacaatcacttactattactgactgacatgtccactcctcatatgtgagatattggggttgatatatatgttgttcgtttccatgtacttgttatgcactaacatttatcgaataat

SEQ ID NO: 83260 - DNA, 3145 bp, Zea Mays
tttgataagggaaattttattgcttcaagataatcataagtcacaactctcttgaaaacaaaaacctgactacatgttcttttgatacaattgtcttttaatgtaccccagacgaaaacctggaaatgcgtccccgtccccatccgtggttagcttggcgccgacagcttcctcgtctcctccttccacgcgcccaacaccgaggaggacggcaacaaggtctaggccttcctcgcggagatggagagcaccatcagggaccacccgctctgggccaacgccaccgactaggagatcgaccacgcgcttgagggcctggagaagtatgtcatgaccaaattgttcgaccgcacgtttgggacttccactgaggatgccgtttccgacatggacatcttagagaagattggtctcttgcagcagtttgttaagcctcatcacttggatatacccaaggtcctgcataacgaggcatcgtggctggtaactcattctgagcttgaagcatccacaatgcgatttcagtccttgatgtttgtcataagttctaaggatgggagtaattggtgcatttcacattttaatagcattgtgtgtttgatcaaaatgaagcccccaaaatagtattacttggatataaatttgctagcctcgatattcaaaagggtgtcaattgttaagcattcagctctattttccccctctgttatcaattatgctctgattgtactgtgtatattcaagaagttgctggttttaatcatgtaaaatccaaaattttaaattatccaaagttcccatgaaagaaatcgttccagtgatacagccaaagctcatactgactgagaccattctttctctgcacatgccacttcagcttgcagtgaaagagctgcagaagattaattcctttaaagcaccacgtgagaagcttctgtgcatcatgagctgttgtcaagtcatcaataacagctgtgagttgagaattacacataggaaggtggtatcttgttcctgatagccttggctcactagagttttgtagcattgtggtgccttgcattacttgtacttaggttgggggtcctttattcactaggatggatcttctgaaattagtgctgaaggaactgaaaattggcacacatgacatattgccttctaactggtacaatctgccaccagatgtctcacagttttggtgccgatcggcttcctgcaatggagaatgtgaaaatcgaacctggaatgtagggcagaaaaccactactgaggcaggtggggataaagatggagtcacataggctgggagtatgtgttggatcccaatgttctgtagttagtgttgaggcttgaggttttagagctgtagttttggggaaaatgtgagttgtgacactgatttttaacaactgatgtgctgctccagtgctccgggcaaattcagtcgggcgttatgctaatgaagattatgtcaaaggaaaatatgaccaagggtgaaaggagatttatgtagttcccttttagttacatattcgattttattttaaacaggtacggatgagggatatcccatggttaagtttgatgcttcaggaccaatatcgttgcgtgtcgatgctggtggtatctacattttcatagttacagaacaggcttctgatttgttgtttctgcagtagatgctactatagtcgatcatgatgattcaaaatgttcttttcactcatccgattttattttccaatttggttagtaaacacatggtgtagttttagtgcttgtagtgtcacatgaaccaacttgtatgatggttactatcgctcaaaaaactacagcactgtatgacattcctatgtggtaaatcctaggatagtgtagtgtcttacatcatgtaaactgttatttacgaaactatgtaatacataactggctaaagaactactaactaaacatacatgtgtagttgcaaaaatacagaactgcccaggaaacaaatatatattgggatggaaaaatcagatagataaatttgaaaaaactagctgaaaacaccatgcagcagctgttgttgcataatgcattagtcttgtttttccccctctccaatgcataatgtataagtcctgatatcagatttgcttcttcctttagacatatgaggtcaggcttgcttgtatagttaaacaattaccttatgagaaaagtatagagaactgaaactcatagcagtagcactggcattggcacactttaatcacttcacagttcacaatgtttatttttgctttgaaggtggtctgtttttttgccaagcgtgcatgcatgcgccttgttagttgtggttctaggcaggcaggcggacaatgcgttctgcaagaaattcatcttcttttgatctgcatgcagactgaaacagtcctttgcttgcgccgaaattcttccaggatccttgcccggaagtcagctcagaggtcgcgagtgaggaagttgcagtacatctccgagctcgagcgcagcgtcacaacactgcagaaatggtatgatacaactggagtccaccttcaccataggcaggcaacaattatccatgctgatgatctgccatattcttcaaagtcgtttgaaagggcgatgttttcccaacctgtgtctgattgaattctacaccagttcttggaagagaaagcctcaccaagtcatcatctccaggaacgatgttagcgaaagtcaatttaatctggtgctgaacattgagttgcaacaaatcatcgatagagactgagtcaccgcagctagaaaccactgtctcaaggtgctgaacattgagttgcaacaaatcatcgatggagaccgagtcaccgcagccagaaaaccattgtctcaatttgaggagattttccatctatgtttgttagaaggcataatgctatttatctcttgtattcgaacatttggcaattaagaaatagaagattacttccccaatatcccttcttcctaatctcacctttcacggcttctatggaacaatcacttactattactgactgacatgtccactcctcatatgtgagatattggggttgatatatatgttgttcgtttccatgtacttgttatgcactaacatttatcgaataat

SEQ ID NO: 83261 - DNA, 1391 bp, Zea Mays
attttttttgataagggaaattttattgcttcaagataatcataagtcacaactctcttgaaaacaaaaacctgactacatgttcttttgatacaattgtcttttaatgtaccccagacgaaaacctggaaatgcgtccccgtccccatccgtggttagcttggcgccgacagcttcctcgtctcctccttccacgcgcccaacaccgaggaggacggcaacaaggtctaggccttcctcgcggagatggagagcaccatcagggaccacccgctctgggccaacgccaccgactaggagatcgaccacgcgcttgagggcctggagaagtatgtcatgaccaaattgttcgaccgcacgtttgggacttccactgaggatgccgtttccgacatggacatcttagagaagattggtctcttgcagcagtttgttaagcctcatcacttggatatacccaaggtcctgcataacgaggcatcgtggctggatccttgcccggaagtcagctcagaggtcgcgagtgaggaagttgcagtacatctccgagctcgagcgcagcgtcacaacactgcagaaatggtatgatacaactggagtccaccttcaccataggcaggcaacaattatccatgctgatgatctgccatattcttcaaagtcgtttgaaagggcgatgttttcccgtatgtatattccatttggttgaacacatgttcctttctctaaattttcacactaatctttttcttcagaacatgatgttatgtttaggctaatgatacagatgatgaattgaacaatgctctctttatagtgtgtctgattgaacaatgctctctttataacaaatcagaacattatgccttctaacatatactaaatttcagaacctgtgtctgattgaattctacaccagttcttggaagagaaagcctcaccaagtcatcatctccaggaacgatgttagcgaaagtcaatttaatctggtgctgaacattgagttgcaacaaatcatcgatagagactgagtcaccgcagctagaaaccactgtctcaaggtgctgaacattgagttgcaacaaatcatcgatggagaccgagtcaccgcagccagaaaaccattgtctcaatttgaggagattttccatctatgtttgttagaaggcataatgctatttatctcttgtattcgaacatttggcaattaagaaatagaagattacttccccaatatcccttcttcctaatctcacctttcacggcttctatggaacaatcacttactattactgactgacatgtccactcctcatatgtgagatattggggttgatatatatgttgttcgtttccatgtacttgttatgcactaacatttatcgaataat

SEQ ID NO: 83262 - DNA, 460 bp, Zea Mays
gaacagaaacacaagctttatttatcttcagaagaaggttgcaaatattacggtgttccaaccaccagcctgcaaaatcaggtctccggagaagaaaaacaaccacacagggttgtcaaggcaaaggctctgtagaacgaacctgcatgcaataaggcaaaccctaaccggacaccgcaaaatagcaaccacccatgaccaacaaacactgacttgcaggtactcggcagcaagatttgcaatcaaaggagtgttgatgtctgcaactctaaaaccagtagtagtggaaaagaacgcgcacttgacagaatacttgagcttcaaacactgacttgagagaaactgcatggtggaatgactgatcacaagggcttaggttggtatggaggggggcagggtgccacatggtaatggctgccaaaggctcagcgaacagagatcctcacaggaggatacctgc

SEQ ID NO: 83263 - DNA, 1483 bp, Zea Mays
cagacgcagacgccgcacccgcacggccgtagctagccctagccgccaggcaccagcggccagccggaggcccggacgactggactgccattctgccaaagccgtcgtcgccacagggaagcgccagtacgccgccgcgccggtacgccgctcggcccttctacagtgttcgtagtcccagttgttccggcgagtggcgactatcagcttcagagcttccccaaatcagccactagaaaggaattggcagcaccatggatgtaaatcacatcactgagatggaggatggtttaaatgatgatgaaatggaatatccatttgagggtgatgctaatgccagtaacaatgatcagatagtagaggaccatgctgatgatgcccctattgctagtggtgagaatgccatcgtccaacagcaagttggtctgagaaagaagaagtacatgtatgtgaatgaccatcgtgttgtgaaacaacggaaactagtaccaacagtgacaattcccgctatgaacaaggataaaggtccaatgccaatgagtatctccaagatgaaaaccaagaagccaatcggtacccctactagcagcaagctaatggcatctgcattcaaggtcacatcaagcaagaatgaacttatggttttaatgcaaaaatcagctgaagttgtgcaacctgcaattgcaagtgctaccgctagtgcaaacgcaagtgcaagttcaagtgtaagggcaagtgcaagtgcaagcataccagcaagtgcccaagcaagtgtcggcgacgatgaaaaacaagtagatggccagattgggaaaagactcacttcatgggtctggcaacatttcacaaggtatgaaatagatgttgagcaacctgatggttccagtgttaagcaaaagtgggcaaaatgtcttcgatgttcacataaagctaaggctgatgcttcaaatggtacaaaggcttttagtaaccacttaaaattgaaacattgtcttgtgaagggtcaacaacagctaagtcagagtgggaatgacatagcgacatataaatatgatgagaaagccagtgtgagacttctatattatgccatcatcatgcatgaatatccattcattgttgccgaacacaagtattttatgaaatttatcaaatcactacggccatcctttcctttcaagtctcgtatcactgttcgtaaagagatccttcgctatgttgtttgcgcttttgtaataaactatgtagcatgttgtgtatctcttttaatgttgcggcgaacttgtgtgaaatatccactatctattatatatttgtggaattgtgaacttgtggattatacataaaagacggggtatgctgctgatttacttttaaaattgtgttgtttcttctataatgaacctgtgtgaaatatctactatttgttatatacttgtggacttgtggagtatgcctaaaagaggggatatgctgctgatttttt

SEQ ID NO: 83264 - DNA, 1739 bp, Zea Mays
gtacaccaaaagccaacgctcggagcgcaggagtaagatcaaaagggaaatatctatcatgaagatcgtaagacatcccaacatagttaggcttaatgaggtgttggccggcaggacaaagatatacatagtcttggaacttgtcactggaggtgaactgtttgatagaatagtccgccatgggaagctacgtgagaatgaagctaggaagtatttccagcagctttattgatgccattgattattgccacagcaaaaggagtttatcatagagatttgaagcctcaaaacttgcttcttgactctcgtggaaacttgaaactttctgattttggacttagcacattgtctcaaaatggagtaggccttgtacacacgacatgtggaacaccaaattatgttgcacctgaggtgctaagtagcaatggatatgacggatctgcagcagacatttggtcgtgtggtgtcattctctatgttttaatggctggttaccttccctttgaggagaacgaccttccacatttgtatgaaaagataactgcagctcagtactcatgcccatattggttctctccaggagccaagtcattgatccagagaatacttgatccaaatccaagaactcgtatcactattgaagaaataagagaagacccatggtttaagaagaactacgtaactattagatgtggtgaagatgaaaatgtcagcctagacgatgttcaagctatttttgacaatattgaggacaagtatgtatcagacgaagtaacgcacaaggatggtggtcctcttatgatgaatgcctttgagatgattgcactatctcaaggtttggatctctcagcattgtttgataggcaacaggagtttgtcaagcgccaaacacgtttcgtctcaagaaagccagccaagactgtagtagctacaattgaggttgttgctgagtcaatgggtctcaaggtccactcccggaactacaaggtgaggcttgaaggtccagcgtcaaacagagcgagccaatttgctgttgttctagaggtctttgaagttgctccttctctgttcatggtcgatgttcgaaaggttgccggtgacactccggaataccacaggttttacgagaacctatgcagcaaactttgcagcataatctggaggccaaccgaagtttctgccaaatctacgccgctgaggacgaccacctgctagccgcctagcccagcactgagctactgtagtggcatcaccaagagacgtgattcgtagccgtcagaaagggagagcttctgttgaatctagcattgctcgtggagctgggattcatgttgaccaccaggtgtttgtatattgtagtaacgctattgtagatagtctgtatagctccatttgtgcagttgtacgtagcaggaatatgttaaaaaacaacttttaatgtcaggtataatcggtttgcatccaggaagcatctccaacagtgtcttaaatcagtactctatttttaaatatagggttcaacttataaaaacagttttaacaatgccctattttatatttttttgtcgaaaaaagtataggacactatcaagtgacctaagtatactgcatcctatactagtgctctagccttgttttctatatcatttttaatatttcttttctaacaatgtaatttatttcaaaaggtacatgatttaggacctaattgttggagcacaatttatttttaataccta

SEQ ID NO: 83265 - DNA, 1964 bp, Zea Mays
ggcagttgtcgccgcgcataatcatactagtgacacaatcacagctagccacctccccgtccccagcatcgccaaaggtcacatcggtcggccacgggcgcggggcaagaaggaccaggtgacggacgagcaggagggaggaataatggcgggcgcgggcgcgggcgggtggaagaagcgggtgggccgctacgaggtgggccggaccatcggccggggcaccttcgccaaggttaagttcgccgtcgacgccgacaccggcgcggctttcgccattaaggtgctcgacaaggagaccatcttcacccaccgcatgctccaccaggtgttggccggcaggacaaagatatacatagtcttggaacttgtcactggaggtgaactgtttgatagaatagtccgccatgggaagctacgtgagaatgaagctaggaagtatttccagcagctttattgatgccattgattattgccacagcaaaaggagtttatcatagagatttgaagcctcaaaacttgcttcttgactctcgtggaaacttgaaactttctgattttggacttagcacattgtctcaaaatggagtaggccttgtacacacgacatgtggaacaccaaattatgttgcacctgaggtgctaagtagcaatggatatgacggatctgcagcagacatttggtcgtgtggtgtcattctctatgttttaatggctggttaccttccctttgaggagaacgaccttccacatttgtatgaaaagataactgcagctcagtactcatgcccatattggttctctccaggagccaagtcattgatccagagaatacttgatccaaatccaagaactcgtatcactattgaagaaataagagaagacccatggtttaagaagaactacgtaactattagatgtggtgaagatgaaaatgtcagcctagacgatgttcaagctatttttgacaatattgaggacaagtatgtatcagacgaagtaacgcacaaggatggtggtcctcttatgatgaatgcctttgagatgattgcactatctcaaggtttggatctctcagcattgtttgataggcaacaggagtttgtcaagcgccaaacacgtttcgtctcaagaaagccagccaagactgtagtagctacaattgaggttgttgctgagtcaatgggtctcaaggtccactcccggaactacaaggtgaggcttgaaggtccagcgtcaaacagagcgagccaatttgctgttgttctagaggtctttgaagttgctccttctctgttcatggtcgatgttcgaaaggttgccggtgacactccggaataccacaggttttacgagaacctatgcagcaaactttgcagcataatctggaggccaaccgaagtttctgccaaatctacgccgctgaggacgaccacctgctagccgcctagcccagcactgagctactgtagtggcatcaccaagagacgtgattcgtagccgtcagaaagggagagcttctgttgaatctagcattgctcgtggagctgggattcatgttgaccaccaggtgtttgtatattgtagtaacgctattgtagatagtctgtatagctccatttgtgcagttgtacgtagcaggaatatgttaaaaaacaacttttaatgtcaggtataatcggtttgcatccaggaagcatctccaacagtgtcttaaatcagtactctatttttaaatatagggttcaacttataaaaacagttttaacaatgccctattttatatttttttgtcgaaaaaagtataggacactatcaagtgacctaagtatactgcatcctatactagtgctctagccttgttttctatatcatttttaatatttcttttctaacaatgtaatttatttcaaaaggtacatgatttaggacctaattgttggagcacaatttatttttaataccta

SEQ ID NO: 83266 - DNA, 2044 bp, Zea Mays
cagcgaattctgccgctctgccctactcagtaggcagttgtcgccgcgcataatcatactagtgacacaatcacagctagccacctccccgtccccagcatcgccaaaggtcacatcggtcggccacgggcgcggggcaagaaggaccaggtgacggacgagcaggagggaggaataatggcgggcgcgggcgcgggcgggtggaagaagcgggtgggccgctacgaggtgggccggaccatcggccggggcaccttcgccaaggttaagttcgccgtcgacgccgacaccggcgcggctttcgccattaaggtgctcgacaaggagaccatcttcacccaccgcatgctccaccaggtgttggccggcaggacaaagatatacatagtcttggaacttgtcactggaggtgaactgtttgatagaatagtccgccatgggaagctacgtgagaatgaagctaggaagtatttccagcagctttattgatgccattgattattgccacagcaaaaggagtttatcatagagatttgaagcctcaaaacttgcttcttgactctcgtggaaacttgaaactttctgattttggacttagcacattgtctcaaaatggagtaggccttgtacacacgacatgtggaacaccaaattatgttgcacctgaggtgctaagtagcaatggatatgacggatctgcagcagacatttggtcgtgtggtgtcattctctatgttttaatggctggttaccttccctttgaggagaacgaccttccacatttgtatgaaaaggagccaagtcattgatccagagaatacttgatccaaatccaagaactcgtatcactattgaagaaataagagaagacccatggtttaagaagaactacgtaactattagatgtggtgaagatgaaaatgtcagcctagacgatgttcaagctatttttgacaatattgaggacaagtatgtatcagacgaagtaacgcacaaggatggtggtcctcttatgatgaatgcctttgagatgattgcactatctcaaggtttggatctctcagcattgtttgataggcaacaggagtttgtcaagcgccaaacacgtttcgtctcaagaaagccagccaagactgtagtagctacaattgaggttgttgctgagtcaatgggtctcaaggtccactcccggaactacaaggtgaggcttgaaggtccagcgtcaaacagagcgagccaatttgctgttgttctagaggtggtgaagccatgcatgcagcgcatcagttggtcgcttgtcctttacacagtgttatttccatgctctgaagtgcacttgattgaatcaggtctttgaagttgctccttctctgttcatggtcgatgttcgaaaggttgccggtgacactccggaataccacaggttttacgagaacctatgcagcaaactttgcagcataatctggaggccaaccgaagtttctgccaaatctacgccgctgaggacgaccacctgctagccgcctagcccagcactgagctactgtagtggcatcaccaagagacgtgattcgtagccgtcagaaagggagagcttctgttgaatctagcattgctcgtggagctgggattcatgttgaccaccaggtgtttgtatattgtagtaacgctattgtagatagtctgtatagctccatttgtgcagttgtacgtagcaggaatatgttaaaaaacaacttttaatgtcaggtataatcggtttgcatccaggaagcatctccaacagtgtcttaaatcagtactctatttttaaatatagggttcaacttataaaaacagttttaacaatgccctattttatatttttttgtcgaaaaaagtataggacactatcaagtgacctaagtatactgcatcctatactagtgctctagccttgttttctatatcatttttaatatttcttttctaacaatgtaatttatttcaaaaggtacatgatttaggacctaattgttggagcacaatttatttttaataccta

SEQ ID NO: 83267 - DNA, 2038 bp, Zea Mays
gccgtcgtccctgtacagttatatatacagaatatacagcgaattctgccgctctgccctactcagtaggcagttgtcgccgcgcataatcatactagtgacacaatcacagctagccacctccccgtccccagcatcgccaaaggtcacatcggtcggccacgggcgcggggcaagaaggaccaggtgacggacgagcaggagggaggaataatggcgggcgcgggcgcgggcgggtggaagaagcgggtgggccgctacgaggtgggccggaccatcggccggggcaccttcgccaaggttaagttcgccgtcgacgccgacaccggcgcggctttcgccattaaggtgctcgacaaggagaccatcttcacccaccgcatgctccaccagatcaaaagggaaatatctatcatgaagatcgtaagacatcccaacatagttaggcttaatgaggtgttggccggcaggacaaagatatacatagtcttggaacttgtcactggaggtgaactgtttgatagaatagtccgccatgggaagctacgtgagaatgaagctaggaagtatttccagcagctttattgatgccattgattattgccacagcaaaaggagtttatcatagagatttgaagcctcaaaacttgcttcttgactctcgtggaaacttgaaactttctgattttggacttagcacattgtctcaaaatggagtaggccttgtacacacgacatgtggaacaccaaattatgttgcacctgaggtgctaagtagcaatggatatgacggatctgcagcagacatttggtcgtgtggtgtcattctctatgttttaatggctggttaccttccctttgaggagaacgaccttccacatttgtatgaaaagataactgcagctcagtactcatgcccatattggttctctccaggagccaagtcattgatccagagaatacttgatccaaatccaagaactcgtatcactattgaagaaataagagaagacccatggtttaagaagaactacgtaactattagatgtggtgaagatgaaaatgtcagcctagacgatgttcaagctatttttgacaatattgaggacaagtatgtatcagacgaagtaacgcacaaggatggtggtcctcttatgatgaatgcctttgagatgattgcactatctcaaggtttggatctctcagcattgtttgataggcaacaggagtttgtcaagcgccaaacacgtttcgtctcaagaaagccagccaagactgtagtagctacaattgaggttgttgctgagtcaatgggtctcaaggtccactcccggaactacaaggtctttgaagttgctccttctctgttcatggtcgatgttcgaaaggttgccggtgacactccggaataccacaggttttacgagaacctatgcagcaaactttgcagcataatctggaggccaaccgaagtttctgccaaatctacgccgctgaggacgaccacctgctagccgcctagcccagcactgagctactgtagtggcatcaccaagagacgtgattcgtagccgtcagaaagggagagcttctgttgaatctagcattgctcgtggagctgggattcatgttgaccaccaggtgtttgtatattgtagtaacgctattgtagatagtctgtatagctccatttgtgcagttgtacgtagcaggaatatgttaaaaaacaacttttaatgtcaggtataatcggtttgcatccaggaagcatctccaacagtgtcttaaatcagtactctatttttaaatatagggttcaacttataaaaacagttttaacaatgccctattttatatttttttgtcgaaaaaagtataggacactatcaagtgacctaagtatactgcatcctatactagtgctctagccttgttttctatatcatttttaatatttcttttctaacaatgtaatttatttcaaaaggtacatgatttaggacctaattgttggagcacaatttatttttaataccta

SEQ ID NO: 83268 - DNA, 1896 bp, Zea Mays
gccggacgcggcaacggccgtcgtccctgtacagttatatatacagaatatacagcgaattctgccgctctgccctactcagtaggcagttgtcgccgcgcataatcatactagtgacacaatcacagctagccacctccccgtccccagcatcgccaaaggtcacatcggtcggccacgggcgcggggcaagaaggaccaggtgacggacgagcaggagggaggaataatggcgggcgcgggcgcgggcgggtggaagaagcgggtgggccgctacgaggtgggccggaccatcggccggggcaccttcgccaaggttaagttcgccgtcgacgccgacaccggcgcggctttcgccattaaggtgctcgacaaggagaccatcttcacccaccgcatgctccaccaggtgttggccggcaggacaaagatatacatagtcttggaacttgtcactggaggtgaactgtttgatagaatagtccgccatgggaagctacgtgagaatgaagctaggaagtatttccagcagctttattgatgccattgattattgccacagcaaaaggagtttatcatagagatttgaagcctcaaaacttgcttcttgactctcgtggaaacttgaaactttctgattttggacttagcacattgtctcaaaatggagtaggccttgtacacacgacatgtggaacaccaaattatgttgcacctgaggtgctaagtagcaatggatatgacggatctgcagcagacatttggtcgtgtggtgtcattctctatgttttaatggctggttaccttccctttgaggagaacgaccttccacatttgtatgaaaagataactgcagctcagtactcatgcccatattggttctctccaggagccaagtcattgatccagagaatacttgatccaaatccaagaactgagtttgtcaagcgccaaacacgtttcgtctcaagaaagccagccaagactgtagtagctacaattgaggttgttgctgagtcaatgggtctcaaggtccactcccggaactacaaggtgaggcttgaaggtccagcgtcaaacagagcgagccaatttgctgttgttctagaggtggtgaagccatgcatgcagcgcatcagttggtcgcttgtcctttacacagtgttatttccatgctctgaagtgcacttgattgaatcaggtctttgaagttgctccttctctgttcatggtcgatgttcgaaaggttgccggtgacactccggaataccacaggttttacgagaacctatgcagcaaactttgcagcataatctggaggccaaccgaagtttctgccaaatctacgccgctgaggacgaccacctgctagccgcctagcccagcactgagctactgtagtggcatcaccaagagacgtgattcgtagccgtcagaaagggagagcttctgttgaatctagcattgctcgtggagctgggattcatgttgaccaccaggtgtttgtatattgtagtaacgctattgtagatagtctgtatagctccatttgtgcagttgtacgtagcaggaatatgttaaaaaacaacttttaatgtcaggtataatcggtttgcatccaggaagcatctccaacagtgtcttaaatcagtactctatttttaaatatagggttcaacttataaaaacagttttaacaatgccctattttatatttttttgtcgaaaaaagtataggacactatcaagtgacctaagtatactgcatcctatactagtgctctagccttgttttctatatcatttttaatatttcttttctaacaatgtaatttatttcaaaaggtacatgatttaggacctaattgttggagcacaatttatttttaataccta

SEQ ID NO: 83269 - DNA, 1776 bp, Zea Mays
ccacagaagctgctgccggacgcggcaacggccgtcgtccctgtacagttatatatacagaatatacagcgaattctgccgctctgccctactcagtaggcagttgtcgccgcgcataatcatactagtgacacaatcacagctagccacctccccgtccccagcatcgccaaaggtcacatcggtcggccacgggcgcggggcaagaaggaccaggtgacggacgagcaggagggaggaataatggcgggcgcgggcgcgggcgggtggaagaagcgggtgggccgctacgaggtgggccggaccatcggccggggcaccttcgccaaggttaagttcgccgtcgacgccgacaccggcgcggctttcgccattaaggtgctcgacaaggagaccatcttcacccaccgcatgctccaccaggtgttggccggcaggacaaagatatacatagtcttggaacttgtcactggaggtgaactgtttgatagaatagtccgccatgggaagctacgtgagaatgaagctaggaagtatttccagcagctttattgatgccattgattattgccacagcaaaaggagtttatcatagagatttgaagcctcaaaacttgcttcttgactctcgtggaaacttgaaactttctgattttggacttagcacattgtctcaaaatggagtaggccttgtacacacgacatgtggaacaccaaattatgttgcacctgaggtgctaagtagcaatggatatgacggatctgcagcagacatttggtcgtgtggtgtcattctctatgttttaatggctggttaccttccctttgaggagaacgaccttccacatttgtatgaaaaggagccaagtcattgatccagagaatacttgatccaaatccaagaactgagtttgtcaagcgccaaacacgtttcgtctcaagaaagccagccaagactgtagtagctacaattgaggttgttgctgagtcaatgggtctcaaggtccactcccggaactacaaggtgaggcttgaaggtccagcgtcaaacagagcgagccaatttgctgttgttctagaggtctttgaagttgctccttctctgttcatggtcgatgttcgaaaggttgccggtgacactccggaataccacaggttttacgagaacctatgcagcaaactttgcagcataatctggaggccaaccgaagtttctgccaaatctacgccgctgaggacgaccacctgctagccgcctagcccagcactgagctactgtagtggcatcaccaagagacgtgattcgtagccgtcagaaagggagagcttctgttgaatctagcattgctcgtggagctgggattcatgttgaccaccaggtgtttgtatattgtagtaacgctattgtagatagtctgtatagctccatttgtgcagttgtacgtagcaggaatatgttaaaaaacaacttttaatgtcaggtataatcggtttgcatccaggaagcatctccaacagtgtcttaaatcagtactctatttttaaatatagggttcaacttataaaaacagttttaacaatgccctattttatatttttttgtcgaaaaaagtataggacactatcaagtgacctaagtatactgcatcctatactagtgctctagccttgttttctatatcatttttaatatttcttttctaacaatgtaatttatttcaaaaggtacatgatttaggacctaattgttggagcacaatttatttttaataccta

SEQ ID NO: 83270 - DNA, 1052 bp, Zea Mays
ggcagttgtcgccgcgcataatcatactagtgacacaatcacagctagccacctccccgtccccagcatcgccaaaggtcacatcggtcggccacgggcgcggggcaagaaggaccaggtgacggacgagcaggagggaggaataatggcgggcgcgggcgcgggcgggtggaagaagcgggtgggccgctacgaggtgggccggaccatcggccggggcaccttcgccaaggttaagttcgccgtcgacgccgacaccggcgcggctttcgccattaaggtgctcgacaaggagaccatcttcacccaccgcatgctccaccaggtgttggccggcaggacaaagatatacatagtcttggaacttgtcactggaggtgaactgtttgatagaatagtccgccatgggaagctacgtgagaatgaagctaggaagtatttccagcagctttattgatgccattgattattgccacagcaaaaggagtttatcatagagatttgaagcctcaaaacttgcttcttgactctcgtggaaacttgaaactttctgattttggacttagcacattgtctcaaaatggagtaggccttgtacacacgacatgtggaacaccaaattatgttgcacctgaggtgctaagtagcaatggatatgacggatctgcagcagacatttggtcgtgtggtgtcattctctatgttttaatggctggttaccttccctttgaggagaacgaccttccacatttgtatgaaaagataactgcagctcagtactcatgcccatattggttctctccaggagccaagtcattgatccagagaatacttgatccaaatccaagaactcctatagtgtgtgtgaaactctctacatgtattttgtcatatatttgtatatattgatgttctgatttgtgtttgggaaataccatatacaagatcaatgtaaggttatctctagtaatttactcatcatatcttttatcttatcacctattttaaactacactatgtaaacagtgcaaaacgtgttttgtacgaccata

SEQ ID NO: 83271 - DNA, 2572 bp, Zea Mays
agtggcacgggcgcggacactgccgctcgcgatatttgcgagagagagagagagagggcccgagagccgaggacgagtgaagtctggctggcgtgatgctgcttcggagcgcgtcctcgccgctgctcaactgcgggcgcgcgccggctgcggcggcgtcggtcgagcacctcgcggtggtttcgccgttgttgtcaccggcagtggcggcgcctaggcatgggccggtgctgtgccgcgccatgtccgagggggacctcgccgcgccgctcgtgcccaagaaggacgatggacacgggagggcgccgaggctgtccctgtccgcgtccttgtcctcgtccgcctccatcttcgtcgaggaggaggacggcgagggcgaggaggaggaggacctggtcgcggtcgcgggggccggcgtggacgtgccgctgccgctgcgtcggctgctgacgaacacggggctggacgtgtccgccgccgcggcgctggcgttcgtggagcagggcgtcgggggcagcggcgggggcgggaaggcgtgcggcagcagcggcggcaagggtgggatcggggacggcgacggtggcagcaaccgcgccgccacggacgcccactaccggcagatgatcgaggcggacccgggcaactcgctgctcctggtcaactacgccaggttcctcaaggaggtggccggggacgcggcaagggcgcaggagtactgcgagcgcgccatcctcgccagccccggcgacgccgaggcgctgtcgctctacgcgggcctcgtttgggagaccagccgcgacgctggccgcgccgaggactactacagccgcgccgtccaggccgcgcccgacgactgctacgtcctgggctcttacgccgggttcctgtgggacgccgaggaagacgaggaagagaactccgagcccttgccaccgccttcgctgttccagggggcagctcagcgtccttccatcacagcggcctcttagatgatcgtgaactcgatctagatctcaccaccgcctgtgaacgaagctgaatctggaaccctggagagtggagagtgactgggtgataaccgtgcagaaacccccgacgagtgactcacatcgccggcaggctcctcgccgcttgtgaactgaatcacggcacatgtaaaactgaatctggcagagcacacacgcgcctaagcctattagcgtctatagactttgcagggctatgtatagtagatatgtagattgagaccctgctgaacttgtacgtgcagtatgttcctagtcacttgtgtatcattactagtaatgcagtatccctcgtgaaataaacgtcaaaaccccttcctgctgcttcatccgagcagagcatcttccaagaagagcagatatcgaactgcaagaactgatgcactgaatcacaaagctttgcaaaatcgtgtacatatcttacttggacggcaacttaattgactggtagccctggagaataatatgaaattctgcctgtctgccaactacaaatacctggtatgtcaacagaaactaagataaagaatacacggtgtcacttgccactcttcaagctcctggtgctgagactaattctaatacataataccagccagcagtttactgcagaaatagcaaaatgtgataaaggaagctggggcacaactccctcctttcataggagtcggcttgataggttcctatgcagtaagtccaggttcgtcaggtgtaatttgagcgcggatcggctctcgatcaagacccttcgtcggcgacttgttttctagctcttctgcagatggaacagatggtgcaatgtcaactttggttgtttgctctgaaggcagtttaggtagagatttccgttggggcttcttcactgcatttgcagcaggtgctttcttgacaccattttgggagaccctttcatcgagactcagtcgacctgaacgagctggaggatttggattcccttctgtccctcctgaggatgtgttcttggagcgaccaagctttggtgacctagctcttgttgtaggtatcaggagggcggtggaggacggtcgacggcggctggcggctggcggcaccacggctgtggcgtgtgggcgcgatgcgtctgtaggttggcggctggagcaccgcactgcgtgtgggcgcgatggacgcatagacgcattaaggcccattaaggcccacggacgcatagaacgtccatataacggaaaaaacgtccagaacgtgtgtttcgacgtttaaacgttgtttaaacgtccagaacggacgttctacacagtttttgtaaaacgtatggacgctttaactcctaatcacgttttagcgtttaaacgacgcttaatcgtcgtttaaacgacgttttaataaccatgcagaaacttgaaggatgattatttgattaatatgatcttttcaagttgaatcatagtgtagataatttttttctctagcggtaaactgagatactttgtgatttatatatagaatatctgcagccaacaatttaatggaggaaaaacaggaagaagaaacttagccaaaagtat

SEQ ID NO: 83272 - DNA, 2843 bp, Zea Mays
agtggcacgggcgcggacactgccgctcgcgatatttgcgagagagagagagagagggcccgagagccgaggacgagtgaagtctggctggcgtgatgctgcttcggagcgcgtcctcgccgctgctcaactgcgggcgcgcgccggctgcggcggcgtcggtcgagcacctcgcggtggtttcgccgttgttgtcaccggcagtggcggcgcctaggcatgggccggtgctgtgccgcgccatgtccgagggggacctcgccgcgccgctcgtgcccaagaaggacgatggacacgggagggcgccgaggctgtccctgtccgcgtccttgtcctcgtccgcctccatcttcgtcgaggaggaggacggcgagggcgaggaggaggaggacctggtcgcggtcgcgggggccggcgtggacgtgccgctgccgctgcgtcggctgctgacgaacacggggctggacgtgtccgccgccgcggcgctggcgttcgtggagcagggcgtcgggggcagcggcgggggcgggaaggcgtgcggcagcagcggcggcaagggtgggatcggggacggcgacggtggcagcaaccgcgccgccacggacgcccactaccggcagatgatcgaggcggacccgggcaactcgctgctcctggtcaactacgccaggttcctcaaggaggtggccggggacgcggcaagggcgcaggagtactgcgagcgcgccatcctcgccagccccggcgacgccgaggcgctgtcgctctacgcgggcctcgtttgggagaccagccgcgacgctggccgcgccgaggactactacagccgcgccgtccaggccgcgcccgacgactgctacgtcctgggctcttacgccgggttcctgtgggacgccgaggaagacgaggaagagaactccgagcccttgccaccgccttcgctgttccagggggcagctcagcgtccttccatcacagcggcctcttagatgatcgtgaactcgatctagatctcaccaccgcctgtgaacgaagctgaatctggaaccctggagagtggagagtgactgggtgataaccgtgcagaaacccccgacgagtgactcacatcgccggcaggctcctcgccgcttgtgaactgaatcacggcacatgtaaaactgaatctggcagagcacacacgcgcctaagcctattagcgtctatagactttgcagggctatgtatagtagatatgtagattgagaccctgctgaacttgtacgtgcagtatgttcctagtcacttgtgtatcattactagtaatgcagtatccctcgtgaaataaacgtcaaaaccccttcctgctgcttcatccgagcagagcatcttccaagaagagcagatatcgaactgcaagaactgatgcactgaatcacaaagctttgcaaaatcgtgtacatatcttacttggacggcaacttaattgactggtagccctggagaataatatgaaattctgcctgtctgccaactacaaatacctggtatgtcaacagaaactaagataaagaatacacggtgtcacttgccactcttcaagctcctggtgctgagactaattctaatacataataccagccagcagtttactgcagaaatagcaaaatgtgataaaggaagctggggcacaactccctcctttcataggagtcggcttgataggttcctatgcagtaagtccaggttcgtcaggtgtaatttgagcgcggatcggctctcgatcaagacccttcgtcggcgacttgttttctagctcttctgcagatggaacagatggtgcaatgtcaactttggttgtttgctctgaaggcagtttaggtagagatttccgttggggcttcttcactgcatttgcagcaggtgctttcttgacaccattttgggagaccctttcatcgagactcagtcgacctgaacgagctggaggatttggattcccttctgtccctcctgaggatgtgttcttggagcgaccaagctttggtgacctagctcttgttgtaggtatctaagatcaacagaaaataatataacatccttcagaagttagagagccataacctttatacctagtgggttagtgtcaagctggctatgaaaactttaagtgtgacataactgtaattggaaattcaaaagcaagaatccagtgaaaacaagaccagactaggctttcggagccttttaattttttgttttcttattcaaatagctgtcaactccacaaaagtatggattatgtacttgcaatgaatttaacatataactattaactaggttacaaacctaacaataccacaaatcgcccagctaaagaaaagaataacatgatcattggggtaaccactcattttatctattaagctggcaattaagaacctagtttacaactgtacgagtacggaaaattcaggagtgtaaggtgcatgatcaatcttaaacattgtataggcaaaagactgtactggattgagcttttgcaaaatatgatatgttatatttgagtacaagactgcaaagctcttttgctgtactactcaattgagtaaaattttgtagctacaaagaaagaaaaagctcttttattcgcttgttaaagaatactataccaagattaaggttttcagttcaacatgatggtaaactgaattaaataaatattgcattttctataagttatgttaacacttaacaagcagaaactcatggttattaaagcggtaaaacgttaaaacgttatgaaccaacttttcaacgtttaaacgtttaaacgaacgttgaaacgtcttttcagacttgac

SEQ ID NO: 83273 - DNA, 3514 bp, Zea Mays
ctgaaatcctctctaaaggctaggcttatctgcacactctgtgctgagtaggagatgccaaataattcccagcagaacctcttggctggtgcctggtggagtgagaatcaaaagaaagtgccacttgcaagttgcaacagaattattgcctcaataacatgagaatgtgcatcagggctacccaacagagacattattgcgtttccttaaagctagagagtggcatgtgaataaggctcacaggatgcttgaagattctttgaattggaggatgcaaaatgaaatcgatagtatattggagaaacctattatcccagtagatttgtatagatcaattcgtgatacacagcttattgggttatcaggatactccaaagagggcattcctgtatttgcagttggtgttgggctgagtacatatgacaaagcttcggttaactactatgtgcaatctcacattcagatcaatgagtaccgagatcgttttattttgcctacagtgacaaagaagtatgggagacctattaccacctgtataaaggttctcgatatgactggtctgaaattgtcagcactacaccaaatgaagattgtgactgcaatatctacagttgatgatttgaattaccctgaaaagactgagacctattatatagtaaacgctccatacatattttctgcatgttggaaggtcgtgaagcctctgttgcaagagagaacaaggaagaaagttcatgtgttgcgtggctgcgggagagacgagcttctacagatcatggactactcctccctcccccatttctgcagacaggagggctcgggctcatccaaacattcgtcaggcgacgccgataactgcttctctctcgaccacccgttccaccaggagctctacagcttcatccaggagcaggcgctgaaccaggagctcatcaagcagggctccttgcacgtgaaaatccccgagcaggaccctgaggacgcaaagatcgtggaggtcatcgaggccgagttccacaagcttggcgtgcagaacgggtccgccaatggcatcgaccaagcatagcacctttgtctaataaggccagcctgattcaaccgagacgttgcttgccacttctgatgcaactaatcctactgtttaatttttttggtggggtgggcccacccccattgctgtttcctggggggaggggggggggggggggggtgattggtattggtggtatacatagcaaagtcatttgcagatccatccatgatgcaggactgagatagacgatatcacctgtgtaaacttgcagatttgcaatgtgtcctcatctcatatgtatgctgagttgagatgaaatgaataaatcatcctacaagttttttttgagtcatcttcagaattgtgttgtgctcagtcagaaaagtaaccatgcgtttctgtgccgattcttgctagccctaattaatataaggcgaaacagataatgcctatccattggagggattagaggaaggttctccccttagaaagattgtgggtcaccaaacaaagggtaaacgaaccgaaccgaaccgtgcatatcaacaacattacaacaaagtaagcatgctcttggttggcagtagttaccacttgataaaaagaagagggagaccatgtgctttggcttcctctctgagccatctttcttgctctagccttaggccttagcaatggagatcagcgacgagcagaggatgcaagtggagtgccagcgccttccgccttcctggcaaggcaacggatcagacgccgatgtcgaagtggatcatcatctgtggccgtcaaaagatggccctcttccaatattccttaagtttgagaacgtggagtacagggtgtcaggaggcgagaggaagaggaccagcatcgggaacgagatcctcgtcgacccgtcgctgctcctcctcgacgagcccacctccggcctcgactccacgtcggcgagcaagctcatctttatcctccagcgcctggccaagacgcggaggacgatcatcacgacgatccaccagccgtcgagccggatgttccacatgttcgacaagctgctgctcatctccgacgggcacgccatctaccacggcaaggcccgggactgcatgcaccacttctcctcgctgggcttcgtcccggagatccccatgaacccggccgagttcctgctggacctcgccaccggcaacctcgacgacatcagcgtccccgaggcgctgcgcggctcgccggacccgcaggagttcaggtcccaggtcatcaggcacctgcagctcaagtaccgggcgggcgccgaggctcccgcggggagaaggacgcccactgagcagctgcgtctggcggtgcgggcgcataacaaggaccgccgccggcggagcatcggctggctccagcagttcgccgtgctgtcccggcgcacgttccgggagcgcgcatccgactacctggacaagatgcggctcgcgcaggccgtcggcgtggcgctcctgctgggtctcctctggtggaagtcccagaccgggaacgaggcccagctgcgggaccaggtcggtctcatcttctacatctgcatcttctggacgtcgtcgtcgctcttcggctccgtctacgtgttccccttcgagaagctgtacctggtcaaggagcgcaaggcggacatgtaccggctgagcgcctactacgccagcagcacgctgtgcgacgccgtgccgcacgtcgtgtacccggtgctcttcatggccatcctctacttcatggccggcctccgccgcaccgtgccgtgcttcttcctcacgctcctcgccacgctgctcatcgtgttcaccagccagggcaccggggagctgctgggcgccgccatcctcagcgtcaagagggcgggggtcatggcgtcgctcgtgctcatgctcttcctcctcaccggcggctactacgtccagcacatccccaagttcatccgctggctcaagtacgtctccttcatgcactacggcttcaacctgctgctcaaagcgcagtaccacggccacctcacgtacaactgtgccagccggggcggctgccagcgcctgcagtcgtcgccgtcgttcggcaccgtggacctcgacggcggcatgcgcgaggtctggatcctgctcgccatggcgctcgcataccgactcctcgcctacttctgcctcctcaagcggatcagcctcacgcccttgtgatcatccacctaattaaattggggcgcaatttcgcatgcctgtgtgaatgattattcatgggaaatgcctgcatggcgatgtgtatcaggctatcagctatactttgcagactgctgggcctaatttacgaggtgtatttgtctgacacaagttttagaagaagagtgaacaatgacatagcatttttagattatataagtgtttatgctagccgttcctagttataagttgcatttttagctttattaataagatcatctagattttgataaac

SEQ ID NO: 83274 - DNA, 1099 bp, Zea Mays
gcaaggcagcagaatagcagtagcccatgttgttgaggacaggtcgcctgtaggccaaccgaccaaagggccacagcactacagcaggccggccaacacgactccgagttggaggcgacctccgctcccctcttcctccctctttccgactttccctccctactcgcccccgcgccgcgccaatcttttttccctcttgacggcgcacataaatccgcgccaaatcgtcaaaccaaaaccaggccgcgcccgcctcgtcagtcctcagtcctcactttcgggccgagctccggatatccagcggcggcaatggcagccgaagccagcgccgtccagcagctcgctggcctcctggaccaagtggacgcgccgctgaagaagacatttgagaatgtgcatcagggctacccaacagagacattattgcgtttccttaaagctagagagtggcatgtgaataaggctcacaggatggtgattgttaacactgcagttttccttttcaattttcatattgatgaaccctaaaggcctaaagtaaatgttacattacccggggaaaatttcttttgctagcttgaagattctttgaattggaggatgcaaaatgaaatcgatagtatattggagaaacctattatcccagtagatttgtatagatcaattcgtgatacacagcttattgggttatcaggatactccaaagagggcattcctgtatttgcagttggtgttgggctgagtacatatgacaaagcttcggttaactactatgtgcaatctcacattcagatcaatgagtaccgagatcgttttattttgtgacaaagaagtatgggagacctattaccacctgtataaaggttctcgatatgactggtctgaaattgtcagcactacaccaaatgaagattgtgactgcaatatctacagttgatgatttgaattaccctgaaaagactgagacctattatatagtaaacgctccatacatattttctgcatgttggaaggtcgtgaagcctctgttgcaagagagaacaaggaagaaagttcatgtgttgcgtggctgcgggagagacgagcttctacagttctg

SEQ ID NO: 83275 - DNA, 737 bp, Zea Mays
agaggacttgtttaccttgtgctttcaatagtgaatttggtaaacttggcctccacctgtctttcatgagtttcaagagtggcaagaagattgctttcatcatcgacatgacagacttgaaccgctcggtctacccttctgaaccatctgagctcattaaggtttttgaagcacatactacgctagcacagccaagcatagacgagaccatggcttctataaggaacctgcaatctggtcgcacagcaatactaagattgtgccggatggtatcccggctgattcatggttacaatgatgacctgatcactggagtgcaagctgtaggaagtaaacatcatccggatatgtaggtagtaggcattaacagtgttggttttgtttttgtttttgcatgtaggcttaagatgtttgaatgcataaagcagtccttttcaggtggacgtgcaagcgattttggttactgcaaatccttgtaactgcccgtttattacagcaacaatgcataactggtagcttggtgcgttagagtgatggattacagtcttgcagatatgtcggcactgttgtatacgagttagtctaaaaggagccaggctaatgttttctccccgcagctgggactgttgctgaaagattgtgcattttttttacaacgactccaatatatttaattaagcattgttacgcaaacacctctagaaaaggtgaagaaaagatttaataaaaagttcgac

SEQ ID NO: 83276 - DNA, 3452 bp, Zea Mays
tttccctccagaatccctcaacggaacgctgcagcagtgcaggtcgctttcttccccaaaattttgaaccccgaaccctagctctgctcctcagttccccgtctccatggacatcggcggcagcggcggcatcatattgtcgcccggatcggaggatgataagtttgcgcggaggcgctcccgccgtgtgagcttcgcggacaccaccgcggtgcacgtgttcgaccgcgacgaggacttcgagacgcctcccgaggagcgcgagcccgactccacccccgcacccccttctcccaggaggtcctcggttggccgggaggttgaggacgacacggaggaggatttcaaccgcccccctgtcatcttcctccacgacgtcgactcgtcgtacccagacagcgccgctgaatccatcgcctccgccgatgatgaaaacttttttggacctgtgtcggcaagctttattcaaacaggaagaccatcagattctggaatgtcagaggatgacaaccatgatataactatggattccaggacgttctctttgcattttcgcaatattgctccaccagatgactgtacagcctactcagctgggagtctaatgacacctaatactgcatctgagggacccctgaaggaacttactgcatctaatcctgcaagagcatcaattaatggccgagatacattgactgacatgagtttgttgagtggtaaccccagaacttatggttatgataagttgtcacccacgttgaacagtatgatgaagaagataaaagggagcaagcaaacaaactctcctaaacttggtatttctgatgtaacttctgattgtgtattaaccttgtctacatctgaggaagaaagtagggaagaaaatttatgcattgacaatggtgtatcttctgatgagctggtcatggttaatacaattgcagagcacatttctatgagaaatccagtttcgaccagcacagatctgattcaagatgacaatgaaatgataattgatgtccaggagaattcaaagaactgcaaccatgatcacatggatgatgaccctggtgccaataatactgcagaacctcctgcaaagatttccccagcatataagtcattcatgattaatggtgatgtgcaatcccacctagtcgatcaatcttcgtcaaaagatcgaccatctggatcaaattgcactgcaagtgtttcctccatgtgtaatgttgacatggaaacccatcttttggatcaactacctggtaaggataacacatatgctgcccagtcgtcaagtgaagctactgccattttgctgatggatgctgagcagctgcggcagaaaaatgaggtgatggatacagaaacagttctacacactccaagaactgcaggtctgcagttgcaagttccacgaggatccatatcctccttacgctcaaaaaggcataagcttttcactaatactgtatccaatagtaaagtagcaagacaggagggttgttcttcgggtactgagtttgttcaccatgacaagagactttcttctctgaagcatcaagaattggctgcagcttcccagttacaattggttgagaagaatgaacttggtcatcgagcaagtgacatgttcagcaatactgaagatcatgattctacgttatctgtttcttctcattctgttccaaagctgaagaaaaccaatgaatcttttgtcctaggcactcctcgaagacatgggctaaatgagtctactaaggtcctagatacattatgtcatgcctttactttggatagccaacctagtcgtgaatgcaactctcatgtggatttaaatggtgttggaagaaagagaactgctgaggaaaatggttatgctgtgcaagagtgtcctgaaaaaaccactaagacagcaagaagccctagaaaatctagaaaagagattccttgtgtatctcagccttctatgattgaagaaaaacagaatggtgctcatgataatggaaagtccgtggatattgattggagcaaggtagtatgtactataactaatgccacggagcaagttttgccagcatcaataagcaagtataatctacaacagcttgacatgctaagcgataggttggatgagattcatatggctagaaaatataaaaggctttctactgctgtgaggatcaaagctttctgtggtgataagcaaaagagattagaggaggcaaggtttctccatgacaagcttttctatgaaaaggcgaagctacaaataaataatatgaagctagttaaactccaaaaaaaggctcaactatgtcaagatggaattcaagagtgctgctttctgaaatccaagattttgggcgctggacacatggaggattcttcacttcctgcagctactacagtcagtgctggtgatagacaggaagaacttgatatcatttctgaaaagaggcttgaactcaaaattattcaacggaaggtggagaaattaaggagttcccttgaatgttttcacaatattgaaggtggcattggtagtgatagtgttgtgagctctgcaagttgaatgacatagttaaaaggggcaacaagtgtgatatcatcctcaactatcacaatttgttgttccaaaggaaacaagcttgctgcttggaaatcttattgatgttttagaagaaatcaaattatctaagttggagttagtaaatcttacctccgctgcttttgttttggagtcccagacacgtaaacttggcctccacctgtctttcatgagtttcaagagtggcaagaagattgctttcatcatcgacatgacagacttgaaccgctcggtctacccttctgaaccatctgagctcattaaggtttttgaagcacatactacgctagcacagccaagcatagacgagaccatggcttctataaggaacctgcaatctggtcgcacagcaatactaagattgtgccggatggtatcccggctgattcatggttacaatgatgacctgatcactggagtgcaagctgtaggaagtaaacatcatccggatatgtaggtagtaggcattaacagtgttggttttgtttttgtttttgcatgtaggcttaagatgtttgaatgcataaagcagtccttttcaggtggacgtgcaagcgattttggttactgcaaatccttgtaactgcccgtttattacagcaacaatgcataactggtagcttggtgcgttagagtgatggattacagtcttgcagatatgtcggcactgttgtatacgagttagtctaaaaggagccaggctaatgttttctccccgcagctgggactgttgctgaaagattgtgcattttttttacaacgactccaatatatttaattaagcattgttacgcaaacacctctagaaaaggtgaagaaaagatttaataaaaagttcgac

SEQ ID NO: 83277 - DNA, 3641 bp, Zea Mays
cctcacctcacataactacataagagaccgaaacatatttccctccagaatccctcaacggaacgctgcagcagtgcaggtcgctttcttccccaaaattttgaaccccgaaccctagctctgctcctcagttccccgtctccatggacatcggcggcagcggcggcatcatattgtcgcccggatcggaggatgataagtttgcgcggaggcgctcccgccgtgtgagcttcgcggacaccaccgcggtgcacgtgttcgaccgcgacgaggacttcgagacgcctcccgaggagcgcgagcccgactccacccccgcacccccttctcccaggaggtcctcggttggccgggaggttgaggacgacacggaggaggatttcaaccgcccccctgtcatcttcctccacgacgtcgactcgtcgtacccagacagcgccgctgaatccatcgcctccgccgatggtagtcaggttgctgcatttttcaactggattatgtcagatgaaaacttttttggacctgtgtcggcaagctttattcaaacaggaagaccatcagattctggaatgtcagaggatgacaaccatgatataactatggattccaggacgttctctttgcattttcgcaatattgctccaccagatgactgtacagcctactcagctgggagtctaatgacacctaatactgcatctgagggacccctgaaggaacttactgcatctaatcctgcaagagcatcaattaatggccgagatacattgactgacatgagtttgttgagtggtaaccccagaacttatggttatgataagttgtcacccacgttgaacagtatgatgaagaagataaaagggagcaagcaaacaaactctcctaaacttggtatttctgatgtaacttctgattgtgtattaaccttgtctacatctgaggaagaaagtagggaagaaaatttatgcattgacaatggtgtatcttctgatgagctggtcatggttaatacaattgcagagcacatttctatgagaaatccagtttcgaccagcacagatctgattcaagatgacaatgaaatgataattgatgtccaggagaattcaaagaactgcaaccatgatcacatggatgatgaccctggtgccaataatactgcagaacctcctgcaaagatttccccagcatataagtcattcatgattaatggtgatgtgcaatcccacctagtcgatcaatcttcgtcaaaagatcgaccatctggatcaaattgcactgcaagtgtttcctccatgtgtaatgttgacatggaaacccatcttttggatcaactacctggtaaggataacacatatgctgcccagtcgtcaagtgaagctactgccattttgctgatggatgctgagcagctgcggcagaaaaatgaggtgatggatacagaaacagttctacacactccaagaactgcaggtctgcagttgcaagttccacgaggatccatatcctccttacgctcaaaaaggcataagcttttcactaatactgtatccaatagtaaagtagcaagacaggagggttgttcttcgggtactgagtttgttcaccatgacaagagactttcttctctgaagcatcaagaattggctgcagcttcccagttacaattggttgagaagaatgaacttggtcatcgagcaagtgacatgttcagcaatactgaagatcatgattctacgttatctgtttcttctcattctgttccaaagctgaagaaaaccaatgaatcttttgtcctaggcactcctcgaagacatgggctaaatgagtctactaaggtcctagatacattatgtcatgcctttactttggatagccaacctagtcgtgaatgcaactctcatgtggatttaaatggtgttggaagaaagagaactgctgaggaaaatggttatgctgtgcaagagtgtcctgaaaaaaccactaagacagcaagaagccctagaaaatctagaaaagagattccttgtgtatctcagccttctatgattgaagaaaaacagaatggtgctcatgataatggaaagtccgtggatattgattggagcaaggtagtatgtactataactaatgccacggagcaagttttgccagcatcaataagcaagtataatctacaacagcttgacatgctaagcgataggttggatgagattcatatggctagaaaatataaaaggctttctactgctgtgaaaaaggctcaactatgtcaagatggaattcaagagtgctgctttctgaaatccaagattttgggcgctggacacatggaggattcttcacttcctgcagctactacagtcagtgctggtgatagacaggaagaacttgatatcatttctgaaaagaggcttgaactcaaaattattcaacggaaggtggagaaattaaggagttcccttgaatgttttcacaatattgaaggtggcattggtagtgatagtgttgtgaggtatgctgaagagcagttgatgatgagaaatcagcatcgcatcatccactggcaagcagggctctgcaagttgaatgacatagttaaaaggggcaacaagtgtgatatcatcctcaactatcacaatttgttgttccaaaggatcatcttaaacatcagtgatacatctagcatatttgtgaacaattcactgaatggaaaccaaattggaaagacatttccaaatttggatgcatctttggcattcaattttgttttcgaagccgaggagaaccaaagagttagtgatttacagtccttgcagaagaagacaatggaaacaagcttgctgcttggaaatcttattgatgttttagaagaaatcaaattatctaagttggagttagtaaatcttacctccgctgcttttgttttggagtcccagacacgtaaacttggcctccacctgtctttcatgagtttcaagagtggcaagaagattgctttcatcatcgacatgacagacttgaaccgctcggtctacccttctgaaccatctgagctcattaaggtttttgaagcacatactacgctagcacagccaagcatagacgagaccatggcttctataaggaacctgcaatctggtcgcacagcaatactaagattgtgccggatggtatcccggctgattcatggttacaatgatgacctgatcactggagtgcaagctgtaggaagtaaacatcatccggatatgtaggtagtaggcattaacagtgttggttttgtttttgtttttgcatgtaggcttaagatgtttgaatgcataaagcagtccttttcaggtggacgtgcaagcgattttggttactgcaaatccttgtaactgcccgtttattacagcaacaatgcataactggtagcttggtgcgttagagtgatggattacagtcttgcagatatgtcggcactgttgtatacgagttagtctaaaaggagccaggctaatgttttctccccgcagctgggactgttgctgaaagattgtgcattttttttacaacgactccaatatatttaattaagcattgttacgcaaacacctctagaaaaggtgaagaaaagatttaataaaaagttcgac

SEQ ID NO: 83278 - DNA, 3707 bp, Zea Mays
cctcacctcacataactacataagagaccgaaacatatttccctccagaatccctcaacggaacgctgcagcagtgcaggtcgctttcttccccaaaattttgaaccccgaaccctagctctgctcctcagttccccgtctccatggacatcggcggcagcggcggcatcatattgtcgcccggatcggaggatgataagtttgcgcggaggcgctcccgccgtgtgagcttcgcggacaccaccgcggtgcacgtgttcgaccgcgacgaggacttcgagacgcctcccgaggagcgcgagcccgactccacccccgcacccccttctcccaggaggtcctcggttggccgggaggttgaggacgacacggaggaggatttcaaccgcccccctgtcatcttcctccacgacgtcgactcgtcgtacccagacagcgccgctgaatccatcgcctccgccgatgatgaaaacttttttggacctgtgtcggcaagctttattcaaacaggaagaccatcagattctggaatgtcagaggatgacaaccatgatataactatggattccaggacgttctctttgcattttcgcaatattgctccaccagatgactgtacagcctactcagctgggagtctaatgacacctaatactgcatctgagggacccctgaaggaacttactgcatctaatcctgcaagagcatcaattaatggccgagatacattgactgacatgagtttgttgagtggtaaccccagaacttatggttatgataagttgtcacccacgttgaacagtatgatgaagaagataaaagggagcaagcaaacaaactctcctaaacttggtatttctgatgtaacttctgattgtgtattaaccttgtctacatctgaggaagaaagtagggaagaaaatttatgcattgacaatggtgtatcttctgatgagctggtcatggttaatacaattgcagagcacatttctatgagaaatccagtttcgaccagcacagatctgattcaagatgacaatgaaatgataattgatgtccaggagaattcaaagaactgcaaccatgatcacatggatgatgaccctggtgccaataatactgcagaacctcctgcaaagatttccccagcatataagtcattcatgattaatggtgatgtgcaatcccacctagtcgatcaatcttcgtcaaaagatcgaccatctggatcaaattgcactgcaagtgtttcctccatgtgtaatgttgacatggaaacccatcttttggatcaactacctggtaaggataacacatatgctgcccagtcgtcaagtgaagctactgccattttgctgatggatgctgagcagctgcggcagaaaaatgaggtgatggatacagaaacagttctacacactccaagaactgcaggtctgcagttgcaagttccacgaggatccatatcctccttacgctcaaaaaggcataagcttttcactaatactgtatccaatagtaaagtagcaagacaggagggttgttcttcgggtactgagtttgttcaccatgacaagagactttcttctctgaagcatcaagaattggctgcagcttcccagttacaattggttgagaagaatgaacttggtcatcgagcaagtgacatgttcagcaatactgaagatcatgattctacgttatctgtttcttctcattctgttccaaagctgaagaaaaccaatgaatcttttgtcctaggcactcctcgaagacatgggctaaatgagtctactaaggtcctagatacattatgtcatgcctttactttggatagccaacctagtcgtgaatgcaactctcatgtggatttaaatggtgttggaagaaagagaactgctgaggaaaatggttatgctgtgcaagagtgtcctgaaaaaaccactaagacagcaagaagccctagaaaatctagaaaagagattccttgtgtatctcagccttctatgattgaagaaaaacagaatggtgctcatgataatggaaagtccgtggatattgattggagcaaggtagtatgtactataactaatgccacggagcaagttttgccagcatcaataagcaagtataatctacaacagcttgacatgctaagcgataggttggatgagattcatatggctagaaaatataaaaggctttctactgctgtgaggatcaaagctttctgtggtgataagcaaaagagattagaggaggcaaggtttctccatgacaagcttttctatgaaaaggcgaagctacaaataaataatatgaagctagttaaactccaaaaaaaggctcaactatgtcaagatggaattcaagagtgctgctttctgaaatccaagattttgggcgctggacacatggaggattcttcacttcctgcagctactacagtcagtgctggtgatagacaggaagaacttgatatcatttctgaaaagaggcttgaactcaaaattattcaacggaaggtggagaaattaaggagttcccttgaatgttttcacaatattgaaggtggcattggtagtgatagtgttgtgaggtatgctgaagagcagttgatgatgagaaatcagcatcgcatcatccactggcaagcagggctctgcaagttgaatgacatagttaaaaggggcaacaagtgtgatatcatcctcaactatcacaatttgttgttccaaagtgatacatctagcatatttgtgaacaattcactgaatggaaaccaaattggaaagacatttccaaatttggatgcatctttggcattcaattttgttttcgaagccgaggagaaccaaagagttagtgatttacagtccttgcagaagaagacaatggaaacaagcttgctgcttggaaatcttattgatgttttagaagaaatcaaattatctaagttggagttagtaaatcttacctccgctgcttttgttttggagtcccagacacgtaaacttggcctccacctgtctttcatgagtttcaagagtggcaagaagattgctttcatcatcgacatgacagacttgaaccgctcggtctacccttctgaaccatctgagctcattaaggtttttgaagcacatactacgctagcacagccaagcatagacgagaccatggcttctataaggaacctgcaatctggtcgcacagcaatactaagattgtgccggatggtatcccggctgattcatggttacaatgatgacctgatcactggagtgcaagctgtaggaagtaaacatcatccggatatgtaggtagtaggcattaacagtgttggttttgtttttgtttttgcatgtaggcttaagatgtttgaatgcataaagcagtccttttcaggtggacgtgcaagcgattttggttactgcaaatccttgtaactgcccgtttattacagcaacaatgcataactggtagcttggtgcgttagagtgatggattacagtcttgcagatatgtcggcactgttgtatacgagttagtctaaaaggagccaggctaatgttttctccccgcagctgggactgttgctgaaagattgtgcattttttttacaacgactccaatatatttaattaagcattgttacgcaaacacctctagaaaaggtgaagaaaagatttaataaaaagttcgac

SEQ ID NO: 83279 - DNA, 3614 bp, Zea Mays
cctcacctcacataactacataagagaccgaaacatatttccctccagaatccctcaacggaacgctgcagcagtgcaggtcgctttcttccccaaaattttgaaccccgaaccctagctctgctcctcagttccccgtctccatggacatcggcggcagcggcggcatcatattgtcgcccggatcggaggatgataagtttgcgcggaggcgctcccgccgtgtgagcttcgcggacaccaccgcggtgcacgtgttcgaccgcgacgaggacttcgagacgcctcccgaggagcgcgagcccgactccacccccgcacccccttctcccaggaggtcctcggttggccgggaggttgaggacgacacggaggaggatttcaaccgcccccctgtcatcttcctccacgacgtcgactcgtcgtacccagacagcgccgctgaatccatcgcctccgccgatgatgaaaacttttttggacctgtgtcggcaagctttattcaaacaggaagaccatcagattctggaatgtcagaggatgacaaccatgatataactatggattccaggacgttctctttgcattttcgcaatattgctccaccagatgactgtacagcctactcagctgggagtctaatgacacctaatactgcatctgagggacccctgaaggaacttactgcatctaatcctgcaagagcatcaattaatggccgagatacattgactgacatgagtttgttgagtggtaaccccagaacttatggttatgataagttgtcacccacgttgaacagtatgatgaagaagataaaagggagcaagcaaacaaactctcctaaacttggtatttctgatgtaacttctgattgtgtattaaccttgtctacatctgaggaagaaagtagggaagaaaatttatgcattgacaatggtgtatcttctgatgagctggtcatggttaatacaattgcagagcacatttctatgagaaatccagtttcgaccagcacagatctgattcaagatgacaatgaaatgataattgatgtccaggagaattcaaagaactgcaaccatgatcacatggatgatgaccctggtgccaataatactgcagaacctcctgcaaagatttccccagcatataagtcattcatgattaatggtgatgtgcaatcccacctagtcgatcaatcttcgtcaaaagatcgaccatctggatcaaattgcactgcaagtgtttcctccatgtgtaatgttgacatggaaacccatcttttggatcaactacctggtaaggataacacatatgctgcccagtcgtcaagtgaagctactgccattttgctgatggatgctgagcagctgcggcagaaaaatgaggtgatggatacagaaacagttctacacactccaagaactgcaggtctgcagttgcaagttccacgaggatccatatcctccttacgctcaaaaaggcataagcttttcactaatactgtatccaatagtaaagtagcaagacaggagggttgttcttcgggtactgagtttgttcaccatgacaagagactttcttctctgaagcatcaagaattggctgcagcttcccagttacaattggttgagaagaatgaacttggtcatcgagcaagtgacatgttcagcaatactgaagatcatgattctacgttatctgtttcttctcattctgttccaaagctgaagaaaaccaatgaatcttttgtcctaggcactcctcgaagacatgggctaaatgagtctactaaggtcctagatacattatgtcatgcctttactttggatagccaacctagtcgtgaatgcaactctcatgtggatttaaatggtgttggaagaaagagaactgctgaggaaaatggttatgctgtgcaagagtgtcctgaaaaaaccactaagacagcaagaagccctagaaaatctagaaaagagattccttgtgtatctcagccttctatgattgaagaaaaacagaatggtgctcatgataatggaaagtccgtggatattgattggagcaaggtagtatgtactataactaatgccacggagcaagttttgccagcatcaataagcaagtataatctacaacagcttgacatgctaagcgataggttggatgagattcatatggctagaaaatataaaaggctttctactgctgtgaggatcaaagctttctgtggtgataagcaaaagagattagaggaggcaaggtttctccatgacaagcttttctatgaaaaggcgaagctacaaataaataatatgaagctagttaaactccaaaaaaaggctcaactatgtcaagatggaattcaagagtgctgctttctgaaatccaagattttgggcgctggacacatggaggattcttcacttcctgcagctactacagtcagtgctggtgatagacaggaagaacttgatatcatttctgaaaagaggcttgaactcaaaattattcaacggaaggtggagaaattaaggagttcccttgaatgttttcacaatattgaaggtggcattggtagtgatagtgttgtgaggtatgctgaagagcagttgatgatgagaaatcagcatcgcatcatccactggcaagcagggctctgcaagttgaatgacatagttaaaaggggcaacaagtgtgatatcatcctcaactatcacaatttgttgttccaaagggatcatcttaaacatcagtgatacatctagcatatttgtgaacaattcactgaatggaaaccaaattggaaagacatttccaaatttggatgcatctttggcattcaattttgttttcgaagccgaggagaaccaaagagttagtgatttacagtccttgcagaagaagacaatggtaaacttggcctccacctgtctttcatgagtttcaagagtggcaagaagattgctttcatcatcgacatgacagacttgaaccgctcggtctacccttctgaaccatctgagctcattaaggtttttgaagcacatactacgctagcacagccaagcatagacgagaccatggcttctataaggaacctgcaatctggtcgcacagcaatactaagattgtgccggatggtatcccggctgattcatggttacaatgatgacctgatcactggagtgcaagctgtaggaagtaaacatcatccggatatgtaggtagtaggcattaacagtgttggttttgtttttgtttttgcatgtaggcttaagatgtttgaatgcataaagcagtccttttcaggtggacgtgcaagcgattttggttactgcaaatccttgtaactgcccgtttattacagcaacaatgcataactggtagcttggtgcgttagagtgatggattacagtcttgcagatatgtcggcactgttgtatacgagttagtctaaaaggagccaggctaatgttttctccccgcagctgggactgttgctgaaagattgtgcattttttttacaacgactccaatatatttaattaagcattgttacgcaaacacctctagaaaaggtgaagaaaagatttaataaaaagttcgac

SEQ ID NO: 83280 - DNA, 3727 bp, Zea Mays
gtcttatgtttgtaaatatccgcactcgtaagtggtatcctcacctcacataactacataagagaccgaaacatatttccctccagaatccctcaacggaacgctgcagcagtgcaggtcgctttcttccccaaaattttgaaccccgaaccctagctctgctcctcagttccccgtctccatggacatcggcggcagcggcggcatcatattgtcgcccggatcggaggatgataagtttgcgcggaggcgctcccgccgtgtgagcttcgcggacaccaccgcggtgcacgtgttcgaccgcgacgaggacttcgagacgcctcccgaggagcgcgagcccgactccacccccgcacccccttctcccaggaggtcctcggttggccgggaggttgaggacgacacggaggaggatttcaaccgcccccctgtcatcttcctccacgacgtcgactcgtcgtacccagacagcgccgctgaatccatcgcctccgccgatggtagtcaggttgctgcatttttcaactggattatgtcagatgaaaacttttttggacctgtgtcggcaagctttattcaaacaggaagaccatcagattctggaatgtcagaggatgacaaccatgatataactatggattccaggacgttctctttgcattttcgcaatattgctccaccagatgactgtacagcctactcagctgggagtctaatgacacctaatactgcatctgagggacccctgaaggaacttactgcatctaatcctgcaagagcatcaattaatggccgagatacattgactgacatgagtttgttgagtggtaaccccagaacttatggttatgataagttgtcacccacgttgaacagtatgatgaagaagataaaagggagcaagcaaacaaactctcctaaacttggtatttctgatgtaacttctgattgtgtattaaccttgtctacatctgaggaagaaagtagggaagaaaatttatgcattgacaatggtgtatcttctgatgagctggtcatggttaatacaattgcagagcacatttctatgagaaatccagtttcgaccagcacagatctgattcaagatgacaatgaaatgataattgatgtccaggagaattcaaagaactgcaaccatgatcacatggatgatgaccctggtgccaataatactgcagaacctcctgcaaagatttccccagcatataagtcattcatgattaatggtgatgtgcaatcccacctagtcgatcaatcttcgtcaaaagatcgaccatctggatcaaattgcactgcaagtgtttcctccatgtgtaatgttgacatggaaacccatcttttggatcaactacctggtaaggataacacatatgctgcccagtcgtcaagtgaagctactgccattttgctgatggatgctgagcagctgcggcagaaaaatgaggtgatggatacagaaacagttctacacactccaagaactgcaggtctgcagttgcaagttccacgaggatccatatcctccttacgctcaaaaaggcataagcttttcactaatactgtatccaatagtaaagtagcaagacaggagggttgttcttcgggtactgagtttgttcaccatgacaagagactttcttctctgaagcatcaagaattggctgcagcttcccagttacaattggttgagaagaatgaacttggtcatcgagcaagtgacatgttcagcaatactgaagatcatgattctacgttatctgtttcttctcattctgttccaaagctgaagaaaaccaatgaatcttttgtcctaggcactcctcgaagacatgggctaaatgagtctactaaggtcctagatacattatgtcatgcctttactttggatagccaacctagtcgtgaatgcaactctcatgtggatttaaatggtgttggaagaaagagaactgctgaggaaaatggttatgctgtgcaagagtgtcctgaaaaaaccactaagacagcaagaagccctagaaaatctagaaaagagattccttgtgtatctcagccttctatgattgaagaaaaacagaatggtgctcatgataatggaaagtccgtggatattgattggagcaaggtagtatgtactataactaatgccacggagcaagttttgccagcatcaataagcaagtataatctacaacagcttgacatgctaagcgataggttggatgagattcatatggctagaaaatataaaaggctttctactgctgtgaggatcaaagctttctgtggtgataagcaaaagagattagaggaggcaaggtttctccatgacaagcttttctatgaaaaggcgaagctacaaataaataatatgaagctagttaaactccaaaaaaaggctcaactatgtcaagatggaattcaagagtgctgctttctgaaatccaagattttgggcgctggacacatggaggattcttcacttcctgcagctactacagtcagtgctggtgatagacaggaagaacttgatatcatttctgaaaagaggcttgaactcaaaattattcaacggaaggtggagaaattaaggagttcccttgaatgttttcacaatattgaaggtggcattggtagtgatagtgttgtgaggtatgctgaagagcagttgatgatgagaaatcagcatcgcatcatccactggcaagcagggctctgcaagttgaatgacatagttaaaaggggcaacaagtgtgatatcatcctcaactatcacaatttgttgttccaaaggatcatcttaaacatcagtgatacatctagcatatttgtgaacaattcactgaatggaaaccaaattggaaagacatttccaaatttggatgcatctttggcattcaattttgttttcgaagccgaggagaaccaaagagttagtgatttacagtccttgcagaagaagacaatggaaacaagcttgctgcttggaaatcttattgatgttttagaagaaatcaaattatctaagttggagttagtaaatcttacctccgctgcttttgttttggagtcccagacacgtaaacttggcctccacctgtctttcatgagtttcaagagtggcaagaagattgctttcatcatcgacatgacagacttgaaccgctcggtctacccttctgaaccatctgagctcattaaggtttttgaagcacatactacgctagcacagccaagcatagacgagaccatggcttctataaggaacctgcaatctggtcgcacagcaatactaagattgtgccggatggtatcccggctgattcatggttacaatgatgacctgatcactggagtgcaagctgtaggaagtaaacatcatccggatatgtagtccttttcaggtggacgtgcaagcgattttggttactgcaaatccttgtaactgcccgtttattacagcaacaatgcataactggtagcttggtgcgttagagtgatggattacagtcttgcagatatgtcggcactgttgtatacgagttagtctaaaaggagccaggctaatgttttctccccgcagctgggactgttgctgaaagattgtgcattttttttacaacgactccaatatatttaattaagcattgttacgcaaacacctctagaaaaggtgaagaaaagatttaataaaaagttcgac

SEQ ID NO: 83281 - DNA, 3720 bp, Zea Mays
aaaagttctaggttgcgagtcttatgtttgtaaatatccgcactcgtaagtggtatcctcacctcacataactacataagagaccgaaacatatttccctccagaatccctcaacggaacgctgcagcagtgcaggtcgctttcttccccaaaattttgaaccccgaaccctagctctgctcctcagttccccgtctccatggacatcggcggcagcggcggcatcatattgtcgcccggatcggaggatgataagtttgcgcggaggcgctcccgccgtgtgagcttcgcggacaccaccgcggtgcacgtgttcgaccgcgacgaggacttcgagacgcctcccgaggagcgcgagcccgactccacccccgcacccccttctcccaggaggtcctcggttggccgggaggttgaggacgacacggaggaggatttcaaccgcccccctgtcatcttcctccacgacgtcgactcgtcgtacccagacagcgccgctgaatccatcgcctccgccgatgatgaaaacttttttggacctgtgtcggcaagctttattcaaacaggaagaccatcagattctggaatgtcagaggatgacaaccatgatataactatggattccaggacgttctctttgcattttcgcaatattgctccaccagatgactgtacagcctactcagctgggagtctaatgacacctaatactgcatctgagggacccctgaaggaacttactgcatctaatcctgcaagagcatcaattaatggccgagatacattgactgacatgagtttgttgagtggtaaccccagaacttatggttatgataagttgtcacccacgttgaacagtatgatgaagaagataaaagggagcaagcaaacaaactctcctaaacttggtatttctgatgtaacttctgattgtgtattaaccttgtctacatctgaggaagaaagtagggaagaaaatttatgcattgacaatggtgtatcttctgatgagctggtcatggttaatacaattgcagagcacatttctatgagaaatccagtttcgaccagcacagatctgattcaagatgacaatgaaatgataattgatgtccaggagaattcaaagaactgcaaccatgatcacatggatgatgaccctggtgccaataatactgcagaacctcctgcaaagatttccccagcatataagtcattcatgattaatggtgatgtgcaatcccacctagtcgatcaatcttcgtcaaaagatcgaccatctggatcaaattgcactgcaagtgtttcctccatgtgtaatgttgacatggaaacccatcttttggatcaactacctggtaaggataacacatatgctgcccagtcgtcaagtgaagctactgccattttgctgatggatgctgagcagctgcggcagaaaaatgaggtgatggatacagaaacagttctacacactccaagaactgcaggtctgcagttgcaagttccacgaggatccatatcctccttacgctcaaaaaggcataagcttttcactaatactgtatccaatagtaaagtagcaagacaggagggttgttcttcgggtactgagtttgttcaccatgacaagagactttcttctctgaagcatcaagaattggctgcagcttcccagttacaattggttgagaagaatgaacttggtcatcgagcaagtgacatgttcagcaatactgaagatcatgattctacgttatctgtttcttctcattctgttccaaagctgaagaaaaccaatgaatcttttgtcctaggcactcctcgaagacatgggctaaatgagtctactaaggtcctagatacattatgtcatgcctttactttggatagccaacctagtcgtgaatgcaactctcatgtggatttaaatggtgttggaagaaagagaactgctgaggaaaatggttatgctgtgcaagagtgtcctgaaaaaaccactaagacagcaagaagccctagaaaatctagaaaagagattccttgtgtatctcagccttctatgattgaagaaaaacagaatggtgctcatgataatggaaagtccgtggatattgattggagcaaggtagtatgtactataactaatgccacggagcaagttttgccagcatcaataagcaagtataatctacaacagcttgacatgctaagcgataggttggatgagattcatatggctagaaaatataaaaggctttctactgctgtgaggatcaaagctttctgtggtgataagcaaaagagattagaggaggcaaggtttctccatgacaagcttttctatgaaaaggcgaagctacaaataaataatatgaagctagttaaactccaaaaaaaggctcaactatgtcaagatggaattcaagagtgctgctttctgaaatccaagattttgggcgctggacacatggaggattcttcacttcctgcagctactacagtcagtgctggtgatagacaggaagaacttgatatcatttctgaaaagaggcttgaactcaaaattattcaacggaaggtggagaaattaaggagttcccttgaatgttttcacaatattgaaggtggcattggtagtgatagtgttgtgagctctgcaagttgaatgacatagttaaaaggggcaacaagtgtgatatcatcctcaactatcacaatttgttgttccaaaggatcatcttaaacatcagtgatacatctagcatatttgtgaacaattcactgaatggaaaccaaattggaaagacatttccaaatttggatgcatctttggcattcaattttgttttcgaagccgaggagaaccaaagagttagtgatttacagtccttgcagaagaagacaatggaaacaagcttgctgcttggaaatcttattgatgttttagaagaaatcaaattatctaagttggagttagtaaatcttacctccgctgcttttgttttggagtcccagacacgtaaacttggcctccacctgtctttcatgagtttcaagagtggcaagaagattgctttcatcatcgacatgacagacttgaaccgctcggtctacccttctgaaccatctgagctcattaaggtttttgaagcacatactacgctagcacagccaagcatagacgagaccatggcttctataaggaacctgcaatctggtcgcacagcaatactaagattgtgccggatggtatcccggctgattcatggttacaatgatgacctgatcactggagtgcaagctgtaggaagtaaacatcatccggatatgtaggtagtaggcattaacagtgttggttttgtttttgtttttgcatgtaggcttaagatgtttgaatgcataaagcagtccttttcaggtggacgtgcaagcgattttggttactgcaaatccttgtaactgcccgtttattacagcaacaatgcataactggtagcttggtgcgttagagtgatggattacagtcttgcagatatgtcggcactgttgtatacgagttagtctaaaaggagccaggctaatgttttctccccgcagctgggactgttgctgaaagattgtgcattttttttacaacgactccaatatatttaattaagcattgttacgcaaacacctctagaaaaggtgaagaaaagatttaataaaaagttcgac

SEQ ID NO: 83282 - DNA, 3665 bp, Zea Mays
gaaaagttctaggttgcgagtcttatgtttgtaaatatccgcactcgtaagtggtatcctcacctcacataactacataagagaccgaaacatatttccctccagaatccctcaacggaacgctgcagcagtgcaggtcgctttcttccccaaaattttgaaccccgaaccctagctctgctcctcagttccccgtctccatggacatcggcggcagcggcggcatcatattgtcgcccggatcggaggatgataagtttgcgcggaggcgctcccgccgtgtgagcttcgcggacaccaccgcggtgcacgtgttcgaccgcgacgaggacttcgagacgcctcccgaggagcgcgagcccgactccacccccgcacccccttctcccaggaggtcctcggttggccgggaggttgaggacgacacggaggaggatttcaaccgcccccctgtcatcttcctccacgacgtcgactcgtcgtacccagacagcgccgctgaatccatcgcctccgccgatgatgaaaacttttttggacctgtgtcggcaagctttattcaaacaggaagaccatcagattctggaatgtcagaggatgacaaccatgatataactatggattccaggacgttctctttgcattttcgcaatattgctccaccagatgactgtacagcctactcagctgggagtctaatgacacctaatactgcatctgagggacccctgaaggaacttactgcatctaatcctgcaagagcatcaattaatggccgagatacattgactgacatgagtttgttgagtggtaaccccagaacttatggttatgataagttgtcacccacgttgaacagtatgatgaagaagataaaagggagcaagcaaacaaactctcctaaacttggtatttctgatgtaacttctgattgtgtattaaccttgtctacatctgaggaagaaagtagggaagaaaatttatgcattgacaatggtgtatcttctgatgagctggtcatggttaatacaattgcagagcacatttctatgagaaatccagtttcgaccagcacagatctgattcaagatgacaatgaaatgataattgatgtccaggagaattcaaagaactgcaaccatgatcacatggatgatgaccctggtgccaataatactgcagaacctcctgcaaagatttccccagcatataagtcattcatgattaatggtgatgtgcaatcccacctagtcgatcaatcttcgtcaaaagatcgaccatctggatcaaattgcactgcaagtgtttcctccatgtgtaatgttgacatggaaacccatcttttggatcaactacctggtaaggataacacatatgctgcccagtcgtcaagtgaagctactgccattttgctgatggatgctgagcagctgcggcagaaaaatgaggtgatggatacagaaacagttctacacactccaagaactgcaggtctgcagttgcaagttccacgaggatccatatcctccttacgctcaaaaaggcataagcttttcactaatactgtatccaatagtaaagtagcaagacaggagggttgttcttcgggtactgagtttgttcaccatgacaagagactttcttctctgaagcatcaagaattggctgcagcttcccagttacaattggttgagaagaatgaacttggtcatcgagcaagtgacatgttcagcaatactgaagatcatgattctacgttatctgtttcttctcattctgttccaaagctgaagaaaaccaatgaatcttttgtcctaggcactcctcgaagacatgggctaaatgagtctactaaggtcctagatacattatgtcatgcctttactttggatagccaacctagtcgtgaatgcaactctcatgtggatttaaatggtgttggaagaaagagaactgctgaggaaaatggttatgctgtgcaagagtgtcctgaaaaaaccactaagacagcaagaagccctagaaaatctagaaaagagattccttgtgtatctcagccttctatgattgaagaaaaacagaatggtgctcatgataatggaaagtccgtggatattgattggagcaaggtagtatgtactataactaatgccacggagcaagttttgccagcatcaataagcaagtataatctacaacagcttgacatgctaagcgataggttggatgagattcatatggctagaaaatataaaaggctttctactgctgtgaggatcaaagctttctgtggtgataagcaaaagagaggaggcaaggtttctccatgacaagcttttctatgaaaaggcgaagctacaaataaataatatgaagctagttaaactccaaaaaaaggctcaactatgtcaagatggaattcaagagtgctgctttctgaaatccaagattttgggcgctggacacatggaggattcttcacttcctgcagctactacagtcagtgctggtgatagacaggaagaacttgatatcatttctgaaaagaggcttgaactcaaaattattcaacggaaggtggagaaattaaggagttcccttgaatgttttcacaatattgaaggtggcattggtagtgatagtgttgtgaggtatgctgaagagcagttgatgatgagaaatcagcatcgcatcatccactggcaagcagggctctgcaagttgaatgacatagttaaaaggggcaacaagtgtgatatcatcctcaactatcacaatttgttgttccaaaggatcatcttaaacatcagtgatacatctagcatatttgtgaacaattcactgaatggaaaccaaattggaaagacatttccaaatttggatgcatctttggcattcaattttgttttcgaagccgaggagaaccaaagagttagtgatttacagtccttgcagaagaagacaatggtaaacttggcctccacctgtctttcatgagtttcaagagtggcaagaagattgctttcatcatcgacatgacagacttgaaccgctcggtctacccttctgaaccatctgagctcattaaggtttttgaagcacatactacgctagcacagccaagcatagacgagaccatggcttctataaggaacctgcaatctggtcgcacagcaatactaagattgtgccggatggtatcccggctgattcatggttacaatgatgacctgatcactggagtgcaagctgtaggaagtaaacatcatccggatatgtaggtagtaggcattaacagtgttggttttgtttttgtttttgcatgtaggcttaagatgtttgaatgcataaagcagtccttttcaggtggacgtgcaagcgattttggttactgcaaatccttgtaactgcccgtttattacagcaacaatgcataactggtagcttggtgcgttagagtgatggattacagtcttgcagatatgtcggcactgttgtatacgagttagtctaaaaggagccaggctaatgttttctccccgcagctgggactgttgctgaaagattgtgcattttttttacaacgactccaatatatttaattaagcattgttacgcaaacacctctagaaaaggtgaagaaaagatttaataaaaagttcgac

SEQ ID NO: 83283 - DNA, 4090 bp, Zea Mays
ggccgatgctagaagagaaaagttctaggttgcgagtcttatgtttgtaaatatccgcactcgtaagtggtatcctcacctcacataactacataagagaccgaaacatatttccctccagaatccctcaacggaacgctgcagcagtgcaggtcgctttcttccccaaaattttgaaccccgaaccctagctctgctcctcagttccccgtctccatggacatcggcggcagcggcggcatcatattgtcgcccggatcggaggatgataagtttgcgcggaggcgctcccgccgtgtgagcttcgcggacaccaccgcggtgcacgtgttcgaccgcgacgaggacttcgagacgcctcccgaggagcgcgagcccgactccacccccgcacccccttctcccaggaggtcctcggttggccgggaggttgaggacgacacggaggaggatttcaaccgcccccctgtcatcttcctccacgacgtcgactcgtcgtacccagacagcgccgctgaatccatcgcctccgccgatgatgaaaacttttttggacctgtgtcggcaagctttattcaaacaggaagaccatcagattctggaatgtcagaggatgacaaccatgatataactatggattccaggacgttctctttgcattttcgcaatattgctccaccagatgactgtacagcctactcagctgggagtctaatgacacctaatactgcatctgagggacccctgaaggaacttactgcatctaatcctgcaagagcatcaattaatggccgagatacattgactgacatgagtttgttgagtggtaaccccagaacttatggttatgataagttgtcacccacgttgaacagtatgatgaagaagataaaagggagcaagcaaacaaactctcctaaacttggtatttctgatgtaacttctgattgtgtattaaccttgtctacatctgaggaagaaagtagggaagaaaatttatgcattgacaatggtgtatcttctgatgagctggtcatggttaatacaattgcagagcacatttctatgagaaatccagtttcgaccagcacagatctgattcaagatgacaatgaaatgataattgatgtccaggagaattcaaagaactgcaaccatgatcacatggatgatgaccctggtgccaataatactgcagaacctcctgcaaagatttccccagcatataagtcattcatgattaatggtgatgtgcaatcccacctagtcgatcaatcttcgtcaaaagatcgaccatctggatcaaattgcactgcaagtgtttcctccatgtgtaatgttgacatggaaacccatcttttggatcaactacctggtaaggataacacatatgctgcccagtcgtcaagtgaagctactgccattttgctgatggatgctgagcagctgcggcagaaaaatgaggtgatggatacagaaacagttctacacactccaagaactgcaggtctgcagttgcaagttccacgaggatccatatcctccttacgctcaaaaaggcataagcttttcactaatactgtatccaatagtaaagtagcaagacaggagggttgttcttcgggtactgagtttgttcaccatgacaagagactttcttctctgaagcatcaagaattggctgcagcttcccagttacaattggttgagaagaatgaacttggtcatcgagcaagtgacatgttcagcaatactgaagatcatgattctacgttatctgtttcttctcattctgttccaaagctgaagaaaaccaatgaatcttttgtcctaggcactcctcgaagacatgggctaaatgagtctactaaggtcctagatacattatgtcatgcctttactttggatagccaacctagtcgtgaatgcaactctcatgtggatttaaatggtgttggaagaaagagaactgctgaggaaaatggttatgctgtgcaagagtgtcctgaaaaaaccactaagacagcaagaagccctagaaaatctagaaaagagattccttgtgtatctcagccttctatgattgaagaaaaacagaatggtgctcatgataatggaaagtccgtggatattgattggagcaaggtagtatgtactataactaatgccacggagcaagttttgccagcatcaataagcaagtataatctacaacagcttgacatgctaagcgataggttggatgagattcatatggctagaaaatataaaaggctttctactgctgtgaggatcaaagctttctgtggtgataagcaaaagagattagaggaggcaaggtttctccatgacaagcttttctatgaaaaggcgaagctacaaataaataatatgaagctagttaaactccaaaaaaaggctcaactatgtcaagatggaattcaagagtgctgctttctgaaatccaagattttgggcgctggacacatggaggattcttcacttcctgcagctactacagtcagtgctggtgatagacaggaagaacttgatatcatttctgaaaagaggcttgaactcaaaattattcaacggaaggtggagaaattaaggagttcccttgaatgttttcacaatattgaaggtggcattggtagtgatagtgttgtgaggtatgctgaagagcagttgatgatgagaaatcagcatcgcatcatccactggcaagcagggctctgcaagttgaatgacatagttaaaaggggcaacaagtgtgatatcatcctcaactatcacaatttgttgttccaaaggtaattattctcagagttatatattatttttctcatgttatgattctactacctactttagaatggaaactgctatatcattgatttttgtattttataaacaaatttctgttttagctgtcccagaatctcagttgcaaatttctgacaagaaactaggtggttgtctgattccagtgaacttgctttggcttgagaaactgcaatcttttatgtaacaaggcaacaaattaatacactttactttgttatttgaagtgccttattttgtttctgacccatccttcgacaggatcatcttaaacatcagtgatacatctagcatatttgtgaacaattcactgaatggaaaccaaattggaaagacatttccaaatttggatgcatctttggcattcaattttgttttcgaagccgaggagaaccaaagagttagtgatttacagtccttgcagaagaagacaatggaaacaagcttgctgcttggaaatcttattgatgttttagaagaaatcaaattatctaagttggagttagtaaatcttacctccgctgcttttgttttggagtcccagacacgtaaacttggcctccacctgtctttcatgagtttcaagagtggcaagaagattgctttcatcatcgacatgacagacttgaaccgctcggtctacccttctgaaccatctgagctcattaaggtttttgaagcacatactacgctagcacagccaagcatagacgagaccatggcttctataaggaacctgcaatctggtcgcacagcaatactaagattgtgccggatggtatcccggctgattcatggttacaatgatgacctgatcactggagtgcaagctgtaggaagtaaacatcatccggatatgtaggtagtaggcattaacagtgttggttttgtttttgtttttgcatgtaggcttaagatgtttgaatgcataaagcagtccttttcaggtggacgtgcaagcgattttggttactgcaaatccttgtaactgcccgtttattacagcaacaatgcataactggtagcttggtgcgttagagtgatggattacagtcttgcagatatgtcggcactgttgtatacgagttagtctaaaaggagccaggctaatgttttctccccgcagctgggactgttgctgaaagattgtgcattttttttacaacgactccaatatatttaattaagcattgttacgcaaacacctctagaaaaggtgaagaaaagatttaataaaaagttcgac

SEQ ID NO: 83284 - DNA, 3681 bp, Zea Mays
gcctagggccgatgctagaagagaaaagttctaggttgcgagtcttatgtttgtaaatatccgcactcgtaagtggtatcctcacctcacataactacataagagaccgaaacatatttccctccagaatccctcaacggaacgctgcagcagtgcaggtcgctttcttccccaaaattttgaaccccgaaccctagctctgctcctcagttccccgtctccatggacatcggcggcagcggcggcatcatattgtcgcccggatcggaggatgataagtttgcgcggaggcgctcccgccgtgtgagcttcgcggacaccaccgcggtgcacgtgttcgaccgcgacgaggacttcgagacgcctcccgaggagcgcgagcccgactccacccccgcacccccttctcccaggaggtcctcggttggccgggaggttgaggacgacacggaggaggatttcaaccgcccccctgtcatcttcctccacgacgtcgactcgtcgtacccagacagcgccgctgaatccatcgcctccgccgatgatgaaaacttttttggacctgtgtcggcaagctttattcaaacaggaagaccatcagattctggaatgtcagaggatgacaaccatgatataactatggattccaggacgttctctttgcattttcgcaatattgctccaccagatgactgtacagcctactcagctgggagtctaatgacacctaatactgcatctgagggacccctgaaggaacttactgcatctaatcctgcaagagcatcaattaatggccgagatacattgactgacatgagtttgttgagtggtaaccccagaacttatggttatgataagttgtcacccacgttgaacagtatgatgaagaagataaaagggagcaagcaaacaaactctcctaaacttggtatttctgatgtaacttctgattgtgtattaaccttgtctacatctgaggaagaaagtagggaagaaaatttatgcattgacaatggtgtatcttctgatgagctggtcatggttaatacaattgcagagcacatttctatgagaaatccagtttcgaccagcacagatctgattcaagatgacaatgaaatgataattgatgtccaggagaattcaaagaactgcaaccatgatcacatggatgatgaccctggtgccaataatactgcagaacctcctgcaaagatttccccagcatataagtcattcatgattaatggtgatgtgcaatcccacctagtcgatcaatcttcgtcaaaagatcgaccatctggatcaaattgcactgcaagtgtttcctccatgtgtaatgttgacatggaaacccatcttttggatcaactacctggtaaggataacacatatgctgcccagtcgtcaagtgaagctactgccattttgctgatggatgctgagcagctgcggcagaaaaatgaggtgatggatacagaaacagttctacacactccaagaactgcaggtctgcagttgcaagttccacgaggatccatatcctccttacgctcaaaaaggcataagcttttcactaatactgtatccaatagtaaagtagcaagacaggagggttgttcttcgggtactgagtttgttcaccatgacaagagactttcttctctgaagcatcaagaattggctgcagcttcccagttacaattggttgagaagaatgaacttggtcatcgagcaagtgacatgttcagcaatactgaagatcatgattctacgttatctgtttcttctcattctgttccaaagctgaagaaaaccaatgaatcttttgtcctaggcactcctcgaagacatgggctaaatgagtctactaaggtcctagatacattatgtcatgcctttactttggatagccaacctagtcgtgaatgcaactctcatgtggatttaaatggtgttggaagaaagagaactgctgaggaaaatggttatgctgtgcaagagtgtcctgaaaaaaccactaagacagcaagaagccctagaaaatctagaaaagagattccttgtgtatctcagccttctatgattgaagaaaaacagaatggtgctcatgataatggaaagtccgtggatattgattggagcaaggtagtatgtactataactaatgccacggagcaagttttgccagcatcaataagcaagtataatctacaacagcttgacatgctaagcgataggttggatgagattcatatggctagaaaatataaaaggctttctactgctgtgaaaaaggctcaactatgtcaagatggaattcaagagtgctgctttctgaaatccaagattttgggcgctggacacatggaggattcttcacttcctgcagctactacagtcagtgctggtgatagacaggaagaacttgatatcatttctgaaaagaggcttgaactcaaaattattcaacggaaggtggagaaattaaggagttcccttgaatgttttcacaatattgaaggtggcattggtagtgatagtgttgtgaggtatgctgaagagcagttgatgatgagaaatcagcatcgcatcatccactggcaagcagggctctgcaagttgaatgacatagttaaaaggggcaacaagtgtgatatcatcctcaactatcacaatttgttgttccaaaggatcatcttaaacatcagtgatacatctagcatatttgtgaacaattcactgaatggaaaccaaattggaaagacatttccaaatttggatgcatctttggcattcaattttgttttcgaagccgaggagaaccaaagagttagtgatttacagtccttgcagaagaagacaatggaaacaagcttgctgcttggaaatcttattgatgttttagaagaaatcaaattatctaagttggagttagtaaatcttacctccgctgcttttgttttggagtcccagacacgtaaacttggcctccacctgtctttcatgagtttcaagagtggcaagaagattgctttcatcatcgacatgacagacttgaaccgctcggtctacccttctgaaccatctgagctcattaaggtttttgaagcacatactacgctagcacagccaagcatagacgagaccatggcttctataaggaacctgcaatctggtcgcacagcaatactaagattgtgccggatggtatcccggctgattcatggttacaatgatgacctgatcactggagtgcaagctgtaggaagtaaacatcatccggatatgtaggtagtaggcattaacagtgttggttttgtttttgtttttgcatgtaggcttaagatgtttgaatgcataaagcagtccttttcaggtggacgtgcaagcgattttggttactgcaaatccttgtaactgcccgtttattacagcaacaatgcataactggtagcttggtgcgttagagtgatggattacagtcttgcagatatgtcggcactgttgtatacgagttagtctaaaaggagccaggctaatgttttctccccgcagctgggactgttgctgaaagattgtgcattttttttacaacgactccaatatatttaattaagcattgttacgcaaacacctctagaaaaggtgaagaaaagatttaataaaaagttcgac

SEQ ID NO: 83285 - DNA, 3735 bp, Zea Mays
atttttgtaagtcgcctagggccgatgctagaagagaaaagttctaggttgcgagtcttatgtttgtaaatatccgcactccagtgcaggtcgctttcttccccaaaattttgaaccccgaaccctagctctgctcctcagttccccgtctccatggacatcggcggcagcggcggcatcatattgtcgcccggatcggaggatgataagtttgcgcggaggcgctcccgccgtgtgagcttcgcggacaccaccgcggtgcacgtgttcgaccgcgacgaggacttcgagacgcctcccgaggagcgcgagcccgactccacccccgcacccccttctcccaggaggtcctcggttggccgggaggttgaggacgacacggaggaggatttcaaccgcccccctgtcatcttcctccacgacgtcgactcgtcgtacccagacagcgccgctgaatccatcgcctccgccgatgatgaaaacttttttggacctgtgtcggcaagctttattcaaacaggaagaccatcagattctggaatgtcagaggatgacaaccatgatataactatggattccaggacgttctctttgcattttcgcaatattgctccaccagatgactgtacagcctactcagctgggagtctaatgacacctaatactgcatctgagggacccctgaaggaacttactgcatctaatcctgcaagagcatcaattaatggccgagatacattgactgacatgagtttgttgagtggtaaccccagaacttatggttatgataagttgtcacccacgttgaacagtatgatgaagaagataaaagggagcaagcaaacaaactctcctaaacttggtatttctgatgtaacttctgattgtgtattaaccttgtctacatctgaggaagaaagtagggaagaaaatttatgcattgacaatggtgtatcttctgatgagctggtcatggttaatacaattgcagagcacatttctatgagaaatccagtttcgaccagcacagatctgattcaagatgacaatgaaatgataattgatgtccaggagaattcaaagaactgcaaccatgatcacatggatgatgaccctggtgccaataatactgcagaacctcctgcaaagatttccccagcatataagtcattcatgattaatggtgatgtgcaatcccacctagtcgatcaatcttcgtcaaaagatcgaccatctggatcaaattgcactgcaagtgtttcctccatgtgtaatgttgacatggaaacccatcttttggatcaactacctggtaaggataacacatatgctgcccagtcgtcaagtgaagctactgccattttgctgatggatgctgagcagctgcggcagaaaaatgaggtgatggatacagaaacagttctacacactccaagaactgcaggtctgcagttgcaagttccacgaggatccatatcctccttacgctcaaaaaggcataagcttttcactaatactgtatccaatagtaaagtagcaagacaggagggttgttcttcgggtactgagtttgttcaccatgacaagagactttcttctctgaagcatcaagaattggctgcagcttcccagttacaattggttgagaagaatgaacttggtcatcgagcaagtgacatgttcagcaatactgaagatcatgattctacgttatctgtttcttctcattctgttccaaagctgaagaaaaccaatgaatcttttgtcctaggcactcctcgaagacatgggctaaatgagtctactaaggtcctagatacattatgtcatgcctttactttggatagccaacctagtcgtgaatgcaactctcatgtggatttaaatggtgttggaagaaagagaactgctgaggaaaatggttatgctgtgcaagagtgtcctgaaaaaaccactaagacagcaagaagccctagaaaatctagaaaagagattccttgtgtatctcagccttctatgattgaagaaaaacagaatggtgctcatgataatggaaagtccgtggatattgattggagcaaggtagtatgtactataactaatgccacggagcaagttttgccagcatcaataagcaagtataatctacaacagcttgacatgctaagcgataggttggatgagattcatatggctagaaaatataaaaggctttctactgctgtgaggatcaaagctttctgtggtgataagcaaaagagattagaggaggcaaggtttctccatgacaagcttttctatgaaaaggcgaagctacaaataaataatatgaagctagttaaactccaaaaaaaggctcaactatgtcaagatggaattcaagagtgctgctttctgaaatccaagattttgggcgctggacacatggaggattcttcacttcctgcagctactacagtcagtgctggtgatagacaggaagaacttgatatcatttctgaaaagaggcttgaactcaaaattattcaacggaaggtggagaaattaaggagttcccttgaatgttttcacaatattgaaggtggcattggtagtgatagtgttgtgaggtatgctgaagagcagttgatgatgagaaatcagcatcgcatcatccactggcaagcagggctctgcaagttgaatgacatagttaaaaggggcaacaagtgtgatatcatcctcaactatcacaatttgttgttccaaaggatcatcttaaacatcagtgatacatctagcatatttgtgaacaattcactgaatggaaaccaaattggaaagacatttccaaatttggatgcatctttggcattcaattttgttttcgaagccgaggagaaccaaagagttagtgatttacagtccttgcagaagaagacaatggaaacaagcttgctgcttggaaatcttattgatgttttagaagaaatcaaattatctaagttggagttagtaaatcttacctccgctgcttttgttttggagtcccagacacgtaaacttggcctccacctgtctttcatgagtttcaagagtggcaagaagattgctttcatcatcgacatgacagacttgaaccgctcggtctacccttctgaaccatctgagctcattaaggtttttgaagcacatactacgctagcacagccaagcatagacgagaccatggcttctataaggaacctgcaatctggtcgcacagcaatactaagattgtgccggatggtatcccggctgattcatggttacaatgatgacctgatcactggagtgcaagctgtaggaagtaaacatcatccggatatgtaggtagtaggcattaacagtgttggttttgtttttgtttttgcatgtaggcttaagatgtttgaatgcataaagcagtccttttcaggtggacgtgcaagcgattttggttactgcaaatccttgtaactgcccgtttattacagcaacaatgcataactggtagcttggtgcgttagagtgatggattacagtcttgcagatatgtcggcactgttgtatacgagttagtctaaaaggagccaggctaatgttttctccccgcagctgggactgttgctgaaagattgtgcattttttttacaacgactccaatatatttaattaagcattgttacgcaaacacctctagaaaaggtgaagaaaagatttaataaaaagttcgac

SEQ ID NO: 83286 - DNA, 3780 bp, Zea Mays
gttatttttgtaagtcgcctagggccgatgctagaagagaaaagttctaggttgcgagtcttatgtttgtaaatatccgcactcgtaagtggtatcctcacctcacataactacataagagaccgaaacatatttccctccagaatccctcaacggaacgctgcagcagtgcaggtcgctttcttccccaaaattttgaaccccgaaccctagctctgctcctcagttccccgtctccatggacatcggcggcagcggcggcatcatattgtcgcccggatcggaggatgataagtttgcgcggaggcgctcccgccgtgtgagcttcgcggacaccaccgcggtgcacgtgttcgaccgcgacgaggacttcgagacgcctcccgaggagcgcgagcccgactccacccccgcacccccttctcccaggaggtcctcggttggccgggaggttgaggacgacacggaggaggatttcaaccgcccccctgtcatcttcctccacgacgtcgactcgtcgtacccagacagcgccgctgaatccatcgcctccgccgatggtagtcaggttgctgcatttttcaactggattatgtcagatgaaaacttttttggacctgtgtcggcaagctttattcaaacaggaagaccatcagattctggaatgtcagaggatgacaaccatgatataactatggattccaggacgttctctttgcattttcgcaatattgctccaccagatgactgtacagcctactcagctgggagtctaatgacacctaatactgcatctgagggacccctgaaggaacttactgcatctaatcctgcaagagcatcaattaatggccgagatacattgactgacatgagtttgttgagtggtaaccccagaacttatggttatgataagttgtcacccacgttgaacagtatgatgaagaagataaaagggagcaagcaaacaaactctcctaaacttggtatttctgatgtaacttctgattgtgtattaaccttgtctacatctgaggaagaaagtagggaagaaaatttatgcattgacaatggtgtatcttctgatgagctggtcatggttaatacaattgcagagcacatttctatgagaaatccagtttcgaccagcacagatctgattcaagatgacaatgaaatgataattgatgtccaggagaattcaaagaactgcaaccatgatcacatggatgatgaccctggtgccaataatactgcagaacctcctgcaaagatttccccagcatataagtcattcatgattaatggtgatgtgcaatcccacctagtcgatcaatcttcgtcaaaagatcgaccatctggatcaaattgcactgcaagtgtttcctccatgtgtaatgttgacatggaaacccatcttttggatcaactacctggtaaggataacacatatgctgcccagtcgtcaagtgaagctactgccattttgctgatggatgctgagcagctgcggcagaaaaatgaggtgatggatacagaaacagttctacacactccaagaactgcaggtctgcagttgcaagttccacgaggatccatatcctccttacgctcaaaaaggcataagcttttcactaatactgtatccaatagtaaagtagcaagacaggagggttgttcttcgggtactgagtttgttcaccatgacaagagactttcttctctgaagcatcaagaattggctgcagcttcccagttacaattggttgagaagaatgaacttggtcatcgagcaagtgacatgttcagcaatactgaagatcatgattctacgttatctgtttcttctcattctgttccaaagctgaagaaaaccaatgaatcttttgtcctaggcactcctcgaagacatgggctaaatgagtctactaaggtcctagatacattatgtcatgcctttactttggatagccaacctagtcgtgaatgcaactctcatgtggatttaaatggtgttggaagaaagagaactgctgaggaaaatggttatgctgtgcaagagtgtcctgaaaaaaccactaagacagcaagaagccctagaaaatctagaaaagagattccttgtgtatctcagccttctatgattgaagaaaaacagaatggtgctcatgataatggaaagtccgtggatattgattggagcaaggtagtatgtactataactaatgccacggagcaagttttgccagcatcaataagcaagtataatctacaacagcttgacatgctaagcgataggttggatgagattcatatggctagaaaatataaaaggctttctactgctgtgaggatcaaagctttctgtggtgataagcaaaagagattagaggaggcaaggtttctccatgacaagcttttctatgaaaaggcgaagctacaaataaataatatgaagctagttaaactccaaaaaaaggctcaactatgtcaagatggaattcaagagtgctgctttctgaaatccaagattttgggcgctggacacatggaggattcttcacttcctgcagctactacagtcagtgctggtgatagacaggaagaacttgatatcatttctgaaaagaggcttgaactcaaaattattcaacggaaggtggagaaattaaggagttcccttgaatgttttcacaatattgaaggtggcattggtagtgatagtgttgtgaggtatgctgaagagcagttgatgatgagaaatcagcatcgcatcatccactggcaagcagggctctgcaagttgaatgacatagttaaaaggggcaacaagtgtgatatcatcctcaactatcacaatttgttgttccaaaggatcatcttaaacatcagtgatacatctagcatatttgtgaacaattcactgaatggaaaccaaattggaaagacatttccaaatttggatgcatctttggcattcaattttgttttcgaagccgaggagaaccaaagagttagtgatttacagtccttgcagaagaagacaatggaaacaagcttgctgcttggaaatcttattgatgttttagaagaaatcaaattatctaagttggagttagtaaatcttacctccgctgcttttgttttggagtcccagacacgtaaacttggcctccacctgtctttcatgagtttcaagagtggcaagaagattgctttcatcatcgacatgacagacttgaaccgctcggtctacccttctgaaccatctgagctcattaaggtttttgaagcacatactacgctagcacagccaagcatagacgagaccatggcttctataaggaacctgcaatctggtcgcacagcaatactaagattgtgccggatggtatcccggctgattcatggttacaatgatgacctgatcactggagtgcaagctgtaggaagtaaacatcatccggatattccttttcaggtggacgtgcaagcgattttggttactgcaaatccttgtaactgcccgtttattacagcaacaatgcataactggtagcttggtgcgttagagtgatggattacagtcttgcagatatgtcggcactgttgtatacgagttagtctaaaaggagccaggctaatgttttctccccgcagctgggactgttgctgaaagattgtgcattttttttacaacgactccaatatatttaattaagcattgttacgcaaacacctctagaaaaggtgaagaaaagatttaataaaaagttcgac

SEQ ID NO: 83287 - DNA, 2793 bp, Zea Mays
ggccgatgctagaagagaaaagttctaggttgcgagtcttatgtttgtaaatatccgcactcgtaagtggtatcctcacctcacataactacataagagaccgaaacatatttccctccagaatccctcaacggaacgctgcagcagtgcaggtcgctttcttccccaaaattttgaaccccgaaccctagctctgctcctcagttccccgtctccatggacatcggcggcagcggcggcatcatattgtcgcccggatcggaggatgataagtttgcgcggaggcgctcccgccgtgtgagcttcgcggacaccaccgcggtgcacgtgttcgaccgcgacgaggacttcgagacgcctcccgaggagcgcgagcccgactccacccccgcacccccttctcccaggaggtcctcggttggccgggaggttgaggacgacacggaggaggatttcaaccgcccccctgtcatcttcctccacgacgtcgactcgtcgtacccagacagcgccgctgaatccatcgcctccgccgatgatgaaaacttttttggacctgtgtcggcaagctttattcaaacaggaagaccatcagattctggaatgtcagaggatgacaaccatgatataactatggattccaggacgttctctttgcattttcgcaatattgctccaccagatgactgtacagcctactcagctgggagtctaatgacacctaatactgcatctgagggacccctgaaggaacttactgcatctaatcctgcaagagcatcaattaatggccgagatacattgactgacatgagtttgttgagtggtaaccccagaacttatggttatgataagttgtcacccacgttgaacagtatgatgaagaagataaaagggagcaagcaaacaaactctcctaaacttggtatttctgatgtaacttctgattgtgtattaaccttgtctacatctgaggaagaaagtagggaagaaaatttatgcattgacaatggtgtatcttctgatgagctggtcatggttaatacaattgcagagcacatttctatgagaaatccagtttcgaccagcacagatctgattcaagatgacaatgaaatgataattgatgtccaggagaattcaaagaactgcaaccatgatcacatggatgatgaccctggtgccaataatactgcagaacctcctgcaaagatttccccagcatataagtcattcatgattaatggtgatgtgcaatcccacctagtcgatcaatcttcgtcaaaagatcgaccatctggatcaaattgcactgcaagtgtttcctccatgtgtaatgttgacatggaaacccatcttttggatcaactacctggtaaggataacacatatgctgcccagtcgtcaagtgaagctactgccattttgctgatggatgctgagcagctgcggcagaaaaatgaggtgatggatacagaaacagttctacacactccaagaactgcaggtctgcagttgcaagttccacgaggatccatatcctccttacgctcaaaaaggcataagcttttcactaatactgtatccaatagtaaagtagcaagacaggagggttgttcttcgggtactgagtttgttcaccatgacaagagactttcttctctgaagcatcaagaattggctgcagcttcccagttacaattggttgagaagaatgaacttggtcatcgagcaagtgacatgttcagcaatactgaagatcatgattctacgttatctgtttcttctcattctgttccaaagctgaagaaaaccaatgaatcttttgtcctaggcactcctcgaagacatgggctaaatgagtctactaaggtcctagatacattatgtcatgcctttactttggatagccaacctagtcgtgaatgcaactctcatgtggatttaaatggtgttggaagaaagagaactgctgaggaaaatggttatgctgtgcaagagtgtcctgaaaaaaccactaagacagcaagaagccctagaaaatctagaaaagagattccttgtgtatctcagccttctatgattgaagaaaaacagaatggtgctcatgataatggaaagtccgtggatattgattggagcaaggtagtatgtactataactaatgccacggagcaagttttgccagcatcaataagcaagtataatctacaacagcttgacatgctaagcgataggttggatgagattcatatggctagaaaatataaaaggctttctactgctgtgaggatcaaagctttctgtggtgataagcaaaagagattagaggaggcaaggtttctccatgacaagcttttctatgaaaaggcgaagctacaaataaataatatgaagctagttaaactccaaaaaaaggctcaactatgtcaagatggaattcaagagtgctgctttctgaaatccaagattttgggcgctggacacatggaggattcttcacttcctgcagctactacagtcagtgctggtgatagacaggtcggcgatgaagggatccccatccctagcgagcgcggtggagaggatggcggttgtggtgcgagcatgggcaggaagggcaatgcaggacgcagagatggggacgaggccacccgcagcggcggtggcgtgctgcaggcccgacgcggagatgggaacgaggccgctcgcgtctgcggcggtggcgtgcagtccccgctctcgcgtccgcacggaggatgctcgcgcgtgcgtcgtgacgagcaagattga

SEQ ID NO: 83288 - DNA, 2692 bp, Zea Mays
gttatttttgtaagtcgcctagggccgatgctagaagagaaaagttctaggttgcgagtcttatgtttgtaaatatccgcactcgtaagtggtatcctcacctcacataactacataagagaccgaaacatatttccctccagaatccctcaacggaacgctgcagcagtgcaggtcgctttcttccccaaaattttgaaccccgaaccctagctctgctcctcagttccccgtctccatggacatcggcggcagcggcggcatcatattgtcgcccggatcggaggatgataagtttgcgcggaggcgctcccgccgtgtgagcttcgcggacaccaccgcggtgcacgtgttcgaccgcgacgaggacttcgagacgcctcccgaggagcgcgagcccgactccacccccgcacccccttctcccaggaggtcctcggttggccgggaggttgaggacgacacggaggaggatttcaaccgcccccctgtcatcttcctccacgacgtcgactcgtcgtacccagacagcgccgctgaatccatcgcctccgccgatgatgaaaacttttttggacctgtgtcggcaagctttattcaaacaggaagaccatcagattctggaatgtcagaggatgacaaccatgatataactatggattccaggacgttctctttgcattttcgcaatattgctccaccagatgactgtacagcctactcagctgggagtctaatgacacctaatactgcatctgagggacccctgaaggaacttactgcatctaatcctgcaagagcatcaattaatggccgagatacattgactgacatgagtttgttgagtggtaaccccagaacttatggttatgataagttgtcacccacgttgaacagtatgatgaagaagataaaagggagcaagcaaacaaactctcctaaacttggtatttctgatgtaacttctgattgtgtattaaccttgtctacatctgaggaagaaagtagggaagaaaatttatgcattgacaatggtgtatcttctgatgagctggtcatggttaatacaattgcagagcacatttctatgagaaatccagtttcgaccagcacagatctgattcaagatgacaatgaaatgataattgatgtccaggagaattcaaagaactgcaaccatgatcacatggatgatgaccctggtgccaataatactgcagaacctcctgcaaagatttccccagcatataagtcattcatgattaatggtgatgtgcaatcccacctagtcgatcaatcttcgtcaaaagatcgaccatctggatcaaattgcactgcaagtgtttcctccatgtgtaatgttgacatggaaacccatcttttggatcaactacctggtaaggataacacatatgctgcccagtcgtcaagtgaagctactgccattttgctgatggatgctgagcagctgcggcagaaaaatgaggtgatggatacagaaacagttctacacactccaagaactgcaggtctgcagttgcaagttccacgaggatccatatcctccttacgctcaaaaaggcataagcttttcactaatactgtatccaatagtaaagtagcaagacaggagggttgttcttcgggtactgagtttgttcaccatgacaagagactttcttctctgaagcatcaagaattggctgcagcttcccagttacaattggttgagaagaatgaacttggtcatcgagcaagtgacatgttcagcaatactgaagatcatgattctacgttatctgtttcttctcattctgttccaaagctgaagaaaaccaatgaatcttttgtcctaggcactcctcgaagacatgggctaaatgagtctactaaggtcctagatacattatgtcatgcctttactttggatagccaacctagtcgtgaatgcaactctcatgtggatttaaatggtgttggaagaaagagaactgctgaggaaaatggttatgctgtgcaagagtgtcctgaaaaaaccactaagacagcaagaagccctagaaaatctagaaaagagattccttgtgtatctcagccttctatgattgaagaaaaacagaatggtgctcatgataatggaaagtccgtggatattgattggagcaaggtagtatgtactataactaatgccacggagcaagttttgccagcatcaataagcaagtataatctacaacagcttgacatgctaagcgataggttggatgagattcatatggctagaaaatataaaaggctttctactgctgtgaaaaaggctcaactatgtcaagatggaattcaagagtgctgctttctgaaatccaagattttgggcgctggacacatggaggattcttcacttcctgcagctactacagtcagtgctggtgatagacaggtcggcgatgaagggatccccatccctagcgagcgcggtggagaggatggcggttgtggtgcgagcatgggcaggaagggcaatgcaggacgcagagatggggacgaggccacccgcagcggcggtggcgtgctgcaggcccgacgcggagatgggaacgaggccgctcgcgtctgcggcggtggcgtgcagtccccgctctcgcgtccgcacggaggatgctcgcgcgtgcgtcgtgacgagcaagattga

SEQ ID NO: 83289 - DNA, 243 bp, Zea Mays
atgatacccagcaatcataatgtgttaatcaaaacgaaacaggtaggggcaaatgccagcataaaggtgcgactggaactccggcagtcccatctgcagcatgtatggtatgaagaagctgagggcatttgcatcttccacgtgtgcacttcatctcgctttttgactacatcatttgcaagtggatatcagcagcctgttgggccagctcattcatcatggcctcgtcgaagaatttattga

SEQ ID NO: 83290 - DNA, 624 bp, Zea Mays
cttcaactgttacacggcttcaccacgttaaactcccagcaaaaccccaagtcgtcacctgccccagcgtttactcaccttgttccctagccccggcggccaccctgtccttgatcatttccaagttgtgttgcagcgagcttctacgtagttcttccccacccgctcgctcccagcctgtctggtcctgcgtacttcgacgccgttctccagacgtgacagctccatcgctggtcgtccaatccatgttgatcctgactgatctcgcacgagcactgaaggcgtggtgagtcaccggtactccctccctgtacctttgattagagctctaccgtaggggatgactccggatcaagttgtcgggcgaggtctgaatgaggttgggccggctgagtgagtttgggccccatactgttctgagttttgccttttttattaactgagagattagaaatggtgccaaaatttatagaaaattctaaaaatcatgggacaaattttagtggatgtataaaatcaaacgctctttggtaaagttggttttcagatttttaggtcggttaccaaatattaagggatttaaaagtgctcttggaaggactgtttggattttaaaaataaaag

SEQ ID NO: 83291 - DNA, 2053 bp, Zea Mays
actctcttcactacttgttactgtcatgtgactgaagctttggcgcaagcaggccttgaatcttcaaatcttatcgtaggcattgattttacaaagagcaatgaatggacaggtaaaatttcatttaatcgccgctgcctacatgatattggaaacactccgaacccatatgagcaagctatatctattattggaaggacactttcagtatttgatgaagataacttgattccctgctttggatttggtgacgcatcaactcatgatcaggaggtattcagcttttacccagagaaccgcccatgcaacggatttgaagaggcactagacagatacagagaaatcgttccaactcttcgattagcaggacctacatctttcgctccgatgatcgagacagcaattggaattgttgacagcactggtggtcaatatcatgttcttctgataatcgcagatggacaggttacccgaagtgtcgatacacaatctggacaattgagtccacaggagcgggatactatagatgcaatagtaagagcaagccagttccccctgtcaattgttcttgttggggttggtgatggaccatgggacatgatgcaccagtttgatgacaatatacctgctcggtcatttgacaatttccagtttgtgaacttcacggagattatgtcaaagagcatagcagctgacagaaaggaggcagaatttgcattgtcagcgctgatggaaatccctacacagtacaaagcaacacttgatctccaactcttaggccgccgccaaagaataactccaagaattgctctgccgccaccaacaaggactgcttattcacggactactagctttagccaacagtctggtgtttattcgcgatcaagtagctttgaccaacaaacaagtgtctaccagcaacgttctgagagcttgaaacagcagcaacctgcagccccaaagggacctgacacttacgtatcagaaagtgctctggaggacagaattctgtgccccatctgcatgtataaatcgaaggaccttgcatttgggtgtggacatcagacttgctatgaatgcgggagagatttggagcgctgccctctgtgccagcaacacataaccacgaggatcaggctctactgatttgaagccaatgggattgaaaaatgttcagaaccagctttgatgctactgtgcttcatcattttgtaattctgaatgagataacactgtctcagtagtttcgctacactagttatgccaaaaggaagcgcaccagaaaataatgtacagatttttcctccttttatctcttttgttaggtaaacaagttagacagcagtaaaattctgaatgagataatggatattgtgaagcaaaactatcgccatggaaaatatgcattctgtatgcaatgaccccatggattaaagcttcagtaataagtaagatggtcacatctatatatattgcacttatgttccagtaatactgtacattgcgagctgcaaatagatcaacgtgttgtgtgtgtgtgtgtgtgtatgttttgctcaaataggagccggacgaagagaagagaatttagtacacaaacactagtgtagcacatatatctcggcacagtccgagcgctgcgacgtgggacacaaggattgggtcggcacagtcagcagtggcggctttagtacttgtaccccttgacgtacaggctctcggaggcggcggcgtccccggcgccggagccggcgtacttgcccagcgcggcctcggagttggccttgcagcggatgacgaaggtggcctgcgcggcggcgacgttctccttcttgccgacccacttcttgagggtgctctgctgcagcgcgcggccgaaggagaaggacagcgtccagggcttgagcacctccagcttgttcatcgcgtccaggttctgcgtcgcctcctcctcgctctgcccgcccgacaggaacaccaccccgggcaccgccggcggcacggtgcgccgcagcgccgccaccgtgtactccgctatcacctccgcggagac

SEQ ID NO: 83292 - DNA, 2363 bp, Zea Mays
atctctttgtttttcctcttggcgaggacgccgaattctcggttggcttaggcggtgggtggatcaaatcgagtccgctcatctgggtgttggcctcatcccctgcacaagctgaggaatggggcaaaaggactccaagccttcaaatggatatggctactcttctgattacgggggtacttcatcgggatataacttgagaaatactggaagtacgtcctccagttatggcgcgaggtatgtgccttcttcagagaacaatgtacagccagaaacacatgccaggttgcagaggaagtattccaggattggtgatgactatcgttctctgagtcaggtgactgaagctttggcgcaagcaggccttgaatcttcaaatcttatcgtaggcattgattttacaaagagcaatgaatggacaggtaaaatttcatttaatcgccgctgcctacatgatattggaaacactccgaacccatatgagcaagctatatctattattggaaggacactttcagtatttgatgaagataacttgattccctgctttggatttggtgacgcatcaactcatgatcaggaggtattcagcttttacccagagaaccgcccatgcaacggatttgaagaggcactagacagatacagagaaatcgttccaactcttcgattagcaggacctacatctttcgctccgatgatcgagacagcaattggaattgttgacagcactggtggtcaatatcatgttcttctgataatcgcagatggacaggttacccgaagtgtcgatacacaatctggacaattgagtccacaggagcgggatactatagatgcaatagtaagagcaagccagttccccctgtcaattgttcttgttggggttggtgatggaccatgggacatgatgcaccagtttgatgacaatatacctgctcggtcatttgacaatttccagtttgtgaacttcacggagattatgtcaaagagcatagcagctgacagaaaggaggcagaatttgcattgtcagcgctgatggaaatccctacacagtacaaagcaacacttgatctccaactcttaggccgccgccaaagaataactccaagaattgctctgccgccaccaacaaggactgcttattcacggactactagctttagccaacagtctggtgtttattcgcgatcaagtagctttgaccaacaaacaagtgtctaccagcaacgttctgagagcttgaaacagcagcaacctgcagccccaaagggacctgacacttacgtatcagaaagtgctctggaggacagaattctgtgccccatctgcatgtataaatcgaaggaccttgcatttgggtgtggacatcagacttgctatgaatgcgggagagatttggagcgctgccctctgtgccagcaacacataaccacgaggatcaggctctactgatttgaagccaatgggattgaaaaatgttcagaaccagctttgatgctactgtgcttcatcattttgtaattctgaatgagataacactgtctcagtagtttcgctacactagttatgccaaaaggaagcgcaccagaaaataatgtacagatttttcctccttttatctcttttgttaggtaaacaagttagacagcagtaaaattctgaatgagataatggatattgtgaagcaaaactatcgccatggaaaatatgcattctgtatgcaatgaccccatggattaaagcttcagtaataagtaagatggtcacatctatatatattgcacttatgttccagtaatactgtacattgcgagctgcaaatagatcaacgtgttgtgtgtgtgtgtgtgtgtatgttttgctcaaataggagccggacgaagagaagagaatttagtacacaaacactagtgtagcacatatatctcggcacagtccgagcgctgcgacgtgggacacaaggattgggtcggcacagtcagcagtggcggctttagtacttgtaccccttgacgtacaggctctcggaggcggcggcgtccccggcgccggagccggcgtacttgcccagcgcggcctcggagttggccttgcagcggatgacgaaggtggcctgcgcggcggcgacgttctccttcttgccgacccacttcttgagggtgctctgctgcagcgcgcggccgaaggagaaggacagcgtccagggcttgagcacctccagcttgttcatcgcgtccaggttctgcgtcgcctcctcctcgctctgcccgcccgacaggaacaccaccccgggcaccgccggcggcacggtgcgccgcagcgccgccaccgtgtactccgctatcacctccgcggagac

SEQ ID NO: 83293 - DNA, 2399 bp, Zea Mays
ctccccccacttctcccatcccctccgtcatcatctctttgtttttcctcttggcgaggacgccgaattctcggttggcttaggcggtgggtggatcaaatcgagtccggaagctcatctgggtgttggcctcatcccctgcacaagctgaggaatggggcaaaaggactccaagccttcaaatggatatggctactcttctgattacgggggtacttcatcgggatataacttgagaaatactggaagtacgtcctccagttatggcgcgaggtatgtgccttcttcagagaacaatgtacagccagaaacacatgccaggttgcagaggaagtattccaggattggtgatgactatcgttctctgagtcaggtgactgaagctttggcgcaagcaggccttgaatcttcaaatcttatcgtaggcattgattttacaaagagcaatgaatggacaggtaaaatttcatttaatcgccgctgcctacatgatattggaaacactccgaacccatatgagcaagctatatctattattggaaggacactttcagtatttgatgaagataacttgattccctgctttggatttggtgacgcatcaactcatgatcaggaggtattcagcttttacccagagaaccgcccatgcaacggatttgaagaggcactagacagatacagagaaatcgttccaactcttcgattagcaggacctacatctttcgctccgatgatcgagacagcaattggaattgttgacagcactggtggtcaatatcatgttcttctgataatcgcagatggacaggttacccgaagtgtcgatacacaatctggacaattgagtccacaggagcgggatactatagatgcaatagtaagagcaagccagttccccctgtcaattgttcttgttggggttggtgatggaccatgggacatgatgcaccagtttgatgacaatatacctgctcggtcatttgacaatttccagtttgtgaacttcacggagattatgtcaaagagcatagcagctgacagaaaggaggcagaatttgcattgtcagcgctgatggaaatccctacacagtacaaagcaacacttgatctccaactcttaggccgccgccaaagaataactccaagaattgctctgccgccaccaacaaggactgcttattcacggactactagctttagccaacagtctggtgtttattcgcgatcaagtagctttgaccaacaaacaagtgtctaccagcaacgttctgagagcttgaaacagcagcaacctgcagccccaaagggacctgacacttacgtatcagaaagtgctctggaggacagaattctgtgccccatctgcatgtataaatcgaaggaccttgcatttgggtgtggacatcagacttgctatgaatgcgggagagatttggagcgctgccctctgtgccagcaacacataaccacgaggatcaggctctactgatttgaagccaatgggattgaaaaatgttcagaaccagctttgatgctactgtgcttcatcattttgtaattctgaatgagataacactgtctcagtagtttcgctacactagttatgccaaaaggaagcgcaccagaaaataatgtacagatttttcctccttttatctcttttgttaggtaaacaagttagacagcagtaaaattctgaatgagataatggatattgtgaagcaaaactatcgccatggaaaatatgcattctgtatgcaatgaccccatggattaaagcttcagtaataagtaagatggtcacatctatatatattgcacttatgttccagtaatactgtacattgcgagctgcaaatagatcaacgtgttgtgtgtgtgtgtgtgtgtatgttttgctcaaataggagccggacgaagagaagagaatttagtacacaaacactagtgtagcacatatatctcggcacagtccgagcgctgcgacgtgggacacaaggattgggtcggcacagtcagcagtggcggctttagtacttgtaccccttgacgtacaggctctcggaggcggcggcgtccccggcgccggagccggcgtacttgcccagcgcggcctcggagttggccttgcagcggatgacgaaggtggcctgcgcggcggcgacgttctccttcttgccgacccacttcttgagggtgctctgctgcagcgcgcggccgaaggagaaggacagcgtccagggcttgagcacctccagcttgttcatcgcgtccaggttctgcgtcgcctcctcctcgctctgcccgcccgacaggaacaccaccccgggcaccgccggcggcacggtgcgccgcagcgccgccaccgtgtactccgctatcacctccgcggagac

SEQ ID NO: 83294 - DNA, 2510 bp, Zea Mays
caccacctcaccagcaaacgtcttgagctcgtgctggtgatcgcgacaagcattgtcccttttaccaaatcatcgtcttctcctctcccgcgccgaagcttcctcggacaagtgcggcgtgagtaagagacccggcggacaagaaacctctccccccaccttcgttgcggaattgcatcgccttcggcttgagccaattgacttgacctcactccctcccgaagctcatctgggtgttggcctcatcccctgcacaagctgaggaatggggcaaaaggactccaagccttcaaatggatatggctactcttctgattacgggggtacttcatcgggatataacttgagaaatactggaagtacgtcctccagttatggcgcgaggtatgtgccttcttcagagaacaatgtacagccagaaacacatgccaggttgcagaggaagtattccaggattggtgatgactatcgttctctgagtcaggtgactgaagctttggcgcaagcaggccttgaatcttcaaatcttatcgtaggcattgattttacaaagagcaatgaatggacaggtaaaatttcatttaatcgccgctgcctacatgatattggaaacactccgaacccatatgagcaagctatatctattattggaaggacactttcagtatttgatgaagataacttgattccctgctttggatttggtgacgcatcaactcatgatcaggaggtattcagcttttacccagagaaccgcccatgcaacggatttgaagaggcactagacagatacagagaaatcgttccaactcttcgattagcaggacctacatctttcgctccgatgatcgagacagcaattggaattgttgacagcactggtggtcaatatcatgttcttctgataatcgcagatggacaggttacccgaagtgtcgatacacaatctggacaattgagtccacaggagcgggatactatagatgcaatagtaagagcaagccagttccccctgtcaattgttcttgttggggttggtgatggaccatgggacatgatgcaccagtttgatgacaatatacctgctcggtcatttgacaatttccagtttgtgaacttcacggagattatgtcaaagagcatagcagctgacagaaaggaggcagaatttgcattgtcagcgctgatggaaatccctacacagtacaaagcaacacttgatctccaactcttaggccgccgccaaagaataactccaagaattgctctgccgccaccaacaaggactgcttattcacggactactagctttagccaacagtctggtgtttattcgcgatcaagtagctttgaccaacaaacaagtgtctaccagcaacgttctgagagcttgaaacagcagcaacctgcagccccaaagggacctgacacttacgtatcagaaagtgctctggaggacagaattctgtgccccatctgcatgtataaatcgaaggaccttgcatttgggtgtggacatcagacttgctatgaatgcgggagagatttggagcgctgccctctgtgccagcaacacataaccacgaggatcaggctctactgatttgaagccaatgggattgaaaaatgttcagaaccagctttgatgctactgtgcttcatcattttgtaattctgaatgagataacactgtctcagtagtttcgctacactagttatgccaaaaggaagcgcaccagaaaataatgtacagatttttcctccttttatctcttttgttaggtaaacaagttagacagcagtaaaattctgaatgagataatggatattgtgaagcaaaactatcgccatggaaaatatgcattctgtatgcaatgaccccatggattaaagcttcagtaataagtaagatggtcacatctatatatattgcacttatgttccagtaatactgtacattgcgagctgcaaatagatcaacgtgttgtgtgtgtgtgtgtgtgtatgttttgctcaaataggagccggacgaagagaagagaatttagtacacaaacactagtgtagcacatatatctcggcacagtccgagcgctgcgacgtgggacacaaggattgggtcggcacagtcagcagtggcggctttagtacttgtaccccttgacgtacaggctctcggaggcggcggcgtccccggcgccggagccggcgtacttgcccagcgcggcctcggagttggccttgcagcggatgacgaaggtggcctgcgcggcggcgacgttctccttcttgccgacccacttcttgagggtgctctgctgcagcgcgcggccgaaggagaaggacagcgtccagggcttgagcacctccagcttgttcatcgcgtccaggttctgcgtcgcctcctcctcgctctgcccgcccgacaggaacaccaccccgggcaccgccggcggcacggtgcgccgcagcgccgccaccgtgtactccgctatcacctccgcggagac

SEQ ID NO: 83295 - DNA, 2610 bp, Zea Mays
caccacctcaccagcaaacgtcttgagctcgtgctggtgatcgcgacaagcattgtcccttttaccaaatcatcgtcttctcctctcccgcgccgaagcttcctcggacaagtgcggcgtgagtaagagacccggcggacaagaaacctctccccccaccttcgttgcggaattgcatcgccttcggcttgagccaattgacttgacctcactccctccccccacctacctcactcccgtcgtcctcttcttcctcctcgccctcgtcgcggagcggagtggaggcgcgcgttccgggacggcacgggacaggagcggaggaagctcatctgggtgttggcctcatcccctgcacaagctgaggaatggggcaaaaggactccaagccttcaaatggatatggctactcttctgattacgggggtacttcatcgggatataacttgagaaatactggaagtacgtcctccagttatggcgcgaggtatgtgccttcttcagagaacaatgtacagccagaaacacatgccaggttgcagaggaagtattccaggattggtgatgactatcgttctctgagtcaggtgactgaagctttggcgcaagcaggccttgaatcttcaaatcttatcgtaggcattgattttacaaagagcaatgaatggacaggtaaaatttcatttaatcgccgctgcctacatgatattggaaacactccgaacccatatgagcaagctatatctattattggaaggacactttcagtatttgatgaagataacttgattccctgctttggatttggtgacgcatcaactcatgatcaggaggtattcagcttttacccagagaaccgcccatgcaacggatttgaagaggcactagacagatacagagaaatcgttccaactcttcgattagcaggacctacatctttcgctccgatgatcgagacagcaattggaattgttgacagcactggtggtcaatatcatgttcttctgataatcgcagatggacaggttacccgaagtgtcgatacacaatctggacaattgagtccacaggagcgggatactatagatgcaatagtaagagcaagccagttccccctgtcaattgttcttgttggggttggtgatggaccatgggacatgatgcaccagtttgatgacaatatacctgctcggtcatttgacaatttccagtttgtgaacttcacggagattatgtcaaagagcatagcagctgacagaaaggaggcagaatttgcattgtcagcgctgatggaaatccctacacagtacaaagcaacacttgatctccaactcttaggccgccgccaaagaataactccaagaattgctctgccgccaccaacaaggactgcttattcacggactactagctttagccaacagtctggtgtttattcgcgatcaagtagctttgaccaacaaacaagtgtctaccagcaacgttctgagagcttgaaacagcagcaacctgcagccccaaagggacctgacacttacgtatcagaaagtgctctggaggacagaattctgtgccccatctgcatgtataaatcgaaggaccttgcatttgggtgtggacatcagacttgctatgaatgcgggagagatttggagcgctgccctctgtgccagcaacacataaccacgaggatcaggctctactgatttgaagccaatgggattgaaaaatgttcagaaccagctttgatgctactgtgcttcatcattttgtaattctgaatgagataacactgtctcagtagtttcgctacactagttatgccaaaaggaagcgcaccagaaaataatgtacagatttttcctccttttatctcttttgttaggtaaacaagttagacagcagtaaaattctgaatgagataatggatattgtgaagcaaaactatcgccatggaaaatatgcattctgtatgcaatgaccccatggattaaagcttcagtaataagtaagatggtcacatctatatatattgcacttatgttccagtaatactgtacattgcgagctgcaaatagatcaacgtgttgtgtgtgtgtgtgtgtgtatgttttgctcaaataggagccggacgaagagaagagaatttagtacacaaacactagtgtagcacatatatctcggcacagtccgagcgctgcgacgtgggacacaaggattgggtcggcacagtcagcagtggcggctttagtacttgtaccccttgacgtacaggctctcggaggcggcggcgtccccggcgccggagccggcgtacttgcccagcgcggcctcggagttggccttgcagcggatgacgaaggtggcctgcgcggcggcgacgttctccttcttgccgacccacttcttgagggtgctctgctgcagcgcgcggccgaaggagaaggacagcgtccagggcttgagcacctccagcttgttcatcgcgtccaggttctgcgtcgcctcctcctcgctctgcccgcccgacaggaacaccaccccgggcaccgccggcggcacggtgcgccgcagcgccgccaccgtgtactccgctatcacctccgcggagac

SEQ ID NO: 83296 - DNA, 1524 bp, Zea Mays
gacctccaagcccgacctcccaagttggcatgaataagcaagatgcgagcatgaagaactaaaagaggcagtagctaagatactatggcatatgacaaggaactatgctggttgcatctcccaatggttgaaccatgaagaacaggaaacatgcttagctgctaaagatgttatgtcgtttgatctacttaagaagagtctaatgtatctattgaacgcgatgggagttcgtatccgaaaagtgtatgatgaggtcagagggtcggcaattcttaattcaaactcattcatattctgaaagtaaactaaaatgttcttggttttaggaatggtcctacatttctgttggatggtccttaccaaacacagatcagaaaaatcttgcatttggtgctacaacaagcatggtgcatcctgcaaccagtacagacgaatcatcaagtttttacacaccagtttccacctagcatatattgacaacttttcacaaaatacatagggtacttagtggtcagatctttgtttggtgctccaagatggcaagatatgcttctgtgatatctgacatcgtaagaaattgagttcctgaagaatatttgcttggaaattcacaaaattacattccatcaatgttcggtaagcattattatggtatttattcaacttggttggttctactgtctaaaggttcagacaagttagcaaaactttatgtgacccactattatatgatgttacaacatggagaatattgtcgcctcaagaaaggaaacaccaacaatcattcttccttttttgattagtgttggtaatccaattgaataatgaggccatacaaagatttttcgaagcctagggtgccgtatcgatgagtatggtaaggttattctgagcttgtcaacctctttcgacatgtatggtaagctgaactgtgccaatttctagcttgtaaatacaacaaaaaggataagttgactgcatgttcatgtgctcatgtgaaatggactactgggtgctgctaaggattggggtgacggtctatcatggcatggtggaataagcatgtatttttgcatgacgctttggtggaagccgcaaaggaggaggaggctcattgaggagcataatttcataggctaccaagagcaagaggtggaagtgtccagcgctatatctgcttcggcgtcgagctgctcctgtgcgtgacctgcaagtgcgacgtccacaaggagtttagcttcaaccaccgtgtcagatcaggtagctcatgtccatcctcatctttgggtttcaggttttgccttacaattcactgtacaaggttaatcgcaccgaattttgaatcacacgattatgtaggtcgcctctccttccctcctttttgttctgttcttcattttaatgttatatgtgttgactaaatattcttcagtgtttggtatcattttgtgacttcgagtttagaggaggaaccaatatttgtcatacaaatgtgttttgtgtttctaaatggaagtatctttg

SEQ ID NO: 83297 - DNA, 2193 bp, Zea Mays
atggaggcagttcggacttcggagtcggtggtggagtacgtggcgcaggaagaggcggaggagaagaaggaagcgctcaacccaaactcgtggtcgtccaccagcaagaactatgctggttgcatctcccaatggttgaaccatgaagaacaggaaacatgcttagctgctaaagatgttatgtcgtttgatctacttaagaagagtctaatgtatctattgaacgcgatgggagttcgtatccgaaaagtgtatgatgaggaatggtcctacatttctgttggatggtccttaccaaacacagatcagaaaaatcttgcatttggtgctacaacaagcatggtgcatcctgcaaccagtacagacgaatcatcaagtttttacacaccagtttccacctagcatatattgacaacttttcacaaaatacatagggtacttagtggtcagatctttgtttggtgctccaagatggcaagatatgcttctgtgatatctgacatcgtaagaaattgagttcctgaagaatatttgcttggaaattcacaaaattacattccatcaatgttcggtaagcattattatggtatttattcaacttggttggttctactgtctaaaggttcagacaagttagcaaaactttatgtgacccactattatatgatgttacaacatggagaatattgtcgcctcaagaaaggaaacaccaacaatcattcttccttttttgattagtgttggtaatccaattgaataatgaggccatacaaagatttttcgaagcctagggtgccgtatcgatgagtatggtaaggttattctgagcttgtcaacctctttcgacatgtatggtaagctgaactgtgccaatttctagcttgtaaatacaacaaaaaggataagttgactgcatgttcatgtgctcatgtgaaatggactactgggtgctgctaaggattggggtgacggtctatcatggcatggtggaataagcatgtatttttgcatgacgctttggtggaagccgcaaaggaggaggaggctcattgaggagcataatttcataggctaccaagtaaagtacttgtgtcttctactatgattactcacattccacgacttgatagtagcttaatcactactgaatggcagcaactttcactcttagttgttccttgttccatctctgcatcatgttcaaagatctctctatctctgttttcccaccacctttttcgagggaatgtgttgtttctactcttttgcacaactctcacgcaatttcatttaatggctcaactctaccatatgtgttcgtttatatgtgcaaagcttacattttggatactatgtgcgggtgtagctgttgttttttcctagctgtaaatatgtattgctgctctgtgcgtcttcccctgataaccgatttagtcaaattatctgaagtttatgttctcgtgaattcagtgctaataatcccatgccaaattatctaaagcttatggtctcctttatgtgaatccaatgttaataatcctatgtcaaattatctgaagcttatggtctcctttatgtgaatttagtgctcatgtgccaaatcatttgaagcttatggtctctttttattatgtgaattcagtgctaatagtccggtgccaaatatcttccatgaaattccaatggcatgattgttgaaacgaatttccaatttaaaatcttctacatgtgcaaggaattgactcggttgcttaagcttgtttggactacatgcattttggtacttttttaatgagacctagatctatacaggagcaagaggtggaagtgtccagcgctatatctgcttcggcgtcgagctgctcctgtgcgtgacctgcaagtgcgacgtccacaaggagtttagcttcaaccaccgtgtcagatcaggtagctcatgtccatcctcatctttgggtttcaggttttgccttacaattcactgtacaaggttaatcgcaccgaattttgaatcacacgattatgtaggtcgcctctccttccctcctttttgttctgttcttcattttaatgttatatgtgttgactaaatattcttcagtgtttggtatcattttgtgacttcgagtttagaggaggaaccaatatttgtcatacaaatgtgttttgtgtttctaaatggaagtatctttg

SEQ ID NO: 83298 - DNA, 1997 bp, Zea Mays
tagccataacccataccagagtgctcgcaatcacaagagaaaaaaaagaaacttaataaggagagagaggagcttagcgctgtctctctctcgctcgtgcgtgcgtgcccaattgcaggaaagccacaaagtctcgtgttcctgggggcagggatctcctctcctctcctctggctctttaaccggagaggcgaggagtagtacggagcagcatgaggctgctgtcacctccattgccgtccctgcgctcttccgtcccggccgtcctcctccacctcctcctcctgctgctgctgctgtcctcatgcccctccccggcaaacggaagggccgcgccgtcgtctccgggcgctacggcgcctgtcaccaggcacgttcgcgccgccggcgccaatggcaccgcccccgtcgctccggcggtgccggcgccgcctcctgtcgtgatcatcgtggagcgccaccgtcatttccaccgtgagctagtcatcgcctccatcctcgcctcaatcgccatcgtcgcgattatcctctccacgctctacgcgtggatcctgtggcggcggtcccgccggctgccccgcggcaagagcgcagacaccgcgagggggatcatgctggcgccgatcctgagcaagttcaactcgctcaagacgagcaggaaggggctcgtggcgatgatcgagtacccgtcgctggaggcggcgacgggggagttcagtgagagcaacgtgctcggcgtaggcggcttcggttgcgtctacaaggcagtcttcgatggcggcgttaccgcggcggtcaagaggctggagggaggtggccctgagtgcgagaaggaattcgagaatgagctggatctgcttggcaggattcggcaccccaacatcgtgtccctgctgggcttttgtgttcacgaggggaatcactacattgtttatgagctcatggagaagggatccctggacacacagctgcatggggcctcacatggatcagcgctgacctggcatatccggatgaagatcgcactcgacatggccaggggattagaatacctccatgagcactgcagtccaccagtgatccatagggatctgaagtcatctaacatacttttagattctgacttcaatgctaagatttcagattttggtcttgcagtgaccagtgggaacattgacaagggaagcatgaagctttctgggaccttgggttatgtggcccctgagtacctattagatgctactgtgtcgatttcagggaagctgactgaaaagagtgacgtatatgcatttggagtggtgcttcttgagctactaatgggaaggaagcctgtcgagaagatgagtcaaactcagtgccaatcaattgtgacgtgggccatgccgcagctgactgacagaacaaaacttcccaacatagttgacccagtgatcagggacaccatggatccaaagcatttgtaccaagtggcagcagtggcagttctatgtgtgcaaccagaaccaagttacagaccgctgattactgatgttctccactctcttgtccctctagtccctgtggagctcggagggacactgagggttgtagagccaccttccccaaacctaaaacattctccttgttgaggcgtcccgatcagtcgaagatcacagctacatgctgatgaacttggacgatgtttatcagtaactttatcaccctagctgtgtgccagaggatgacggttccaacctgccggttgctggttggatcgagagagaattctggtttgaaaagagttgtctcctgtgggtttgcttgtacaaagaagtgaaagaaaacaacactcttttccttagaattttaggtcccttctgtacagatcaaagtttgtccaacactatttaaaagaatttgagaatgacgagctttgggttccacatgggtacccgagcactttggtttgctgcgatattttgcttcttgtcgtacttcgataaaactgaaaaatgatt

SEQ ID NO: 83299 - DNA, 2050 bp, Zea Mays
tagccataacccataccagagtgctcgcaatcacaagagaaaaaaaagaaacttaataaggagagagaggagcttagcgctgtctctctctcgctcgtgcgtgcgtgcccaattgcaggaaagccacaaagtctcgtgttcctgggggcagggatctcctctcctctcctctggctctttaaccggagaggcgaggagtagtacggagcagcatgaggctgctgtcacctccattgccgtccctgcgctcttccgtcccggccgtcctcctccacctcctcctcctgctgctgctgctgtcctcatgcccctccccggcaaacggaagggccgcgccgtcgtctccgggcgctacggcgcctgtcaccagtgatcatcgtggagcgccaccgtcatttccaccgtgagctagtcatcgcctccatcctcgcctcaatcgccatcgtcgcgattatcctctccacgctctacgcgtggatcctgtggcggcggtcccgccggctgccccgcggcaagagcgcagacaccgcgagggggatcatgctggcgccgatcctgagcaagttcaactcgctcaagacgagcaggaaggggctcgtggcgatgatcgagtacccgtcgctggaggcggcgacgggggagttcagtgagagcaacgtgctcggcgtaggcggcttcggttgcgtctacaaggcagtcttcgatggcggcgttaccgcggcggtcaagaggctggagggaggtggccctgagtgcgagaaggaattcgagaatgagctggatctgcttggcaggattcggcaccccaacatcgtgtccctgctgggcttttgtgttcacgaggggaatcactacattgtttatgagctcatggagaagggatccctggacacacagctgcatggggcctcacatggatcagcgctgacctggcatatccggatgaagatcgcactcgacatggccaggggattagaatacctccatgagcactgcagtccaccagtgatccatagggatctgaagtcatctaacatacttttagattctgacttcaatgctaagatttcagattttggtcttgcagtgaccagtgggaacattgacaagggaagcatgaagctttctgggaccttgggttatgtggcccctgagtacctattagatggtattgtgtcagcttaattgtcaacttcgactcacatacataaacaacttcattatcgacagtgaagttctacttccatcccgtatctttcagctactgtgtcgatttcagggaagctgactgaaaagagtgacgtatatgcatttggagtggtgcttcttgagctactaatgggaaggaagcctgtcgagaagatgagtcaaactcagtgccaatcaattgtgacgtgggtacggtgcacacaaagttacactaaacatagccatgccgcagctgactgacagaacaaaacttcccaacatagttgacccagtgatcagggacaccatggatccaaagcatttgtaccaagtggcagcagtggcagttctatgtgtgcaaccagaaccaagttacagaccgctgattactgatgttctccactctcttgtccctctagtccctgtggagctcggagggacactgagggttgtagagccaccttccccaaacctaaaacattctccttgttgaggcgtcccgatcagtcgaagatcacagctacatgctgatgaacttggacgatgtttatcagtaactttatcaccctagctgtgtgccagaggatgacggttccaacctgccggttgctggttggatcgagagagaattctggtttgaaaagagttgtctcctgtgggtttgcttgtacaaagaagtgaaagaaaacaacactcttttccttagaattttaggtcccttctgtacagatcaaagtttgtccaacactatttaaaagaatttgagaatgacgagctttgggttccacatgggtacccgagcactttggtttgctgcgatattttgcttcttgtcgtacttcgataaaactgaaaaatgatt

SEQ ID NO: 83300 - DNA, 2156 bp, Zea Mays
tagccataacccataccagagtgctcgcaatcacaagagaaaaaaaagaaacttaataaggagagagaggagcttagcgctgtctctctctcgctcgtgcgtgcgtgcccaattgcaggaaagccacaaagtctcgtgttcctgggggcagggatctcctctcctctcctctggctctttaaccggagaggcgaggagtagtacggagcagcatgaggctgctgtcacctccattgccgtccctgcgctcttccgtcccggccgtcctcctccacctcctcctcctgctgctgctgctgtcctcatgcccctccccggcaaacggaagggccgcgccgtcgtctccgggcgctacggcgcctgtcaccagtgatcatcgtggagcgccaccgtcatttccaccgtgagctagtcatcgcctccatcctcgcctcaatcgccatcgtcgcgattatcctctccacgctctacgcgtggatcctgtggcggcggtcccgccggctgccccgcggcaagagcgcagacaccgcgagggggatcatgctggcgccgatcctgagcaagttcaactcgctcaagacgagcaggaaggggctcgtggcgatgatcgagtacccgtcgctggaggcggcgacgggggagttcagtgagagcaacgtgctcggcgtaggcggcttcggttgcgtctacaaggcagtcttcgatggcggcgttaccgcggcggtcaagaggctggagggaggtggccctgagtgcgagaaggaattcgagaatgagctggatctgcttggcaggattcggcaccccaacatcgtgtccctgctgggcttttgtgttcacgaggggaatcactacattgtttatgagctcatggagaagggatccctggacacacagctgcatggggcctcacatggatcagcgctgacctggcatatccggatgaagatcgcactcgacatggccaggggattagaatacctccatgagcactgcagtccaccagtgatccatagggatctgaagtcatctaacatacttttagattctgacttcaatgctaagatttcagattttggtcttgcagtgaccagtgggaacattgacaagggaagcatgaagctttctgggaccttgggttatgtggcccctgagtacctattagatgggaagctgactgaaaagagtgacgtatatgcatttggagtggtgcttcttgagctactaatgggaaggaagcctgtcgagaagatgagtcaaactcagtgccaatcaattgtgacgtgggtacggtgcacacaaagttacactaaacatagtatatctctgatcaagtcaaattcctcaacttggaactttagtagtaatggacaattgtcaaccctcattttcacgcaatgtttattgcatcttagttttattttatcatatactagaaaaacatcaacttcacgatcagtgctaacatttaaggagtcaaatgcagtttctttgtgtgctgatatttgacatgctgaaaaaaaaatgacaaacaggccatgccgcagctgactgacagaacaaaacttcccaacatagttgacccagtgatcagggacaccatggatccaaagcatttgtaccaagtggcagcagtggcagttctatgtgtgcaaccagaaccaagttacagaccgctgattactgatgttctccactctcttgtccctctagtccctgtggagctcggagggacactgagggttgtagagccaccttccccaaacctaaaacattctccttgttgaggcgtcccgatcagtcgaagatcacagctacatgctgatgaacttggacgatgtttatcagtaactttatcaccctagctgtgtgccagaggatgacggttccaacctgccggttgctggttggatcgagagagaattctggtttgaaaagagttgtctcctgtgggtttgcttgtacaaagaagtgaaagaaaacaacactcttttccttagaattttaggtcccttctgtacagatcaaagtttgtccaacactatttaaaagaatttgagaatgacgagctttgggttccacatgggtacccgagcactttggtttgctgcgatattttgcttcttgtcgtacttcgataaaactgaaaaatgatt

SEQ ID NO: 83301 - DNA, 3796 bp, Zea Mays
ccctccttcccattccccgcaaaccaagcgacgacgcggcccacgccatgagctgatgaacattgggccagtcgctgctccagtcctctgctcttccttccgcccacgccagcgccaacgccagcgcctcggggccgtgcgggggctagggtttggattcgtgggtggagtccgaggctagatccagcaggaggaggggaggggaggggaagggttgtgggtccagccggcggggatggccgccaccgccggggcgtcggacgacggcggtagcgtgggcggcggcgggggcggcgagcggatgaagctgctgtgcagcctgggcgggcgcatcctcccgcgcccgggggacggcacgctgcggtatgcaggcggggacacccggatcgtgtccgtgccgcgcggggtatcgctgccggacctcctcgggcggctcgccgacgcgtacggcggcgccactggcccgcacttcgccgtcaagtaccagctccctgacgaagggctcgacgcgctcatctccgtgtcctcgccggaggatctcgacaacatggtcgaggagtacgacaagctcagcggcgccagcccgaagctgagggtgttcatcttccccatcctggatgcggcgggcggcagcggcgccgcaggcggggaggacttggagaccgggaactttgactcgggccttcggtatctggaggccgtgaacggcattgtgcgcaaggacagcatcgcgagcctctcctccacgcagtgctctgacggggggctcccccctccggcgccatcaggtggcggcggccctggatctccagctgcgctctcccccacatccactagctcaaatgatgctgcgagatcgaacatcactggagccggggcggcgcctccgccccttgttgacgtcttcagtaatgctgctcctgctcctgtacatgtgaagccacaggagattggtgctgaagggagggctccccaggcgaatccacatccacatccagaggcagctacaaacacccatccggaggcagcgaggtacaggcaaccactatcgcagctgccaccactgcctcctgtgttcatgaacgatcacagagatgccattcagggtctgaatcagcagctgccaggtaacggagcaagattcgacgactgccacatgtgcttgaaggcattgcctcacgcccactctgatccagtggtcaatgagtatggcaatgaggtgcatggaggggctgctccagagcctgggcctgtgtttatgagcctgcggcctgaagatgtggcaaggatgatgataccggagaggggtgttcagccacccatgggggcttacggatatacgcatatgcatccagtgcctcaggagaggatgtatgtgcccaagatggaaggggttacaaactcagtattcattgatccaactggcttgcatcagcatgtgtatgtgcagcagcagcagcagcagcagcaaatgccgccacaacagttgccatctacctatgggtttagccatattcctgtgatttctagcgagaaggacagagtagtttctccaagttctgcccacaatgatgttgcaaactctcatcatcaatttatgcagcagtcgcagcagcagttaccttctggccatgggatgcctcagtatccagtgaagcctactagtcccagtaacccgcttgctggtgaaggtagtgtaagtggcaattcaaggcataatgaggatggacaggtgtatcgtgacaatatgcctccggttgcacctgtggctgtgccaacatacatggcaaatgtggacaggatgatggattcactccgtatgagccccagcgaagtttctggctctactgaacaaaggaaacatgcaatgtctcctgacagtggcttaccccagaatgcagtgccagattactctcaggggcatccagagaatagtatcagtacctggccagatacacgagcaaatgatgttcatccaagcaacaccaatactttttttgatgttagtgaaccaaagtgactgagagaagagatgtcccgcctgaagtttatcacaaggaagctccacatgaagtcgtagctcctccaaacacagttcagttgccgacagcagcattggcaaaccatgctacaaatgtggatcaagcagctgcacatgcactgccaccaagacctaagagggtagcaagcagagagaacatcagcccaaaggatccgcacccacacaactctttgttgaactgcaaagggccagatctgaatattccagctgaggatgtttctctccagaaacagtcagatcacaaaggtgatgacatctctaacccagatttactgagtatggatgatgggttagctacatctaaagctcagtcatctgagcctcaacctcctctggtaaatgaaggagttggggcaattaccaataaagtagaaggtgaagtccaccccaacgaggtttccaagagcaggccagcagattggatttcaggatttccagcttcagatggacgtctgcagattataaagaacaatgaccttgaagagctccaagagcttggttctggaacttttggaactgtctatcatggtaaatggagaggcactgatgttgcaataaaaagaatcaatgatagatgttttgctgggaaaccatctgagcaagaaaagatgaaccctcgatcgacgcaagagattaattattgccatggatacagcctttggaatggaatacttgcatagcaaaaacattgtgcactttgacttgaaaagtgacaatttgcttgttaatttaagggaccctcagcgtccaatatgcaaggttggtgatcttgggctttcaaaagtgaagtgtcagaccctcatctctggaggtgtccgaggaacacttccatggatggccccagaacttctgaatggtagcagcagcttggtctcagaaaaggttgatgtattctcttttgggattgttctctgggaactgctaacaggagaagagccatatgcagatttacattatggtgttataataggtggcattgtgagcaacactctacggccgccagtgcccgactcctgcgaccccgagtggaggtcactgatggagcaatgctggtcaacagaaccatctgagcggccaaacttcacagaggttgtgaataggctgcgctccatggcggcatcccagaaggtacaacaacactaagggaccatcggcacgcagaagttgtaccagggcagcagtcagtcaaacttgcaggttacatccatgggccgccaattcacgccatccgccatatatgcctaggatctgttcataacccttcatttgttcgtatattgtaatcaaaagttacccgccgtgtgtctacaacgtgtcgtcgcaatggacgcagcaggtgcctgcctattcattcattcataccgttttggtcgtcgagaggtgcgttcaataagttactagtccagtgtccgttataggggagtccggtagtgtccgttataggggagtccggtattattattattattgtttcatcttcttcttcgccctttctctgggtaataattgggttacttggaaactgttgatcagtgggtcagttagaatgtgaactggttgttgctgggtaagtatgtggtttgttggtatattgagtctggggacagagagtgaggtcctgatctgcttgtaacagtacctgctttggttttgtgattgctatatactgaaacccaaatccctctgttgctattctaaattctgagttgtttggtgcatgtcgtggtgggagca

SEQ ID NO: 83302 - DNA, 3949 bp, Zea Mays
ctagtccctccgcagtccgcccacgccccccgtctccctccttcccattccccgcaaaccaagcgacgacgcggcccacgccatgagctgatgaacattgggccagtcgctgctccagtcctctgctcttccttccgcccacgccagcgccaacgccagcgcctcggggccgtgcgggggctagggtttggattcgtgggtggagtccgaggctagatccagcaggaggaggggaggggaggggaagggttgtgggtccagccggcggggatggccgccaccgccggggcgtcggacgacggcggtagcgtgggcggcggcgggggcggcgagcggatgaagctgctgtgcagcctgggcgggcgcatcctcccgcgcccgggggacggcacgctgcggtatgcaggcggggacacccggatcgtgtccgtgccgcgcggggtatcgctgccggacctcctcgggcggctcgccgacgcgtacggcggcgccactggcccgcacttcgccgtcaagtaccagctccctgacgaagggctcgacgcgctcatctccgtgtcctcgccggaggatctcgacaacatggtcgaggagtacgacaagctcagcggcgccagcccgaagctgagggtgttcatcttccccatcctggatgcggcgggcggcagcggcgccgcaggcggggaggacttggagaccgggaactttgactcgggccttcggtatctggaggccgtgaacggcattgtgcgcaaggacagcatcgcgagcctctcctccacgcagtgctctgacggggggctcccccctccggcgccatcaggtggcggcggccctggatctccagctgcgctctcccccacatccactagctcaaatgatgctgcgagatcgaacatcactggagccggggcggcgcctccgccccttgttgacgtcttcagtaatgctgctcctgctcctgtacatgtgaagccacaggagattggtgctgaagggagggctccccaggcgaatccacatccacatccagaggcagctacaaacacccatccggaggcagcgaggtacaggcaaccactatcgcagctgccaccactgcctcctgtgttcatgaacgatcacagagatgccattcagggtctgaatcagcagctgccaggtaacggagcaagattcgacgactgccacatgtgcttgaaggcattgcctcacgcccactctgatccagtggtcaatgagtatggcaatgaggtgcatggaggggctgctccagagcctgggcctgtgtttatgagcctgcggcctgaagatgtggcaaggatgatgataccggagaggggtgttcagccacccatgggggcttacggatatacgcatatgcatccagtgcctcaggagaggatgtatgtgcccaagatggaaggggttacaaactcagtattcattgatccaactggcttgcatcagcatgtgtatgtgcagcagcagcagcagcagcagcaaatgccgccacaacagttgccatctacctatgggtttagccatattcctgtgatttctagcgagaaggacagagtagtttctccaagttctgcccacaatgatgttgcaaactctcatcatcaatttatgcagcagtcgcagcagcagttaccttctggccatgggatgcctcagtatccagtgaagcctactagtcccagtaacccgcttgctggtgaaggtagtgtaagtggcaattcaaggcataatgaggatggacaggtgtatcgtgacaatatgcctccggttgcacctgtggctgtgccaacatacatggcaaatgtggacaggatgatggattcactccgtatgagccccagcgaagtttctggctctactgaacaaaggaaacatgcaatgtctcctgacagtggcttaccccagaatgcagtgccagattactctcaggggcatccagagaatagtatcagtacctggccagatacacgagcaaatgatgttcatccaagcaacaccaatactttttttgatgttagtgaaccaaaggtattgcttcaaactgaatctgcgccaccaccttctgttgccagctcttatctgcataatgtccagcatgttaatatgagtcatatgccacatatggtgagcattgggggaccctattctagctatgttgttgctacagtcggacctggtggattgcctcaatcaacttatggtattgatatgatctatccaaatgccactgttaatccagtgactgagagaagagatgtcccgcctgaagtttatcacaaggaagctccacatgaagtcgtagctcctccaaacacagttcagttgccgacagcagcattggcaaaccatgctacaaatgtggatcaagcagctgcacatgcactgccaccaagacctaagagggtagcaagcagagagaacatcagcccaaaggatccgcacccacacaactctttgttgaactgcaaagggccagatctgaatattccagctgaggatgtttctctccagaaacagtcagatcacaaaggtgatgacatctctaacccagatttactgagtatggatgatgggttagctacatctaaagctcagtcatctgagcctcaacctcctctggtaaatgaaggagttggggcaattaccaataaagtagaaggtgaagtccaccccaacgaggtttccaagagcaggccagcagattggatttcaggatttccagcttcagatggacgtctgcagattataaagaacaatgaccttgaagagctccaagagcttggttctggaacttttggaactgtctatcatggtaaatggagaggcactgatgttgcaataaaaagaatcaatgatagatgttttgctgggaaaccatctgagcaagaaaagatgaaccctcgatcgacgcaagagattaattattgccatggatacagcctttggaatggaatacttgcatagcaaaaacattgtgcactttgacttgaaaagtgacaatttgcttgttaatttaagggaccctcagcgtccaatatgcaaggttggtgatcttgggctttcaaaagtgaagtgtcagaccctcatctctggaggtgtccgaggaacacttccatggatggccccagaacttctgaatggtagcagcagcttggtctcagaaaaggttgatgtattctcttttgggattgttctctgggaactgctaacaggagaagagccatatgcagatttacattatggtgttataataggtggcattgtgagcaacactctacggccgccagtgcccgactcctgcgaccccgagtggaggtcactgatggagcaatgctggtcaacagaaccatctgagcggccaaacttcacagaggttgtgaataggctgcgctccatggcggcatcccagaaggtacaacaacactaagggaccatcggcacgcagaagttgtaccagggcagcagtcagtcaaacttgcagttacccgccgtgtgtctacaacgtgtcgtcgcaatggacgcagcaggtgcctgcctattcattcattcataccgttttggtcgtcgagaggtgcgttcaataagttactagtccagtgtccgttataggggagtccggtagtgtccgttataggggagtccggtattattattattattgtttcatcttcttcttcgccctttctctgggtaataattgggttacttggaaactgttgatcagtgggtcagttagaatgtgaactggttgttgctgggtaagtatgtggtttgttggtatattgagtctggggacagagagtgaggtcctgatctgcttgtaacagtacctgctttggttttgtgattgctatatactgaaacccaaatccctctgttgctattctaaattctgagttgtttggtgcatgtcgtggtgggagca

SEQ ID NO: 83303 - DNA, 4161 bp, Zea Mays
cgcgagcacgcacgctgcctgtactactactcgtctgtctagtccctccgcagtccgcccacgccccccgtctccctccttcccattccccgcaaaccaagcgacgacgcggcccacgccatgagctgatgaacattgggccagtcgctgctccagtcctctgctcttccttccgcccacgccagcgccaacgccagcgcctcggggccgtgcgggggctagggtttggattcgtgggtggagtccgaggctagatccagcaggaggaggggaggggaggggaagggttgtgggtccagccggcggggatggccgccaccgccggggcgtcggacgacggcggtagcgtgggcggcggcgggggcggcgagcggatgaagctgctgtgcagcctgggcgggcgcatcctcccgcgcccgggggacggcacgctgcggtatgcaggcggggacacccggatcgtgtccgtgccgcgcggggtatcgctgccggacctcctcgggcggctcgccgacgcgtacggcggcgccactggcccgcacttcgccgtcaagtaccagctccctgacgaagggctcgacgcgctcatctccgtgtcctcgccggaggatctcgacaacatggtcgaggagtacgacaagctcagcggcgccagcccgaagctgagggtgttcatcttccccatcctggatgcggcgggcggcagcggcgccgcaggcggggaggacttggagaccgggaactttgactcgggccttcggtatctggaggccgtgaacggcattgtgcgcaaggacagcatcgcgagcctctcctccacgcagtgctctgacggggggctcccccctccggcgccatcaggtggcggcggccctggatctccagctgcgctctcccccacatccactagctcaaatgatgctgcgagatcgaacatcactggagccggggcggcgcctccgccccttgttgacgtcttcagtaatgctgctcctgctcctgtacatgtgaagccacaggagattggtgctgaagggagggctccccaggcgaatccacatccacatccagaggcagctacaaacacccatccggaggcagcgaggtacaggcaaccactatcgcagctgccaccactgcctcctgtgttcatgaacgatcacagagatgccattcagggtctgaatcagcagctgccaggtaacggagcaagattcgacgactgccacatgtgcttgaaggcattgcctcacgcccactctgatccagtggtcaatgagtatggcaatgaggtgcatggaggggctgctccagagcctgggcctgtgtttatgagcctgcggcctgaagatgtggcaaggatgatgataccggagaggggtgttcagccacccatgggggcttacggatatacgcatatgcatccagtgcctcaggagaggatgtatgtgcccaagatggaaggggttacaaactcagtattcattgatccaactggcttgcatcagcatgtgtatgtgcagcagcagcagcagcagcagcaaatgccgccacaacagttgccatctacctatgggtttagccatattcctgtgatttctagcgagaaggacagagtagtttctccaagttctgcccacaatgatgttgcaaactctcatcatcaatttatgcagcagtcgcagcagcagttaccttctggccatgggatgcctcagtatccagtgaagcctactagtcccagtaacccgcttgctggtgaaggtagtgtaagtggcaattcaaggcataatgaggatggacaggtgtatcgtgacaatatgcctccggttgcacctgtggctgtgccaacatacatggcaaatgtggacaggatgatggattcactccgtatgagccccagcgaagtttctggctctactgaacaaaggaaacatgcaatgtctcctgacagtggcttaccccagaatgcagtgccagattactctcaggggcatccagagaatagtatcagtacctggccagatacacgagcaaatgatgttcatccaagcaacaccaatactttttttgatgttagtgaaccaaaggtattgcttcaaactgaatctgcgccaccaccttctgttgccagctcttatctgcataatgtccagcatgttaatatgagtcatatgccacatatggtgagcattgggggaccctattctagctatgttgttgctacagtcggacctggtggattgcctcaatcaacttatggtattgatatgatctatccaaatgccactgttaatccagtgactgagagaagagatgtcccgcctgaagtttatcacaaggaagctccacatgaagtcgtagctcctccaaacacagttcagttgccgacagcagcattggcaaaccatgctacaaatgtggatcaagcagctgcacatgcactgccaccaagacctaagagggtagcaagcagagagaacatcagcccaaaggatccgcacccacacaactctttgttgaactgcaaagggccagatctgaatattccagctgaggatgtttctctccagaaacagtcagatcacaaaggtgatgacatctctaacccagatttactgagtatggatgatgggttagctacatctaaagctcagtcatctgagcctcaacctcctctggtaaatgaaggagttggggcaattaccaataaagtagaaggtgaagtccaccccaacgaggtttccaagagcaggccagcagattggatttcaggatttccagcttcagatggacgtctgcagattataaagaacaatgaccttgaagagctccaagagcttggttctggaacttttggaactgtctatcatgcggtatgacttctggaatgaagcatctaaacttgctgatctgcaccacccaaatgttgtcgcgttttatggtgttgttcttgatggacctgggggatccattgccacagttacagaatatatggtcaatggttcacttaggacagctttgctaaagaatgccaaaaccctcgatcgacgcaagagattaattattgccatggatacagcctttggaatggaatacttgcatagcaaaaacattgtgcactttgacttgaaaagtgacaatttgcttgttaatttaagggaccctcagcgtccaatatgcaaggttggtgatcttgggctttcaaaagtgaagtgtcagaccctcatctctggaggtgtccgaggaacacttccatggatggccccagaacttctgaatggtagcagcagcttggtctcagaaaaggttgatgtattctcttttgggattgttctctgggaactgctaacaggagaagagccatatgcagatttacattatggtgttataataggtggcattgtgagcaacactctacggccgccagtgcccgactcctgcgaccccgagtggaggtcactgatggagcaatgctggtcaacagaaccatctgagcggccaaacttcacagaggttgtgaataggctgcgctccatggcggcatcccagaaggtacaacaacactaagggaccatcggcacgcagaagttgtaccagggcagcagtcagtcaaacttgcaggttacatccatgggccgccaattcacgccatccgccatatatgcctaggatctgttcataacccttcatttgttcgtatattgtaatcaaaagttacccgccgtgtgtctacaacgtgtcgtcgcaatggacgcagcaggtgcctgcctattcattcattcataccgttttggtcgtcgagaggtgcgttcaataagttactagtccagtgtccgttataggggagtccggtagtgtccgttataggggagtccggtattattattattattgtttcatcttcttcttcgccctttctctgggtaataattgggttacttggaaactgttgatcagtgggtcagttagaatgtgaactggttgttgctgggtaagtatgtggtttgttggtatattgagtctggggacagagagtgaggtcctgatctgcttgtaacagtacctgctttggttttgtgattgctatatactgaaacccaaatccctctgttgctattctaaattctgagttgtttggtgcatgtcgtggtgggagca

SEQ ID NO: 83304 - DNA, 251 bp, Zea Mays
gctgtcccctaccgcctccacaggccgcgacgacaccagtagctacaaaccctaggccgtcgcaccctcaggctcctaattggcgtcttccctcgcaaaatctagaaacgcagggccagattggatggagtgaataaaaatctcaaggtgtagcgtaaatggcgaggccaagccagaggcgggggagaccgggcgacttctgccaggtctccgcaggattttttgtcacgtaggcagtagcggaggacgat

SEQ ID NO: 83305 - DNA, 349 bp, Zea Mays
cttgttggccaacaacatatagcttgtcaatgcgacggagggaaagagcccctttggctgaacgaactaataagtaatcagttggtgcaaccttatggggaaatacaggtgatctatacatgtttgtttcaagacaagattggtgggacccagaatgtatctctcctagaaaaggggatttatcagcaggatcaattgcaagcactgtgcccagtccatcactgttgtttcgcagtgatgcagctgtctgatcagtaggggtagttttctggtaatatgtacagagacgggctcccattcctgcattcgagagaagcaaaggtctctcttcacaatatctgcactcagg

SEQ ID NO: 83306 - DNA, 3870 bp, Zea Mays
gtagcacgtgagcatagcttcagctggccactaaaccctcgtcttccccttccaagcgaatcccattccctacctttcgccgccgcctacgcaccatcgctcgaaaccctagccccattccccgtctcgctcggaatcccagctacctccagcgccgccgcgactgcaggataggaggccatggacgacgtgtgcgaggggaaggacttctccttcccggagcaggaggagggggtgatcgagctgtgggcgaagctcgacgccttccacgagcagctccggcgcacggagggcggcgaggagttcgtattctacgacggtccccccttcgccacgggcctgccccattacggccacatactcgccggtaccatcaaggacgtggtcacccggcaccagtcgatgcgaggccgccacgtctcgcgacggttcggatgggactgtcacggactccccgtcgagttcgagatcgataaggcgctcggcatcaccaaccggcagcaggtgttcgacctcggcatcggcaagtacaacgagacgtgccgcagcatcgtcaccaagtacgtctccgagtgggaggccatggttacacgcacggggaggtggattgacttcaagaacgactacaaaaccatggacctcaacttcatggagagcgtctggtgggtgtttgcccagctatgggagaaggacctcgtctataggggtttcaaggtcatgccttacagcacaggatgcaaaactgcactgtcaaactttgaggcagcactggactataggactgttcctgacccagcggtgatggtatccttccctattgttggcgatgcggacaatgcagctcttgttgcatggactacaacaccctggacacttccaagtaacctagcgctgtgtgtcaatgccaatcttacatatgcaaaggttaaagacaaatcaaatggagcagtatatgttattgcagaatccaggcttgggcagttaccagttaaggccaaagcttcaggaaagaagcaggcaccttcaaagggaagcaatattgaagctgttcaggatggtttggacaaggaatcatatgagctgttgtcaaagattcctggggtatccttggttggcttaaaatatactcctctatttgactttttcattgaacttcaagggactgcctttagagtgattgcggataactatgtcacggatgatagtggaacgggtgttgttcattgtgctcctgcttttggtgaagacgaccatcgtgtttgccttgctgctgggatatttgagactgctggacttgttgttgctgttgatgacgacggatgttttattgaaaaaatatctgattttaaagggcgatatgtcaaagaagccgacaaggatatcatcaatgctgttaaggataaaggaagactcattagtaaagggagtattgagcactcttatccattttgttggcgatcgggcactcctcttatttatcgggctgttccaagctggtttgtcaaggttgagaagattaaagaccagttgctggaatgtaacaaggagacttactgggtgcctgactatgttaaggaaaaaagatttcacaactggcttgaaggtgctcgtgattgggctgttagcagaagtagattctggggtactccacttccactgtggataagtcaagatggtgaagaaattgttgttatggattctatagagaagcttgaaaaattatctggagtcaaggtcactgatcttcaccgacactatgttgatgatattacaattccctctaagagaggacctgagtttggggtgctcaaacgtgttgatgatgttttcgactgctggttcgagagtgggtcaatgccatatgcctacattcactatccatttgagaatcgggaactatttgaaaagaactttcctggcaattttgtggcagagggtttagatcaaacccgtggatggttctatactctgatggttctctcaacagcactgtttgggaagcctgcatttaagaatcttatatgcaatgggcttgtcttggctgaggatggtaagaaaatgagcaagagtaaaaagaactatcctccacccaaggatctcattgatgagtttggagcggatgctctgcgactatatttggtaaactccccagttgtacgtgcagagtctctacgattcaaacgtactggtgtctttgctgttgtgaaagatgtcttcctcccatggtataacgcatatagattttttgtccaaaatgcaaagagactggaagttgagggtcttgcctcattttctccgatggaacaagtggtacttctgaagtcatccaatgtgttggatcactggataaactctgcaactgaaagtctagttagctttgttcaccaggagatggatgcatatcggctttacacggttgtgccgtatttggtaaaatacattgactatcttactaacatatatgtgcgtttgaaccgcaaacggttcaaagggcgtactggagaagaagactgcagaatttctctttcaacactctaccatgttcttgtaacaacttgcgtggtgatggctccatttacaccattctttactgaagttctttatcaaaatttgcggaaggtgtcaagtaattctgaggagagcatccacttttgcaagttcccttccacaactggcgagagagatgagcgtgttgagcaaagtgtaaagaggatggtgaccataattgatcttgcacgtaatattcgtgagcggcataacaaagctctcaaaacaccactcaaggaaatggtggttgtgcatccagacaatgacttccttgaagacatcactggcaaactaaaggagtatgtcatggaggaaatcaatgttaagaatgtcactccatgtaatgaccccttgatgtatgcttctctgcgagccgagcctaatttcagcgtgctaggaaaaagacttggaaaagacatgggaaaagtatcaaatgtggtgaagaagatgactcaggagcagatcttagcatttgaaaaaagtggagaggtttcattcttcggccattgcttgaagctagatgatatcaaggttgtccgacaattcaagcgtcctgaaaatgtgtcagagaaggagattgatgctgcaggagatggtgatgttttagtcattttggatctacgaaccgaccagtcattgtttgaagctggagtggctcgagaggttgtgaacaggatccagaaattacgaaagactgctcagcttgaacctgctgatccagttgatgtgtattacgaatctgtgggcaatgacaaaaacactctggaagagatattgaagtcacaggatcagtatattagagacgcacttggctcaccaatcgttccaaaggaaatggcaccaacagatgtcgtagtacttggcgaggaatcgcacaacgtacatgacatgtcatttgtcatatgcatcgcaaggtccaccccgattatttcaccagatcttctttctcatgcctcaggcaacagcaatcatgtcgaggcgttgagagtatatcttctgtcaaaatctctatccagattgaagaaccagttccaaagtggaaatggcgtgattacggtcgactgcatcgaaggttatccactaatcaggttacagctaggaaagcatgtttttctaagtgcaggggatttttatctggctagtcgatcctaatttttgtgtgcagcatcccaattttgactgattcacccatcattttgccgcaatcggcttaaacagcttggttccatttatgcattcagattcacttgttaaaggtgaaaaatcccaatttatgatataccatgtgatcaggcacctatggttcttgctcaagctttaaca

SEQ ID NO: 83307 - DNA, 3840 bp, Zea Mays
gtagcacgtgagcatagcttcagctggccactaaaccctcgtcttccccttccaagcgaatcccattccctacctttcgccgccgcctacgcaccatcgctcgaaaccctagccccattccccgtctcgctcggaatcccagctacctccagcgccgccgcgactgcaggataggaggccatggacgacgtgtgcgaggggaaggacttctccttcccggagcaggaggagggggtgatcgagctgtgggcgaagctcgacgccttccacgagcagctccggcgcacggagggcggcgaggagttcgtattctacgacggtccccccttcgccacgggcctgccccattacggccacatactcgccggtaccatcaaggacgtggtcacccggcaccagtcgatgcgaggccgccacgtctcgcgacggttcggatgggactgtcacggactccccgtcgagttcgagatcgataaggcgctcggcatcaccaaccggcagcaggtgttcgacctcggcatcggcaagtacaacgagacgtgccgcagcatcgtcaccaagtacgtctccgagtgggaggccatggttacacgcacggggaggtggattgacttcaagaacgactacaaaaccatggacctcaacttcatggagagcgtctggtgggtgtttgcccagctatgggagaaggacctcgtctataggggtttcaaggtcatgccttacagcacaggatgcaaaactgcactgtcaaactttgaggcagcactggactataggactgttcctgacccagcggtgatggtatccttccctattgttggcgatgcggacaatgcagctcttgttgcatggactacaacaccctggacacttccaagtaacctagcgctgtgtgtcaatgccaatcttacatatgcaaaggttaaagacaaatcaaatggagcagtatatgttattgcagaatccaggcttgggcagttaccagttaaggccaaagcttcaggaaagaagcaggcaccttcaaagggaagcaatattgaagctgttcaggatggtttggacaaggaatcatatgagctgttgtcaaagattcctggggtatccttggttggcttaaaatatactcctctatttgactttttcattgaacttcaagggactgcctttagagtgattgcggataactatgtcacggatgatagtggaacgggtgttgttcattgtgctcctgcttttggtgaagacgaccatcgtgtttgccttgctgctgggatatttgagactgctggacttgttgttgctgttgatgacgacggatgttttattgaaaaaatatctgattttaaagggcgatatgtcaaagaagccgacaaggatatcatcaatgctgttaaggataaaggaagactcattagtaaagggagtattgagcactcttatccattttgttggcgatcgggcactcctcttatttatcgggctgttccaagctggtttgtcaaggttgagaagattaaagaccagttgctggaatgtaacaaggagacttactgggtgcctgactatgttaaggaaaaaagatttcacaactggcttgaaggtgctcgtgattgggctgttagcagaagtagattctggggtactccacttccactgtggataagtcaagatggtgaagaaattgttgttatggattctatagagaagcttgaaaaattatctggagtcaaggtcactgatcttcaccgacactatgttgatgatattacaattccctctaagagaggacctgagtttggggtgctcaaacgtgttgatgatgttttcgactgctggttcgagagtgggtcaatgccatatgcctacattcactatccatttgagaatcgggaactatttgaaaagaactttcctggcaattttgtggcagagggtttagatcaaacccgtggatggttctatactctgatggttctctcaacagcactgtttgggaagcctgcatttaagaatcttatatgcaatgggcttgtcttggctgaggatggtaagaaaatgagcaagagtaaaaagaactatcctccacccaaggatctcattgatgagtttggagcggatgctctgcgactatatttggtaaactccccagttgtacgtgcagagtctctacgattcaaacgtactggtgtctttgctgttgtgaaagatgtcttcctcccatggtataacgcatatagattttttgtccaaaatgcaaagagactggaagttgagggtcttgcctcattttctccgatggaacaagtggtacttctgaagtcatccaatgtgttggatcactggataaactctgcaactgaaagtctagttagctttgttcaccaggagatggatgcatatcggctttacacggttgtgccgtatttggtaaaatacattgactatcttactaacatatatgtgcgtttgaaccgcaaacggttcaaagggcgtactggagaagaagactgcagaatttctctttcaacactctaccatgttcttgtaacaacttgcgtggtgatggctccatttacaccattctttactgaagttctttatcaaaatttgcggaaggtgtcaagtaattctgaggagagcatccacttttgcaagttcccttccacaactggcgagagagatgagcgtgttgagcaaagtgtaaagaggatggtgaccataattgatcttgcacgtaatattcgtgagcggcataacaaagctctcaaaacaccactcaaggaaatggtggttgtgcatccagacaatgacttccttgaagacatcactggcaaactaaaggagtatgtcatggaggaaatcaatgttaagaatgtcactccatgtaatgaccccttgatgtatgcttctctgcgagccgagcctaatttcagcgtgctaggaaaaagacttggaaaagacatgggaaaagtatcaaatgtggtgaagaagatgactcaggagcagatcttagcatttgaaaaaagtggagaggtttcattcttcggccattgcttgaagctagatgatatcaaggttgtccgacaattcaagcgtcctgaaaatgtgtcagagaaggagattgatgctgcaggagatggtgatgttttagtcattttggatctacgaaccgaccagtcattgtttgaagctggagtggctcgagaggttgtgaacaggatccagaaattacgaaagactgctcagcttgaacctgctgatccagttgatgtgtattacgaatctgtgggcaatgacaaaaacactctggaagagatattgaagtcacaggatcagtatattagagacgcacttggctcaccaatcgttccaaaggaaatggcaccaacagatgtcgtagtacttggcgaggaatcgcacaacgtacatgacatgtcatttgtcatatgcatcgcaaggtccaccccgattatttcaccagatcttctttctcatgcctcaggcaacagcaatcatgtcgaggcgttgagagtatatcttctgtcaaaatctctatccagattgaagaaccagttccaaagtggaaatggcgtgattacggtcgactgcatcgaaggttatccactaatcaggttacagctaggaaagcatgtttttctaagtgcaggggatttttatctggctagtcgatcctaatttttgtgtgcagcatcccaattttgactgattcacccatcattttgccgcaatcggcttaaacagcttggttccatttatgcattcagattcacttgttaaagtgatcaggcacctatggttcttgctcaagctttaaca

SEQ ID NO: 83308 - DNA, 2284 bp, Zea Mays
tgatactagtgactggattgagtattaaccaaatctatatcaatcaaggtttttatttatctataggttttcgactgctggttcgagagtgggtcaatgccatatgcctacattcactatccatttgagaatcgggaactatttgaaaagaactttcctggcaattttgtggcagagggtttagatcaaacccgtggatggttctatactctgatggttctctcaacagcactgtttgggaagcctgcatttaagaatcttatatgcaatgggcttgtcttggctgaggatggtaagaaaatgagcaagagtaaaaagaactatcctccacccaaggatctcattgatgagtttggagcggatgctctgcgactatatttggtaaactccccagttgtacgtgcagagtctctacgattcaaacgtactggtgtctttgctgttgtgaaagatgtcttcctcccatggtataacgcatatagattttttgtccaaaatgcaaagagactggaagttgagggtcttgcctcattttctccgatggaacaagtggtacttctgaagtcatccaatgtgttggatcactggataaactctgcaactgaaagtctagttgtgccgtatttggtaaaatacattgactatcttactaacatatatgtgcgtttgaaccgcaaacggttcaaagggcgtactggagaagaagactgcagaatttctctttcaacactctaccatgttcttgtaacaacttgcgtggtgatggctccatttacaccattctttactgaagttctttatcaaaatttgcggaaggtgtcaagtaattctgaggagagcatccacttttgcaagttcccttccacaactggcgagagagatgagcgtgttgagcaaagtgtaaagaggatggtgaccataattgatcttgcacgtaatattcgtgagcggcataacaaagctctcaaaacaccactcaaggaaatggtggttgtgcatccagacaatgacttccttgaagacatcactggcaaactaaaggagtatgtcatggaggaaatcaatgttaagaatgtcactccatgtaatgaccccttgatgtatgcttctctgcgagccgagcctaatttcagcgtgctaggaaaaagacttggaaaagacatgggaaaagtatcaaatgtggtgaagaagatgactcaggagcagatcttagcatttgaaaaaagtggagaggtttcattcttcggccattgcttgaagctagatgatatcaaggttgtccgacaattcaagcgtcctgaaaatgtgtcagagaaggagattgatgctgcaggagatggtgatgttttagtcattttggatctacgaaccgaccagtcattgtttgaagctggagtggctcgagaggttgtgaacaggatccagaaattacgaaagactgctcagcttgaacctgctgatccagttgatgtgtattacgaatctgtgggcaatgacaaaaacactctggaagagatattgaagtcacaggatcagtatattagagacgcacttggctcaccaatcgttccaaaggaaatggcaccaacagatgtcgtagtacttggcgaggaatcgcacaacgtacatgacatgtcatttgtcatatgcatcgcaaggtccaccccgattatttcaccagatcttctttctcatgcctcaggcaacagcaatcatgtcgaggcgttgagagtatatcttctgtcaaaatctctatccagattgaagaaccagttccaaagtggaaatggcgtgattacggtcgactgcatcgaaggttatccactaatcaggttacagctaggaaagcatgtttttctaagtgcaggggatttttatctggctagtcgatcctaatttttgtgtgcagcatcccaattttgactgattcacccatcattttgccgcaatcggcttaaacagcttggttccatttatgcattcagattcacttgttaaaggtgaaaaatcccaatttatgatataccatggtactctccgttctttttttatttgtcgtgttttagttcaaaaatgaactagccggtgacaaatatttttttttattttgtcgtgttttagttcaaaaataattagccggtgacaaatattcgagtaagctataggttcccatacccctagtgaattatgagtagataacatgtatgtttgtaatctcttgggtgtttggtttttgaggattgatgtggtccatcagattttgatgaatgaatgcatttcattt

SEQ ID NO: 83309 - DNA, 3069 bp, Zea Mays
caccaccactcttaagtcttacttgctgaagatatactcctctatttgactttttcattgaacttcaagggactgcctttagagtgattgcggataactatgtcacggatgatagtggaacgggtgttgttcattgtgctcctgcttttggtgaagacgaccatcgtgtttgccttgctgctgggatatttgagactgctggacttgttgttgctgttgatgacgacggatgttttattgaaaaaatatctgattttaaagggcgatatgtcaaagaagccgacaaggatatcatcaatgctgttaaggataaaggaagactcattagtaaagggagtattgagcactcttatccattttgttggcgatcgggcactcctcttatttatcgggctgttccaagctggtttgtcaaggttgagaagattaaagaccagttgctggaatgtaacaaggagacttactgggtgcctgactatgttaaggaaaaaagatttcacaactggcttgaaggtgctcgtgattgggctgttagcagaagtagattctggggtactccacttccactgtggataagtcaagatggtgaagaaattgttgttatggattctatagagaagcttgaaaaattatctggagtcaaggtcactgatcttcaccgacactatgttgatgatattacaattccctctaagagaggacctgagtttggggtgctcaaacgtgttgatgatgttttcgactgctggttcgagagtgggtcaatgccatatgcctacattcactatccatttgagaatcgggaactatttgaaaagaactttcctggcaattttgtggcagagggtttagatcaaacccgtggatggttctatactctgatggttctctcaacagcactgtttgggaagcctgcatttaagaatcttatatgcaatgggcttgtcttggctgaggatggtaagaaaatgagcaagagtaaaaagaactatcctccacccaaggatctcattgatgagtttggagcggatgctctgcgactatatttggtaaactccccagttgtacgtgcagagtctctacgattcaaacgtactggtgtctttgctgttgtgaaagatgtcttcctcccatggtataacgcatatagattttttgtccaaaatgcaaagagactggaagttgagggtcttgcctcattttctccgatggaacaagtggtacttctgaagtcatccaatgtgttggatcactggataaactctgcaactgaaagtctagttagctttgttcaccaggagatggatgcatatcggctttacacggttgtgccgtatttggtaaaatacattgactatcttactaacatatatgtgcgtttgaaccgcaaacggttcaaagggcgtactggagaagaagactgcagaatttctctttcaacactctaccatgttcttgtaacaacttgcgtggtgatggctccatttacaccattctttactgaagttctttatcaaaatttgcggaaggtgtcaagtaattctgaggagagcatccacttttgcaagttcccttccacaactggcgagggaaatggtggttgtgcatccagacaatgacttccttgaagacatcactggcaaactaaaggaggtttgtttattattagagtgaaacctgtagtcgctgagcttgtctcccattctgaagttatggagctgttttgcggccaccaatcagacacatccatttcaagtttttcttagttttcactaaaaatttggttcatcattggtggatgctgactacatttacttcattccatgtagtatgtcatggaggaaatcaatgttaagaatgtcactccatgtaatgaccccttgatgtatgcttctctgcgagccgagcctaatttcagcgtgctaggaaaaagacttggaaaagacatgggaaaagtatcaaatgtggtgaagaagatgactcaggagcagatcttagcatttgaaaaaagtggagaggtttcattcttcggccattgcttgaagctagatgatatcaaggttgtccgacaattcaagcgtcctgaaaatgtgtcagagaaggagattgatgctgcaggagatggtgatgttttagtcattttggatctacgaaccgaccagtcattgtttgaagctggagtggctcgagaggttgtgaacaggatccagaaattacgaaagactgctcagcttgaacctgctgatccagttgatgtgtattacgaatctgtgggcaatgacaaaaacactctggaagagatattgaagtcacaggatcagtatattagagacgcacttggctcaccaatcgttccaaaggaaatggcaccaacagatgtcgtagtacttggcgaggaatcgcacaacgtacatgacatgtcatttgtcatatgcatcgcaaggtccaccccgattatttcaccagatcttctttctcatgcctcaggcaacagcaatcatgtcgaggcgttgagagtatatcttctgtcaaaatctctatccagattgaagaaccagttccaaagtggaaatggcgtgattacggtcgactgcatcgaaggttatccactaatcaggttacagctaggaaagcatgtttttctaagtgcaggggatttttatctggctagtcgatcctaatttttgtgtgcagcatcccaattttgactgattcacccatcattttgccgcaatcggcttaaacagcttggttccatttatgcattcagattcacttgttaaaggtgaaaaatcccaatttatgatataccatggtactctccgttctttttttatttgtcgtgttttagttcaaaaatgaactagccggtgacaaatatttttttttattttgtcgtgttttagttcaaaaataattagccggtgacaaatattcgagtaagctataggttcccatacccctagtgaattatgagtagataacatgtatgtttgtaatctcttgggtgtttggtttttgaggattgatgtggtccatcagattttgatgaatgaatgcatttcattt

SEQ ID NO: 83310 - DNA, 2963 bp, Zea Mays
catttaccaagcaccaccactcttaagtcttacttgctgaagatatactcctctatttgactttttcattgaacttcaagggactgcctttagagtgattgcggataactatgtcacggatgatagtggaacgggtgttgttcattgtgctcctgcttttggtgaagacgaccatcgtgtttgccttgctgctgggatatttgagactgctggacttgttgttgctgttgatgacgacggatgttttattgaaaaaatatctgattttaaagggcgatatgtcaaagaagccgacaaggatatcatcaatgctgttaaggataaaggaagactcattagtaaagggagtattgagcactcttatccattttgttggcgatcgggcactcctcttatttatcgggctgttccaagctggtttgtcaaggttgagaagattaaagaccagttgctggaatgtaacaaggagacttactgggtgcctgactatgttaaggaaaaaagatttcacaactggcttgaaggtgctcgtgattgggctgttagcagaagtagattctggggtactccacttccactgtggataagtcaagatggtgaagaaattgttgttatggattctatagagaagcttgaaaaattatctggagtcaaggtcactgatcttcaccgacactatgttgatgatattacaattccctctaagagaggacctgagtttggggtgctcaaacgtgttgatgatgttttcgactgctggttcgagagtgggtcaatgccatatgcctacattcactatccatttgagaatcgggaactatttgaaaagaactttcctggcaattttgtggcagagggtttagatcaaacccgtggatggttctatactctgatggttctctcaacagcactgtttgggaagcctgcatttaagaatcttatatgcaatgggcttgtcttggctgaggatggtaagaaaatgagcaagagtaaaaagaactatcctccacccaaggatctcattgatgagtttggagcggatgctctgcgactatatttggtaaactccccagttgtacgtgcagagtctctacgattcaaacgtactggtgtctttgctgttgtgaaagatgtcttcctcccatggtataacgcatatagattttttgtccaaaatgcaaagagactggaagttgagggtcttgcctcattttctccgatggaacaagtggtacttctgaagtcatccaatgtgttggatcactggataaactctgcaactgaaagtctagttgtgccgtatttggtaaaatacattgactatcttactaacatatatgtgcgtttgaaccgcaaacggttcaaagggcgtactggagaagaagactgcagaatttctctttcaacactctaccatgttcttgtaacaacttgcgtggtgatggctccatttacaccattctttactgaagttctttatcaaaatttgcggaaggtgtcaagtaattctgaggagagcatccacttttgcaagttcccttccacaactggcgagagagatgagcgtgttgagcaaagtgtaaagaggatggtgaccataattgatcttgcacgtaatattcgtgagcggcataacaaagctctcaaaacaccactcaaggaaatggtggttgtgcatccagacaatgacttccttgaagacatcactggcaaactaaaggagtatgtcatggaggaaatcaatgttaagaatgtcactccatgtaatgaccccttgatgtatgcttctctgcgagccgagcctaatttcagcgtgctaggaaaaagacttggaaaagacatgggaaaagtatcaaatgtggtgaagaagatgactcaggagcagatcttagcatttgaaaaaagtggagaggtttcattcttcggccattgcttgaagctagatgatatcaaggttgtccgacaattcaagcgtcctgaaaatgtgtcagagaaggagattgatgctgcaggagatggtgatgttttagtcattttggatctacgaaccgaccagtcattgtttgaagctggagtggctcgagaggttgtgaacaggatccagaaattacgaaagactgctcagcttgaacctgctgatccagttgatgtgtattacgaatctgtgggcaatgacaaaaacactctggaagagatattgaagtcacaggatcagtatattagagacgcacttggctcaccaatcgttccaaaggaaatggcaccaacagatgtcgtagtacttggcgaggaatcgcacaacgtacatgacatgtcatttgtcatatgcatcgcaaggtccaccccgattatttcaccagatcttctttctcatgcctcaggcaacagcaatcatgtcgaggcgttgagagtatatcttctgtcaaaatctctatccagattgaagaaccagttccaaagtggaaatggcgtgattacggtcgactgcatcgaaggttatccactaatcaggttacagctaggaaagcatgtttttctaagtgcaggggatttttatctggctagtcgatcctaatttttgtgtgcagcatcccaattttgactgattcacccatcattttgccgcaatcggcttaaacagcttggttccatttatgcattcagattcacttgttaaaggtgaaaaatcccaatttatgatataccatggtactctccgttctttttttatttgtcgtgttttagttcaaaaatgaactagccggtgacaaatatttttttttattttgtcgtgttttagttcaaaaataattagccggtgacaaatattcgagtaagctataggttcccatacccctagtgaattatgagtagataacatgtatgtttgtaatctcttgggtgtttggtttttgaggattgatgtggtccatcagattttgatgaatgaatgcatttcattt

SEQ ID NO: 83311 - DNA, 3908 bp, Zea Mays
gtagcacgtgagcatagcttcagctggccactaaaccctcgtcttccccttccaagcgaatcccattccctacctttcgccgccgcctacgcaccatcgctcgaaaccctagccccattccccgtctcgctcggaatcccagctacctccagcgccgccgcgactgcaggataggaggccatggacgacgtgtgcgaggggaaggacttctccttcccggagcaggaggagggggtgatcgagctgtgggcgaagctcgacgccttccacgagcagctccggcgcacggagggcggcgaggagttcgtattctacgacggtccccccttcgccacgggcctgccccattacggccacatactcgccggtaccatcaaggacgtggtcacccggcaccagtcgatgcgaggccgccacgtctcgcgacggttcggatgggactgtcacggactccccgtcgagttcgagatcgataaggcgctcggcatcaccaaccggcagcaggtgttcgacctcggcatcggcaagtacaacgagacgtgccgcagcatcgtcaccaagtacgtctccgagtgggaggccatggttacacgcacggggaggtggattgacttcaagaacgactacaaaaccatggacctcaacttcatggagagcgtctggtgggtgtttgcccagctatgggagaaggacctcgtctataggggtttcaaggtcatgccttacagcacaggatgcaaaactgcactgtcaaactttgaggcagcactggactataggactgttcctgacccagcggtgatggtatccttccctattgttggcgatgcggacaatgcagctcttgttgcatggactacaacaccctggacacttccaagtaacctagcgctgtgtgtcaatgccaatcttacatatgcaaaggttaaagacaaatcaaatggagcagtatatgttattgcagaatccaggcttgggcagttaccagttaaggccaaagcttcaggaaagaagcaggcaccttcaaagggaagcaatattgaagctgttcaggatggtttggacaaggaatcatatgagctgttgtcaaagattcctggggtatccttggttggcttaaaatatactcctctatttgactttttcattgaacttcaagggactgcctttagagtgattgcggataactatgtcacggatgatagtggaacgggtgttgttcattgtgctcctgcttttggtgaagacgaccatcgtgtttgccttgctgctgggatatttgagactgctggacttgttgttgctgttgatgacgacggatgttttattgaaaaaatatctgattttaaagggcgatatgtcaaagaagccgacaaggatatcatcaatgctgttaaggataaaggaagactcattagtaaagggagtattgagcactcttatccattttgttggcgatcgggcactcctcttatttatcgggctgttccaagctggtttgtcaaggttgagaagattaaagaccagttgctggaatgtaacaaggagacttactgggtgcctgactatgttaaggaaaaaagatttcacaactggcttgaaggtgctcgtgattgggctgttagcagaagtagattctggggtactccacttccactgtggataagtcaagatggtgaagaaattgttgttatggattctatagagaagcttgaaaaattatctggagtcaaggtcactgatcttcaccgacactatgttgatgatattacaattccctctaagagaggacctgagtttggggtgctcaaacgtgttgatgatgttctatactctgatggttctctcaacagcactgtttgggaagcctgcatttaagaatcttatatgcaatgggcttgtcttggctgaggatggtaagaaaatgagcaagagtaaaaagaactatcctccacccaaggatctcattgatgagtttggagcggatgctctgcgactatatttggtaaactccccagttgtacgtgcagagtctctacgattcaaacgtactggtgtctttgctgttgtgaaagatgtcttcctcccatggtataacgcatatagattttttgtccaaaatgcaaagagactggaagttgagggtcttgcctcattttctccgatggaacaagtggtacttctgaagtcatccaatgtgttggatcactggataaactctgcaactgaaagtctagttgtgccgtatttggtaaaatacattgactatcttactaacatatatgtgcgtttgaaccgcaaacggttcaaagggcgtactggagaagaagactgcagaatttctctttcaacactctaccatgttcttgtaacaacttgcgtggtgatggctccatttacaccattctttactgaagttctttatcaaaatttgcggaaggtgtcaagtaattctgaggagagcatccacttttgcaagttcccttccacaactggcgagagagatgagcgtgttgagcaaagtgtaaagaggatggtgaccataattgatcttgcacgtaatattcgtgagcggcataacaaagctctcaaaacaccactcaaggaaatggtggttgtgcatccagacaatgacttccttgaagacatcactggcaaactaaaggagtatgtcatggaggaaatcaatgttaagaatgtcactccatgtaatgaccccttgatgtatgcttctctgcgagccgagcctaatttcagcgtgctaggaaaaagacttggaaaagacatgggaaaagtatcaaatgtggtgaagaagatgactcaggagcagatcttagcatttgaaaaaagtggagaggtttcattcttcggccattgcttgaagctagatgatatcaaggttgtccgacaattcaagcgtcctgaaaatgtgtcagagaaggagattgatgctgcaggagatggtgatgttttagtcattttggatctacgaaccgaccagtcattgtttgaagctggagtggctcgagaggttgtgaacaggatccagaaattacgaaagactgctcagcttgaacctgctgatccagttgatgtgtattacgaatctgtgggcaatgacaaaaacactctggaagagatattgaagtcacaggatcagtatattagagacgcacttggctcaccaatcgttccaaaggaaatggcaccaacagatgtcgtagtacttggcgaggaatcgcacaacgtacatgacatgtcatttgtcatatgcatcgcaaggtccaccccgattatttcaccagatcttctttctcatgcctcaggcaacagcaatcatgtcgaggcgttgagagtatatcttctgtcaaaatctctatccagattgaagaaccagttccaaagtggaaatggcgtgattacggtcgactgcatcgaaggttatccactaatcaggttacagctaggaaagcatgtttttctaagtgcaggggatttttatctggctagtcgatcctaatttttgtgtgcagcatcccaattttgactgattcacccatcattttgccgcaatcggcttaaacagcttggttccatttatgcattcagattcacttgttaaaggtgaaaaatcccaatttatgatataccatggtactctccgttctttttttatttgtcgtgttttagttcaaaaatgaactagccggtgacaaatatttttttttattttgtcgtgttttagttcaaaaataattagccggtgacaaatattcgagtaagctataggttcccatacccctagtgaattatgagtagataacatgtatgtttgtaatctcttgggtgtttggtttttgaggattgatgtggtccatcagattttgatgaatgaatgcatttcattt

SEQ ID NO: 83312 - DNA, 3977 bp, Zea Mays
gtagcacgtgagcatagcttcagctggccactaaaccctcgtcttccccttccaagcgaatcccattccctacctttcgccgccgcctacgcaccatcgctcgaaaccctagccccattccccgtctcgctcggaatcccagctacctccagcgccgccgcgactgcaggataggaggccatggacgacgtgtgcgaggggaaggacttctccttcccggagcaggaggagggggtgatcgagctgtgggcgaagctcgacgccttccacgagcagctccggcgcacggagggcggcgaggagttcgtattctacgacggtccccccttcgccacgggcctgccccattacggccacatactcgccggtaccatcaaggacgtggtcacccggcaccagtcgatgcgaggccgccacgtctcgcgacggttcggatgggactgtcacggactccccgtcgagttcgagatcgataaggcgctcggcatcaccaaccggcagcaggtgttcgacctcggcatcggcaagtacaacgagacgtgccgcagcatcgtcaccaagtacgtctccgagtgggaggccatggttacacgcacggggaggtggattgacttcaagaacgactacaaaaccatggacctcaacttcatggagagcgtctggtgggtgtttgcccagctatgggagaaggacctcgtctataggggtttcaaggtcatgccttacagcacaggatgcaaaactgcactgtcaaactttgaggcagcactggactataggactgttcctgacccagcggtgatggtatccttccctattgttggcgatgcggacaatgcagctcttgttgcatggactacaacaccctggacacttccaagtaacctagcgctgtgtgtcaatgccaatcttacatatgcaaaggttaaagacaaatcaaatggagcagtatatgttattgcagaatccaggcttgggcagttaccagttaaggccaaagcttcaggaaagaagcaggcaccttcaaagggaagcaatattgaagctgttcaggatggtttggacaaggaatcatatgagctgttgtcaaagattcctggggtatccttggttggcttaaaatatactcctctatttgactttttcattgaacttcaagggactgcctttagagtgattgcggataactatgtcacggatgatagtggaacgggtgttgttcattgtgctcctgcttttggtgaagacgaccatcgtgtttgccttgctgctgggatatttgagactgctggacttgttgttgctgttgatgacgacggatgttttattgaaaaaatatctgattttaaagggcgatatgtcaaagaagccgacaaggatatcatcaatgctgttaaggataaaggaagactcattagtaaagggagtattgagcactcttatccattttgttggcgatcgggcactcctcttatttatcgggctgttccaagctggtttgtcaaggttgagaagattaaagaccagttgctggaatgtaacaaggagacttactgggtgcctgactatgttaaggaaaaaagatttcacaactggcttgaaggtgctcgtgattgggctgttagcagaagtagattctggggtactccacttccactgtggataagtcaagatggtgaagaaattgttgttatggattctatagagaagcttgaaaaattatctggagtcaaggtcactgatcttcaccgacactatgttgatgatattacaattccctctaagagaggacctgagtttggggtgctcaaacgtgttgatgatgttttcgactgctggttcgagagtgggtcaatgccatatgcctacattcactatccatttgagaatcgggaactatttgaaaagaactttcctggcaattttgtggcagagggtttagatcaaacccgtggatggttctatactctgatggttctctcaacagcactgtttgggaagcctgcatttaagaatcttatatgcaatgggcttgtcttggctgaggatggtaagaaaatgagcaagagtaaaaagaactatcctccacccaaggatctcattgatgagtttggagcggatgctctgcgactatatttggtaaactccccagttgtacgtgcagagtctctacgattcaaacgtactggtgtctttgctgttgtgaaagatgtcttcctcccatggtataacgcatatagattttttgtccaaaatgcaaagagactggaagttgagggtcttgcctcattttctccgatggaacaagtggtacttctgaagtcatccaatgtgttggatcactggataaactctgcaactgaaagtctagttagctttgttcaccaggagatggatgcatatcggctttacacggttgtgccgtatttggtaaaatacattgactatcttactaacatatatgtgcgtttgaaccgcaaacggttcaaagggcgtactggagaagaagactgcagaatttctctttcaacactctaccatgttcttgtaacaacttgcgtggtgatggctccatttacaccattctttactgaagttctttatcaaaatttgcggaaggtgtcaagtaattctgaggagagcatccacttttgcaagttcccttccacaactggcgagggaaatggtggttgtgcatccagacaatgacttccttgaagacatcactggcaaactaaaggagtatgtcatggaggaaatcaatgttaagaatgtcactccatgtaatgaccccttgatgtatgcttctctgcgagccgagcctaatttcagcgtgctaggaaaaagacttggaaaagacatgggaaaagtatcaaatgtggtgaagaagatgactcaggagcagatcttagcatttgaaaaaagtggagaggtttcattcttcggccattgcttgaagctagatgatatcaaggttgtccgacaattcaagcgtcctgaaaatgtgtcagagaaggagattgatgctgcaggagatggtgatgttttagtcattttggatctacgaaccgaccagtcattgtttgaagctggagtggctcgagaggttgtgaacaggatccagaaattacgaaagactgctcagcttgaacctgctgatccagttgatgtgtattacgaatctgtgggcaatgacaaaaacactctggaagagatattgaagtcacagtatattagagacgcacttggctcaccaatcgttccaaaggaaatggcaccaacagatgtcgtagtacttggcgaggaatcgcacaacgtacatgacatgtcatttgtcatatgcatcgcaaggtccaccccgattatttcaccagatcttctttctcatgcctcaggcaacagcaatcatgtcgaggcgttgagagtatatcttctgtcaaaatctctatccagattgaagaaccagttccaaagtggaaatggcgtgattacggtcgactgcatcgaaggttatccactaatcaggttacagctaggaaagcatgtttttctaagtgcaggggatttttatctggctagtcgatcctaatttttgtgtgcagcatcccaattttgactgattcacccatcattttgccgcaatcggcttaaacagcttggttccatttatgcattcagattcacttgttaaaggtgaaaaatcccaatttatgatataccatggtactctccgttctttttttatttgtcgtgttttagttcaaaaatgaactagccggtgacaaatatttttttttattttgtcgtgttttagttcaaaaataattagccggtgacaaatattcgagtaagctataggttcccatacccctagtgaattatgagtagataacatgtatgtttgtaatctcttgggtgtttggtttttgaggattgatgtggtccatcagattttgatgaatgaatgcatttcattt

SEQ ID NO: 83313 - DNA, 3899 bp, Zea Mays
gtagcacgtgagcatagcttcagctggccactaaaccctcgtcttccccttccaagcgaatcccattccctacctttcgccgccgcctacgcaccatcgctcgaaaccctagccccattccccgtctcgctcggaatcccagctacctccagcgccgccgcgactgcaggataggaggccatggacgacgtgtgcgaggggaaggacttctccttcccggagcaggaggagggggtgatcgagctgtgggcgaagctcgacgccttccacgagcagctccggcgcacggagggcggcgaggagttcgtattctacgacggtccccccttcgccacgggcctgccccattacggccacatactcgccggtaccatcaaggacgtggtcacccggcaccagtcgatgcgaggccgccacgtctcgcgacggttcggatgggactgtcacggactccccgtcgagttcgagatcgataaggcgctcggcatcaccaaccggcagcaggtgttcgacctcggcatcggcaagtacaacgagacgtgccgcagcatcgtcaccaagtacgtctccgagtgggaggccatggttacacgcacggggaggtggattgacttcaagaacgactacaaaaccatggacctcaacttcatggagagcgtctggtgggtgtttgcccagctatgggagaaggacctcgtctataggggtttcaaggtcatgccttacagcacaggatgcaaaactgcactgtcaaactttgaggcagcactggactataggactgttcctgacccagcggtgatggtatccttccctattgttggcgatgcggacaatgcagctcttgttgcatggactacaacaccctggacacttccaaaatccaggcttgggcagttaccagttaaggccaaagcttcaggaaagaagcaggcaccttcaaagggaagcaatattgaagctgttcaggatggtttggacaaggaatcatatgagctgttgtcaaagattcctggggtatccttggttggcttaaaatatactcctctatttgactttttcattgaacttcaagggactgcctttagagtgattgcggataactatgtcacggatgatagtggaacgggtgttgttcattgtgctcctgcttttggtgaagacgaccatcgtgtttgccttgctgctgggatatttgagactgctggacttgttgttgctgttgatgacgacggatgttttattgaaaaaatatctgattttaaagggcgatatgtcaaagaagccgacaaggatatcatcaatgctgttaaggataaaggaagactcattagtaaagggagtattgagcactcttatccattttgttggcgatcgggcactcctcttatttatcgggctgttccaagctggtttgtcaaggttgagaagattaaagaccagttgctggaatgtaacaaggagacttactgggtgcctgactatgttaaggaaaaaagatttcacaactggcttgaaggtgctcgtgattgggctgttagcagaagtagattctggggtactccacttccactgtggataagtcaagatggtgaagaaattgttgttatggattctatagagaagcttgaaaaattatctggagtcaaggtcactgatcttcaccgacactatgttgatgatattacaattccctctaagagaggacctgagtttggggtgctcaaacgtgttgatgatgttttcgactgctggttcgagagtgggtcaatgccatatgcctacattcactatccatttgagaatcgggaactatttgaaaagaactttcctggcaattttgtggcagagggtttagatcaaacccgtggatggttctatactctgatggttctctcaacagcactgtttgggaagcctgcatttaagaatcttatatgcaatgggcttgtcttggctgaggatggtaagaaaatgagcaagagtaaaaagaactatcctccacccaaggatctcattgatgagtttggagcggatgctctgcgactatatttggtaaactccccagttgtacgtgcagagtctctacgattcaaacgtactggtgtctttgctgttgtgaaagatgtcttcctcccatggtataacgcatatagattttttgtccaaaatgcaaagagactggaagttgagggtcttgcctcattttctccgatggaacaagtggtacttctgaagtcatccaatgtgttggatcactggataaactctgcaactgaaagtctagttagctttgttcaccaggagatggatgcatatcggctttacacggttgtgccgtatttggtaaaatacattgactatcttactaacatatatgtgcgtttgaaccgcaaacggttcaaagggcgtactggagaagaagactgcagaatttctctttcaacactctaccatgttcttgtaacaacttgcgtggtgatggctccatttacaccattctttactgaagttctttatcaaaatttgcggaaggtgtcaagtaattctgaggagagcatccacttttgcaagttcccttccacaactggcgagggaaatggtggttgtgcatccagacaatgacttccttgaagacatcactggcaaactaaaggagtatgtcatggaggaaatcaatgttaagaatgtcactccatgtaatgaccccttgatgtatgcttctctgcgagccgagcctaatttcagcgtgctaggaaaaagacttggaaaagacatgggaaaagtatcaaatgtggtgaagaagatgactcaggagcagatcttagcatttgaaaaaagtggagaggtttcattcttcggccattgcttgaagctagatgatatcaaggttgtccgacaattcaagcgtcctgaaaatgtgtcagagaaggagattgatgctgcaggagatggtgatgttttagtcattttggatctacgaaccgaccagtcattgtttgaagctggagtggctcgagaggttgtgaacaggatccagaaattacgaaagactgctcagcttgaacctgctgatccagttgatgtgtattacgaatctgtgggcaatgacaaaaacactctggaagagatattgaagtcacaggatcagtatattagagacgcacttggctcaccaatcgttccaaaggaaatggcaccaacagatgtcgtagtacttggcgaggaatcgcacaacgtacatgacatgtcatttgtcatatgcatcgcaaggtccaccccgattatttcaccagatcttctttctcatgcctcaggcaacagcaatcatgtcgaggcgttgagagtatatcttctgtcaaaatctctatccagattgaagaaccagttccaaagtggaaatggcgtgattacggtcgactgcatcgaaggttatccactaatcaggttacagctaggaaagcatgtttttctaagtgcaggggatttttatctggctagtcgatcctaatttttgtgtgcagcatcccaattttgactgattcacccatcattttgccgcaatcggcttaaacagcttggttccatttatgcattcagattcacttgttaaaggtgaaaaatcccaatttatgatataccatggtactctccgttctttttttatttgtcgtgttttagttcaaaaatgaactagccggtgacaaatatttttttttattttgtcgtgttttagttcaaaaataattagccggtgacaaatattcgagtaagctataggttcccatacccctagtgaattatgagtagataacatgtatgtttgtaatctcttgggtgtttggtttttgaggattgatgtggtccatcagattttgatgaatgaatgcatttcattt

SEQ ID NO: 83314 - DNA, 111 bp, Zea Mays
atagattgcgaactgaacttaaatcaaatacttcagtattggtctctagagaggaagctctgccaaccattactaataactgagaaggtcctggtgcttcaatttggttat

SEQ ID NO: 83315 - DNA, 2211 bp, Zea Mays
atggctaggggattgaagaagcacttgaagaggctcaatgtgcccaagcattggatgctcgacaagcttggcggagcttttagatcatttccacccttgctacagattgtcaactcggttgtgatgaatcttgttgttgaagatggttgccacatccaaggttctgttgtatgtaataatgttcagctgcaagaacgagcggttattgagagattgccagatgtggtatttgaagaagggaaaccttgggactgggacagttcaaagtgcagcatagatcaacaggagactgacacttttattgttcactatgatctaactgaccaaaacatggtaacaactggggatgatagtaacccaacactgtcagatcaaagtataggaggagaaaattcagttggccaaagcagtggaacaggacaagctaatgaatctgcttctccatacactccaatatcaagtatgatgcaaaatcaagggatgggaactccatctgttcaacaatcagagagctcagggtcaggaccatacaggttcagaacattgactgatttgtttgatgcaactgaacaagtgcatgactttgagtacagtggagtgtgcatgctggcagctgatgaacctgcatgtgtggaacaggctctttcacaggactgcttgaaaagagctatggaggttgaactgaagtcaattcaagaaaatcagacctgggagattgctgatctgccaagggatcacaaggctataggactcaaatgggttttcaaagtaaagagggatccaacattagtgcaaacagttgtattttagtttagatttagagtacacttatgtatgagttgtttgacaatgtttatttatgagatattaaaaggtacttatttatattatattaattataatgttgttcaatatatgtgtatgtatatttttctttcaaattattataacgtgatatctgaaaaaatgattataaattgaagaatgtactgccgtgtaagtcatttcgtttaaatcttaataagacggtcaccaaaatgtctaatatcagtcttctaaataagacggtttctaaaacgtctaatattagtcacctaaataagatagttttcctattgtaatcgtctattattgtaggatattcgagacagtttgataaatacgttatgacttataatgtttgtattctctgcggttctttaaaagaagtgtcttaaacaaataaataatttaagacagtttatcggacaaaatgacttaaacaaataccttttacagacggttataaaataaaaattgtcttatataatatcttttaagacggtttataaccatcttaaatgtgagacatcttttacgactccatcaaatttggacacttcataagcgtcttaagaactgaaaattaaccgtctcatataacatgttttgtagtagtgttttgatacttcattagaagtatctataaagggatggatttcaaggtaggcaatgcatcaaagggtttctaagcaactcctataaacctaatgcacatttcgctagacttaaattgtgtaaaaattatttaaaaacacaaggaaggggttgcatgcaccggggcttgcctgggataaacaccacgttagtgtttgttagacgacgtccgcttgacgaccatcttttgtcttcgcatttgttccgattatccatcttccggttggcccatcagcatcactgttcgaagtagatcgtgttttacgacaccttggggtcgacttggctttggttctccacatcccgtagtcaacaaatatacctaaatgatttgcctaatgcacatgaatgcatataaacagaaatagcacaaatctaaatagtgctacacgatagcgaattaaacacctaataacaaagtgtcataccatttcatacgaaagcactagttaccgacatatgactacgcgcaataatcacaaaataataaactatatatactaattatatcacgtgcatttctcctgttcaatcacatctaattttattatcaagcaagaataaattataaacacacactatcaattttagtaaaatatatttcagaggtctagtaaaaccaggactcgctattattaaataccaacgacttaaaatagttatggaaacaatctaattaactctttaaactgtttatcttaattaatttgaattaccgattcatctagatcaaac

SEQ ID NO: 83316 - DNA, 3903 bp, Zea Mays
ccaaccaaactgacctacccggaaaacgagccccccgactcccgcctgccgccgccgctctgccagccaaacccaaactaaaaccctcgccgacggcgcgcctgttgttaaaccctagaaaaaccagcggcgacaggagtggccgcaaccccgccgccggagggggctccacgaccagatagaagagggagagaggatggggatcttcgagccgttccgtgcgatcggctacatcacggcgagcggcgtgcccttctccgtgcagcgcctcagcaccgagaccttcgtcaccgtcagcgtcggcaaggctttccaagtctataactgtgctaagctgaatttggttcttgctggaccccaattgcccaagaagatccgtgctattgcatcctacaaggattatacatttgctgcttatggaagtgatattgcagttttcaaaaggactgaccaggtggctacttggagtagacatgaagaaaaggtcaacatgctatacctatttggagaatatgttctaagcgcagatgctaaaggtaatgtattcatgtgggccttcagaggagcagaaccaaacactgaaccagttggaagcatatcattgggagacaagttcaccccaacatgtatcatgcatcctgatacttatctgaataaggtaattgttggtagcgaagaaggctccttgcagctgtggaatatcagcacaaaaaagaaactgtatgatttcaatggttggaactcacctgttcggtgttgtgtctcttctcctgccctggatgtagttgctgtcggatgttctgatgggtcagttcatgttcataatgtaagatatgatgaagaattgatgtctttcaaccaccagattcgtggtgctgtgactgcactgtcatttcgaacagatgggcaaccccttctggcttctggaggttcttcaggcgttatcagcatatggaatcttgagaagagacggctgcattctgtgattagggaggcccatgatggttcaatagtttcacttcacttttttgcgaatgaacctattctgatgagttcagctgctgacaattcagtcaaaggacaggggcaacaagaaccttctttctggcaactagcatctggcttgatagcctgctaataagtgcagctaacaaaacatccgggaacaaacttacaattcctttaacactgttacctgttatttgtctcgtttcactttgtgggtcctaatctaatatgctctaccagatgtggatatttgatagtaatgatggaggtgctcgtctgttacgatttcgaagtggtcacagtgcaccacctaggtgcataagattctatggcaatggaaaatgcatattatctgctggccaagatcgtgcatttcgccttttctcagttatccaggatcaacaaagtagagagctttctcagaggcatgttgcaaaaagagcaaaaaagctaagagtaaaggaggaagagatcaagctaaaaccagttgttacatttgactgtgctgagatacgtgcacgtgactggtgtaatgttgtcacatgccacatggatactccacaggcatatgtatggcgtcttcagaactttgttattggtgaacatgttttgacaccatcatcaagcactgtgacaccaattaaggcttgtgtgataagtgcatgtggtaattttactatcttgggcactgaaggtggttggattgaaaaatttaaccttcaatcagggtttagtcgtggtagttacattgacacctcgttggcaatgcaatgtgcacatgatggtgaagttgttggattagcttgcgatgccagaaatggctttttgattagtgctggataccaaggtgatattaaggcatgggattttaaaacttgcaagctgaaatctagattggatgttggtaaatctgttactaaaatcgcatttcaccggccaaatggtcttcttgctacggtagcaggtgatatggtactcatattgtttgatacggtgtccatgaaaatggttcgtagatttgaaggacatacagaccgtatcactgatttgtgcttcagtgaggatggaaaatggctcatctcgtctagcatggatgggactcttaggatttgggacatcagtttagcaaggcagatagatgcaatgcatgttgatgtatctataacatctatctctatgtctcctaatatggatgtgttggcaaccactcatgttgatcaaaatggtgtctacctctggtagagttctgttgcatcaccctgcgctcagcctattattaccacccttacatatctcaatttattttgtagctacatatatagttcagaaaaatgaaattatgagattggccttccagctggtgcactttccacaaatattttattcatcccacttatagccaacagtattatcagtacactctgtttcaacatatgcaccacgagttgtgttcttttatacgctgttatgggtcatgatatgcatactttttccagtttttttttcattgtggtctcatacatgtgctataaattggacagggttaatcaatctttattctcggtctcaacaaatactgaaaattatgccagtggtaaacatgtacggaatgtgtgtttgccagctgtttcatcaacagagagatctgaggaagaacaagttcagaatttaggagagtcatataagtccagtattaaaccttttgtcataacggatcatcaaataccgaatctagttaccctctccttacttccaaagagtcaatggcaaagtttgactaatcttgacattataaaggttcgcaataaaccaattgagccacctaagaaacctgagaaggcaccattcttcttgccttcagttccatccctttctggggagatattgtttgagcctcctgccagctcaaaagatacagacatcagtaccacgaagaatacaaatcataagatgtctgaactctcctctcatttcagtcagcagttgcaattttgtggtgaaacaaagaactattcggcttttactgactacctaaaaggcctgtcaccgtcgtctttagatatggaactgcgaatgctacaaatattagatgatgaagagtctgaagatctggagcaaagacctgagcttcagtccatttcttcgctgttggattatttcattcatgaactttccttcaggaataactttgagtttgtccaggctgttctgaaattgtttttgaagatacatggtgaaacaatacgacggcactcaatgcttcagagtaaggtgaagaagcttcttgaggtccagagcttagtttggcagaagattgataagatctttcagggtgcacgatgcatggttacattcctcagtaactcacaattttagtagcaggccggagttccacataccagggcatacatggtgcctaatgcctgcacgagtgtggccattggattgagcaagtggatatagttgattttttttggagacggcattaaaatggatctggttctcaaacatggcatgactaggcattggagcattgttgagcagcagccatggctatattactctaggcttacaattttgctgtagctgttagtctgttacacagcaaggagtccacttggtaaacatttgtagctaccaaaacagccccatctcatggtgtaacaattttgtagttttacatttgtgtcatctttttgtaacaaactgatgtatcaaacaccgtattgcaagaaatactaaggcttgccattgctatttgaacaaaaaaccatatctgtatattcaacaagcttagcttctgtgttggtcttatattgtggaggataccaggtgaaaatatccaaatgtacctaagtttgcaattatataaactctgaaaacaatcagttatca

SEQ ID NO: 83317 - DNA, 3473 bp, Zea Mays
ccaaccaaactgacctacccggaaaacgagccccccgactcccgcctgccgccgccgctctgccagccaaacccaaactaaaaccctcgccgacggcgcgcctgttgttaaaccctagaaaaaccagcggcgacaggagtggccgcaaccccgccgccggagggggctccacgaccagatagaagagggagagaggatggggatcttcgagccgttccgtgcgatcggctacatcacggcgagcggcgtgcccttctccgtgcagcgcctcagcaccgagaccttcgtcaccgtcagcgtcggcaaggctttccaagtctataactgtgctaagctgaatttggttcttgctggaccccaattgcccaagaagatccgtgctattgcatcctacaaggattatacatttgctgcttatggaagtgatattgcagttttcaaaaggactgaccaggtggctacttggagtagacatgaagaaaaggtcaacatgctatacctatttggagaatatgttctaagcgcagatgctaaaggtaatgtattcatgtgggccttcagaggagcagaaccaaacactgaaccagttggaagcatatcattgggagacaagttcaccccaacatgtatcatgcatcctgatacttatctgaataagttgctgtcggatgttctgatgggtcagttcatgttcataatgtaagatatgatgaagaattgatgtctttcaaccaccagattcgtggtgctgtgactgcactgtcatttcgaacagatgggcaaccccttctggcttctggaggttcttcaggcgttatcagcatatggaatcttgagaagagacggctgcattctgtgattagggaggcccatgatggttcaatagtttcacttcacttttttgcgaatgaacctattctgatgagttcagctgctgacaattcagtcaaaggacaggggcaacaagaaccttctttctggcaactagcatctggcttgatagcctgctaataagtgcagctaacaaaacatccgggaacaaacttacaattcctttaacactgttacctgttatttgtctcgtttcactttgtgggtcctaatctaatatgctctaccagatgtggatatttgatagtaatgatggaggtgctcgtctgttacgatttcgaagtggtcacagtgcaccacctaggtgcataagattctatggcaatggaaaatgcatattatctgctggccaagatcgtgcatttcgccttttctcagttatccaggatcaacaaagtagagagctttctcagaggcatgttgcaaaaagagcaaaaaagctaagagtaaaggaggaagagatcaagctaaaaccagttgttacatttgactgtgctgagatacgtgcacgtgactggtgtaatgttgtcacatgccacatggatactccacaggcatatgtatggcgtcttcagaactttgttattggtgaacatgttttgacaccatcatcaagcactgtgacaccaattaaggcttgtgtgataagtgcatgtggtaattttactatcttgggcactgaaggtggttggattgaaaaatttaaccttcaatcagggtttagtcgtggtagttacattgacacctcgttggcaatgcaatgtgcacatgatggtgaagttgttggattagcttgcgatgccagaaatggctttttgattagtgctggataccaaggtgatattaaggcatgggattttaaaacttgcaagctgaaatctagattggatgttggtaaatctgttactaaaatcgcatttcaccggccaaatggtcttcttgctacggtagcaggtgatatggtactcatattgtttgatacggtgtccatgaaaatggttcgtagatttgaaggacatacagaccgtatcactgatttgtgcttcagtgaggatggaaaatggctcatctcgtctagcatggatgggactcttaggatttgggacatcagtttagcaaggcagatagatgcaatgcatgttgatgtatctataacatctatctctatgtctcctaatatggatgtgttggcaaccactcatgttgatcaaaatggtgtctacctctgggttaatcaatctttattctcggtctcaacaaatactgaaaattatgccagtggtaaacatgtacggaatgtgtgtttgccagctgtttcatcaacagagagatctgaggaagaacaagttcagaatttaggagagtcatataagtccagtattaaaccttttgtcataacggatcatcaaataccgaatctagttaccctctccttacttccaaagagtcaatggcaaagtttgactaatcttgacattataaaggttcgcaataaaccaattgagccacctaagaaacctgagaaggcaccattcttcttgccttcagttccatccctttctggggagatattgtttgagcctcctgccagctcaaaagatacagacatcagtaccacgaagaatacaaatcataagatgtctgaactctcctctcatttcagtcagcagttgcaattttgtggtgaaacaaagaactattcggcttttactgactacctaaaaggcctgtcaccgtcgtctttagatatggaactgcgaatgctacaaatattagatgatgaagagtctgaagatctggagcaaagacctgagcttcagtccatttcttcgctgttggattatttcattcatgaactttccttcaggaataactttgagtttgtccaggctgttctgaaattgtttttgaagatacatggtgaaacaatacgacggcactcaatgcttcagagtaaggtgaagaagcttcttgaggtccagagcttagtttggcagaagattgataagatctttcagggtgcacgatgcatggttacattcctcagtaactcacaattttagtagcaggccggagttccacataccagggcatacatggtgcctaatgcctgcacgagtgtggccattggattgagcaagtggatatagttgattttttttggagacggcattaaaatggatctggttctcaaacatggcatgactaggcattggagcattgttgagcagcagccatggctatattactctaggcttacaattttgctgtagctgttagtctgttacacagcaaggagtccacttggtaaacatttgtagctaccaaaacagccccatctcatggtgtaacaattttgtagttttacatttgtgtcatctttttgtaacaaactgatgtatcaaacaccgtattgcaagaaatactaaggcttgccattgctatttgaacaaaaaaccatatctgtatattcaacaagcttagcttctgtgttggtcttatattgtggaggataccaggtgaaaatatccaaatgtacctaagtttgcaattatataaactctgaaaacaatcagttatca

SEQ ID NO: 83318 - DNA, 3196 bp, Zea Mays
ccaaccaaactgacctacccggaaaacgagccccccgactcccgcctgccgccgccgctctgccagccaaacccaaactaaaaccctcgccgacggcgcgcctgttgttaaaccctagaaaaaccagcggcgacaggagtggccgcaaccccgccgccggagggggctccacgaccagatagaagagggagagaggatggggatcttcgagccgttccgtgcgatcggctacatcacggcgagcggcgtgcccttctccgtgcagcgcctcagcaccgagaccttcgtcaccgtcagcgtcggcaaggctttccaagtctataactgtgctaagctgaatttggttcttgctggaccccaattgcccaagaagatccgtgctattgcatcctacaaggattatacatttgctgcttatggaagtgatattgcagttttcaaaaggactgaccagaggagcagaaccaaacactgaaccagttggaagcatatcattgggagacaagttcaccccaacatgtatcatgcatcctgatacttatctgaataagttgctgtcggatgttctgatgggtcagttcatgttcataatgtaagatatgatgaagaattgatgtctttcaaccaccagattcgtggtgctgtgactgcactgtcatttcgaacagatgggcaaccccttctggcttctggaggttcttcaggcgttatcagcatatggaatcttgagaagagacggctgcattctgtgattagggaggcccatgatggttcaatagtttcacttcacttttttgcgaatgaacctattctgatgagttcagctgctgacaattcagtcaaaatgtggatatttgatagtaatgatggaggtgctcgtctgttacgatttcgaagtggtcacagtgcaccacctaggtgcataagattctatggcaatggaaaatgcatattatctgctggccaagatcgtgcatttcgccttttctcagttatccaggatcaacaaagtagagagctttctcagaggcatgttgcaaaaagagcaaaaaagctaagagtaaaggaggaagagatcaagctaaaaccagttgttacatttgactgtgctgagatacgtgcacgtgactggtgtaatgttgtcacatgccacatggatactccacaggcatatgtatggcgtcttcagaactttgttattggtgaacatgttttgacaccatcatcaagcactgtgacaccaattaaggcttgtgtgataagtgcatgtggtaattttactatcttgggcactgaaggtggttggattgaaaaatttaaccttcaatcagggtttagtcgtggtagttacattgacacctcgttggcaatgcaatgtgcacatgatggtgaagttgttggattagcttgcgatgccagaaatggctttttgattagtgctggataccaaggtgatattaaggcatgggattttaaaacttgcaagctgaaatctagattggatgttggtaaatctgttactaaaatcgcatttcaccggccaaatggtcttcttgctacggtagcaggtgatatggtactcatattgtttgatacggtgtccatgaaaatggttcgtagatttgaaggacatacagaccgtatcactgatttgtgcttcagtgaggatggaaaatggctcatctcgtctagcatggatgggactcttaggatttgggacatcagtttagcaaggcagatagatgcaatgcatgttgatgtatctataacatctatctctatgtctcctaatatggatgtgttggcaaccactcatgttgatcaaaatggtgtctacctctgggttaatcaatctttattctcggtctcaacaaatactgaaaattatgccagtggtaaacatgtacggaatgtgtgtttgccagctgtttcatcaacagagagatctgaggaagaacaagttcagaatttaggagagtcatataagtccagtattaaaccttttgtcataacggatcatcaaataccgaatctagttaccctctccttacttccaaagagtcaatggcaaagtttgactaatcttgacattataaaggttcgcaataaaccaattgagccacctaagaaacctgagaaggcaccattcttcttgccttcagttccatccctttctggggagatattgtttgagcctcctgccagctcaaaagatacagacatcagtaccacgaagaatacaaatcataagatgtctgaactctcctctcatttcagtcagcagttgcaattttgtggtgaaacaaagaactattcggcttttactgactacctaaaaggcctgtcaccgtcgtctttagatatggaactgcgaatgctacaaatattagatgatgaagagtctgaagatctggagcaaagacctgagcttcagtccatttcttcgctgttggattatttcattcatgaactttccttcaggaataactttgagtttgtccaggctgttctgaaattgtttttgaagatacatggtgaaacaatacgacggcactcaatgcttcagagtaaggtgaagaagcttcttgaggtccagagcttagtttggcagaagattgataagatctttcagggtgcacgatgcatggttacattcctcagtaactcacaattttagtagcaggccggagttccacataccagggcatacatggtgcctaatgcctgcacgagtgtggccattggattgagcaagtggatatagttgattttttttggagacggcattaaaatggatctggttctcaaacatggcatgactaggcattggagcattgttgagcagcagccatggctatattactctaggcttacaattttgctgtagctgttagtctgttacacagcaaggagtccacttggtaaacatttgtagctaccaaaacagccccatctcatggtgtaacaattttgtagttttacatttgtgtcatctttttgtaacaaactgatgtatcaaacaccgtattgcaagaaatactaaggcttgccattgctatttgaacaaaaaaccatatctgtatattcaacaagcttagcttctgtgttggtcttatattgtggaggataccaggtgaaaatatccaaatgtacctaagtttgcaattatataaactctgaaaacaatcagttatca

SEQ ID NO: 83319 - DNA, 3473 bp, Zea Mays
ccaaccaaactgacctacccggaaaacgagccccccgactcccgcctgccgccgccgctctgccagccaaacccaaactaaaaccctcgccgacggcgcgcctgttgttaaaccctagaaaaaccagcggcgacaggagtggccgcaaccccgccgccggagggggctccacgaccagatagaagagggagagaggatggggatcttcgagccgttccgtgcgatcggctacatcacggcgagcggcgtgcccttctccgtgcagcgcctcagcaccgagaccttcgtcaccgtcagcgtcggcaaggctttccaagtctataactgtgctaagctgaatttggttcttgctggaccccaattgcccaagaagatccgtgctattgcatcctacaaggattatacatttgctgcttatggaagtgatattgcagttttcaaaaggactgaccaggtggctacttggagtagacatgaagaaaaggtcaacatgctatacctatttggagaatatgttctaagcgcagatgctaaaggtaatgtattcatgtgggccttcagaggagcagaaccaaacactgaaccagttggaagcatatcattgggagacaagttcaccccaacatgtatcatgcatcctgatacttatctgaataagttgctgtcggatgttctgatgggtcagttcatgttcataatgtaagatatgatgaagaattgatgtctttcaaccaccagattcgtggtgctgtgactgcactgtcatttcgaacagatgggcaaccccttctggcttctggaggttcttcaggcgttatcagcatatggaatcttgagaagagacggctgcattctgtgattagggaggcccatgatggttcaatagtttcacttcacttttttgcgaatgaacctattctgatgagttcagctgctgacaattcagtcaaaatgtggatatttgatagtaatgatggaggtgctcgtctgttacgatttcgaagtggtcacagtgcaccacctaggtgcataagattctatggcaatggaaaatgcatattatctgctggccaagatcgtgcatttcgccttttctcagttatccaggatcaacaaagtagagagctttctcagaggcatgttgcaaaaagagcaaaaaagctaagagtaaaggaggaagagatcaagctaaaaccagttgttacatttgactgtgaagattgctaaatgctgcccgagaaattgtttcatgtgcttgttatgcaacaaacttactaaatgtggtgattatctacaataacttccacagtcaatggcacagcaccacactgctatcacctaatagattaaattgtgcctgagatgttagttatatatctttgacctctgagatacgtgcacgtgactggtgtaatgttgtcacatgccacatggatactccacaggcatatgtatggcgtcttcagaactttgttattggtgaacatgttttgacaccatcatcaagcactgtgacaccaattaaggcttgtgtgataagtgcatgtggtaattttactatcttgggcactgaaggtggttggattgaaaaatttaaccttcaatcagggtttagtcgtggtagttacattgacacctcgttggcaatgcaatgtgcacatgatggtgaagttgttggattagcttgcgatgccagaaatggctttttgattagtgctggataccaaggtgatattaaggcatgggattttaaaacttgcaagctgaaatctagattggatgttggtaaatctgttactaaaatcgcatttcaccggccaaatggtcttcttgctacggtagcaggtgatatggtactcatattgtttgatacggtgtccatgaaaatggttcgtagatttgaaggacatacagaccgtatcactgatttgtgcttcagtgaggatggaaaatggctcatctcgtctagcatggatgggactcttaggatttgggacatcagtttagcaaggcagatagatgcaatgcatgttgatgtatctataacatctatctctatgtctcctaatatggatgtgttggcaaccactcatgttgatcaaaatggtgtctacctctgggttaatcaatctttattctcggtctcaacaaatactgaaaattatgccagtggtaaacatgtacggaatgtgtgtttgccagctgtttcatcaacagagagatctgaggaagaacaagttcagaatttaggagagtcatataagtccagtattaaaccttttgtcataacggatcatcaaataccgaatctagttaccctctccttacttccaaagagtcaatggcaaagtttgactaatcttgacattataaaggttcgcaataaaccaattgagccacctaagaaacctgagaaggcaccattcttcttgccttcagttccatccctttctggggagatattgtttgagcctcctgccagctcaaaagatacagacatcagtaccacgaagaatacaaatcataagatgtctgaactctcctctcatttcagtcagcagttgcaattttgtggtgaaacaaagaactattcggcttttactgactacctaaaaggcctgtcaccgtcgtctttagatatggaactgcgaatgctacaaatattagatgatgaagagtctgaagatctggagcaaagacctgagcttcagtccatttcttcgctgttggattatttcattcatgaactttccttcaggaataactttgagtttgtccaggctgttctgaaattgtttttgaagatacatggtgaaacaatacgacggcactcaatgcttcagagtaaggtgaagaagcttcttgaggtccagagcttagtttggcagaagattgataagatctttcagggtgcacgatgcatggttacattcctcagtaactcacaattttagtagcaggccggagttccacataccagggcatacatggtgcctaatgcctgcacgagtgtggccattggattgagcaagtggatatagttgattttttttggagacggcattaaaatggatctggttctcaaacatggcatgactaggcattggagcattgttgagcagcagccatggctatattactctaggcttacaattttgctgtagctgttagtctgttacacagcaaggagtccacttggtaaacatttgtagctaccaaaacagccccatctcatggtgtaacaattttgtagttttacatttgtgtcatctttttgtaacaaactgatgtatcaaacaccgtattgcaagaaatactaaggcttgccattgctatttgaacaaaaaaccatatctgtatattcaacaagcttagcttctgtgttggtcttatattgtggaggataccaggtgaaaatatccaaatgtacctaagtttgcaattatataaactctgaaaacaatcagttatca

SEQ ID NO: 83320 - DNA, 3469 bp, Zea Mays
ccaaccaaactgacctacccggaaaacgagccccccgactcccgcctgccgccgccgctctgccagccaaacccaaactaaaaccctcgccgacggcgcgcctgttgttaaaccctagaaaaaccagcggcgacaggagtggccgcaaccccgccgccggagggggctccacgaccagatagaagagggagagaggatggggatcttcgagccgttccgtgcgatcggctacatcacggcgagcggcgtgcccttctccgtgcagcgcctcagcaccgagaccttcgtcaccgtcagcgtcggcaaggctttccaagtctataactgtgctaagctgaatttggttcttgctggaccccaattgcccaagaagatccgtgctattgcatcctacaaggattatacatttgctgcttatggaagtgatattgcagttttcaaaaggactgaccaggtggctacttggagtagacatgaagaaaaggtcaacatgctatacctatttggagaatatgttctaagcgcagatgctaaaggtaatgtattcatgtgggccttcagaggagcagaaccaaacactgaaccagttggaagcatatcattgggagacaagttcaccccaacatgtatcatgcatcctgatacttatctgaataaggtaattgttggtagcgaagaaggctccttgcagctgtggaatatcagcacaaaaaagaaactgtatgatttcaatggttggaactcacctgttcggtgttgtgtctcttctcctgccctggatgtagttgctgtcggatgttctgatgggtcagttcatgttcataatgtaagatatgatgaagaattgatgtctttcaaccaccagattcgtggtgctgtgactgcactgtcatttcgaacaggctagctaaagtggtctctcaaatttacctttcttccagatgggcaaccccttctggcttctggaggttcttcaggcgttatcagcatatggaatcttgagaagagacggctgcattctgtgattagggaggcccatgatggttcaatagtttcacttcacttttttgcgaatgaacctattctgatgagttcagctgctgacaattcagtcaaaatgtggatatttgatagtaatgatggaggtgctcgtctgttacgatttcgaagtggtcacagtgcaccacctaggtgcataagattctatggcaatggaaaatgcatattatctgctggccaagatcgtgcatttcgccttttctcagttatccaggatcaacaaagtagagagctttctcagaggcatgttgcaaaaagagcaaaaaagctaagagtaaaggaggaagagatcaagctaaaaccagttgttacatttgactgtgctgagatacgtgcacgtgactggtgtaatgttgtcacatgccacatggatactccacaggcatatgtatggcgtcttcagaactttgttattggtgaacatgttttgacaccatcatcaagcactgtgacaccaattaaggcttgtgtgataagtgcatgtggtaattttactatcttgggcactgaaggtggttggattgaaaaatttaaccttcaatcagggtttagtcgtggtagttacattgacacctcgttggcaatgcaatgtgcacatgatggtgaagttgttggattagcttgcgatgccagaaatggctttttgattagtgctggataccaaggtgatattaaggcatgggattttaaaacttgcaagctgaaatctagattggatgttggtaaatctgttactaaaatcgcatttcaccggccaaatggtcttcttgctacggtagcaggtgatatggtactcatattgtttgatacggtgtccatgaaaatggttcgtagatttgaaggacatacagaccgtatcactgatttgtgcttcagtgaggatggaaaatggctcatctcgtctagcatggatgggactcttaggatttgggacatcagtttagcaaggcagatagatgcaatgcatgttgatgtatctataacatctatctctatgtctcctaatatggatgtgttggcaaccactcatgttgatcaaaatggtgtctacctctgggttaatcaatctttattctcggtctcaacaaatactgaaaattatgccagtggtaaacatgtacggaatgtgtgtttgccagctgtttcatcaacagagagatctgaggaagaacaagttcagaatttaggagagtcatataagtccagtattaaaccttttgtcataacggatcatcaaataccgaatctagttaccctctccttacttccaaagagtcaatggcaaagtttgactaatcttgacattataaaggttcgcaataaaccaattgagccacctaagaaacctgagaaggcaccattcttcttgccttcagttccatccctttctggggagatattgtttgagcctcctgccagctcaaaagatacagacatcagtaccacgaagaatacaaatcataagatgtctgaactctcctctcatttcagtcagcagttgcaattttgtggtgaaacaaagaactattcggcttttactgactacctaaaaggcctgtcaccgtcgtctttagatatggaactgcgaatgctacaaatattagatgatgaagagtctgaagatctggagcaaagacctgagcttcagtccatttcttcgctgttggattatttcattcatgaactttccttcaggaataactttgagtttgtccaggctgttctgaaattgtttttgaagatacatggtgaaacaatacgacggcactcaatgcttcagagtaaggtgaagaagcttcttgaggtccagagcttagtttggcagaagattgataagatctttcagggtgcacgatgcatggttacattcctcagtaactcacaattttagtagcaggccggagttccacataccagggcatacatggtgcctaatgcctgcacgagtgtggccattggattgagcaagtggatatagttgattttttttggagacggcattaaaatggatctggttctcaaacatggcatgactaggcattggagcattgttgagcagcagccatggctatattactctaggcttacaattttgctgtagctgttagtctgttacacagcaaggagtccacttggtaaacatttgtagctaccaaaacagccccatctcatggtgtaacaattttgtagttttacatttgtgtcatctttttgtaacaaactgatgtatcaaacaccgtattgcaagaaatactaaggcttgccattgctatttgaacaaaaaaccatatctgtatattcaacaagcttagcttctgtgttggtcttatattgtggaggataccaggtgaaaatatccaaatgtacctaagtttgcaattatataaactctgaaaacaatcagttatca

SEQ ID NO: 83321 - DNA, 3740 bp, Zea Mays
cccaaccccaaccaaactgacctacccggaaaacgagccccccgactcccgcctgccgccgccgctctgccagccaaacccaaactaaaaccctcgccgacggcgcgcctgttgttaaaccctagaaaaaccagcggcgacaggagtggccgcaaccccgccgccggagggggctccacgaccagatagaagagggagagaggatggggatcttcgagccgttccgtgcgatcggctacatcacggcgagcggcgtgcccttctccgtgcagcgcctcagcaccgagaccttcgtcaccgtcagcgtcggcaaggctttccaagtctataactgtgctaagctgaatttggttcttgctggaccccaattgcccaagaagatccgtgctattgcatcctacaaggattatacatttgctgcttatggaagtgatattgcagttttcaaaaggactgaccaggtggctacttggagtagacatgaagaaaaggtcaacatgctatacctatttggagaatatgttctaagcgcagatgctaaaggtaatgtattcatgtgggccttcagaggagcagaaccaaacactgaaccagttggaagcatatcattgggagacaagttcaccccaacatgtatcatgcatcctgatacttatctgaataaggtaattgttggtagcgaagaaggctccttgcagctgtggaatatcagcacaaaaaagaaactgtatgatttcaatggttggaactcacctgttcggtgttgtgtctcttctcctgccctggatgtagttgctgtcggatgttctgatgggtcagttcatgttcataatgtaagatatgatgaagaattgatgtctttcaaccaccagattcgtggtgctgtgactgcactgtcatttcgaacagatgggcaaccccttctggcttctggaggttcttcaggcgttatcagcatatggaatcttgagaagagacggctgcattctgtgattagggaggcccatgatggttcaatagtttcacttcacttttttgcgaatgaacctattctgatgagttcagctgctgacaattcagtcaaaatgtggatatttgatagtaatgatggaggtgctcgtctgttacgatttcgaagtggtcacagtgcaccacctaggtgcataagattctatggcaatggaaaatgcatattatctgctggccaagatcgtgcatttcgccttttctcagttatccaggatcaacaaagtagagagctttctcagaggcatgttgcaaaaagagcaaaaaagctaagagtaaaggaggaagagatcaagctaaaaccagttgttacatttgactgtgctgagatacgtgcacgtgactggtgtaatgttgtcacatgccacatggatactccacaggcatatgtatggcgtcttcagaactttgttattggtgaacatgttttgacaccatcatcaagcactgtgacaccaattaaggcttgtgtgataagtgcatgtggtaattttactatcttgggcactgaaggtggttggattgaaaaatttaaccttcaatcagggtttagtcgtggtagttacattgacacctcgttggcaatgcaatgtgcacatgatggtgaagttgttggattagcttgcgatgccagaaatggctttttgattagtgctggataccaaggtgatattaaggcatgggattttaaaacttgcaagctgaaatctagattggatgttggtaaatctgttactaaaatcgcatttcaccggccaaatggtcttcttgctacggtagcaggtgatatggtactcatattgtttgatacggtgtccatgaaaatggttcgtagatttgaaggacatacagaccgtatcactgatttgtgcttcagtgaggatggaaaatggctcatctcgtctagcatggatgggactcttaggatttgggacatcagtttagcaaggcagatagatgcaatgcatgttgatgtatctataacatctatctctatgtctcctaatatggatgtgttggcaaccactcatgttgatcaaaatggtgtctacctctggtagagttctgttgcatcaccctgcgctcagcctattattaccacccttacatatctcaatttattttgtagctacatatatagttcagaaaaatgaaattatgagattggccttccagctggtgcactttccacaaatattttattcatcccacttatagccaacagtattatcagtacactctgtttcaacatatgcaccacgagttgtgttcttttatacgctgttatgggtcatgatatgcatactttttccagtttttttttcattgtggtctcatacatgtgctataaattggacagggttaatcaatctttattctcggtctcaacaaatactgaaaattatgccagtggtaaacatgtacggaatgtgtgtttgccagctgtttcatcaacagagagatctgaggaagaacaagttcagaatttaggagagtcatataagtccagtattaaaccttttgtcataacggatcatcaaataccgaatctagttaccctctccttacttccaaagagtcaatggcaaagtttgactaatcttgacattataaaggttcgcaataaaccaattgagccacctaagaaacctgagaaggcaccattcttcttgccttcagttccatccctttctggggagatattgtttgagcctcctgccagctcaaaagatacagacatcagtaccacgaagaatacaaatcataagatgtctgaactctcctctcatttcagtcagcagttgcaattttgtggtgaaacaaagaactattcggcttttactgactacctaaaaggcctgtcaccgtcgtctttagatatggaactgcgaatgctacaaatattagatgatgaagagtctgaagatctggagcaaagacctgagcttcagtccatttcttcgctgttggattatttcattcatgaactttccttcaggaataactttgagtttgtccaggctgttctgaaattgtttttgaagatacatggtgaaacaatacgacggcactcaatgcttcagagtaaggtgaagaagcttcttgaggtccagagcttagtttggcagaagattgataagatctttcagggtgcacgatgcatggttacattcctcagtaactcacaattttagtagcaggccggagttccacataccagggcatacatggtgcctaatgcctgcacgagtgtggccattggattgagcaagtggatatagttgattttttttggagacggcattaaaatggatctggttctcaaacatggcatgactaggcattggagcattgttgagcagcagccatggctatattactctaggcttacaattttgctgtagctgttagtctgttacacagcaaggagtccacttggtaaacatttgtagctaccaaaacagccccatctcatggtgtaacaattttgtagttttacatttgtgtcatctttttgtaacaaactgatgtatcaaacaccgtattgcaagaaatactaaggcttgccattgctatttgaacaaaaaaccatatctgtatattcaacaagcttagcttctgtgttggtcttatattgtggaggataccaggtgaaaatatccaaatgtacctaagtttgcaattatataaactctgaaaacaatcagttatca

SEQ ID NO: 83322 - DNA, 3632 bp, Zea Mays
gcccacctcaccacacgtccacacgcccaaccccaaccaaactgacctacccggaaaacgagccccccgactcccgcctgccgccgccgctctgccagccaaacccaaactaaaaccctcgccgacggcgcgcctgttgttaaaccctagaaaaaccagcggcgacaggagtggccgcaaccccgccgccggagggggctccacgaccagatagaagagggagagaggatggggatcttcgagccgttccgtgcgatcggctacatcacggcgagcggcgtgcccttctccgtgcagcgcctcagcaccgagaccttcgtcaccgtcagcgtcggcaaggctttccaagtctataactgtgctaagctgaatttggttcttgctggaccccaattgcccaagaagatccgtgctattgcatcctacaaggattatacatttgctgcttatggaagtgatattgcagttttcaaaaggactgaccaggtggctacttggagtagacatgaagaaaaggtcaacatgctatacctatttggagaatatgttctaagcgcagatgctaaaggtaatgtattcatgtgggccttcagaggagcagaaccaaacactgaaccagttggaagcatatcattgggagacaagttcaccccaacatgtatcatgcatcctgatacttatctgaataaggtaattgttggtagcgaagaaggctccttgcagctgtggaatatcagcacaaaaaagaaactgtatgatttcaatggttggaactcacctgttcggtgttgtgtctcttctcctgccctggatgtagttgctgtcggatgttctgatgggtcagttcatgttcataatgtaagatatgatgaagaattgatgtctttcaaccaccagattcgtggtgctgtgactgcactgtcatttcgaacagatgggcaaccccttctggcttctggaggttcttcaggcgttatcagcatatggaatcttgagaagagacggctgcattctgtgattagggaggcccatgatggttcaatagtttcacttcacttttttgcgaatgaacctattctgatgagttcagctgctgacaattcagtcaaaggacaggggcaacaagaaccttctttctggcaactagcatctggcttgatagcctgctaataagtgcagctaacaaaacatccgggaacaaacttacaattcctttaacactgttacctgttatttgtctcgtttcactttgtgggtcctaatctaatatgctctaccagatgtggatatttgatagtaatgatggaggtgctcgtctgttacgatttcgaagtggtcacagtgcaccacctaggtgcataagattctatggcaatggaaaatgcatattatctgctggccaagatcgtgcatttcgccttttctcagttatccaggatcaacaaagtagagagctttctcagaggcatgttgcaaaaagagcaaaaaagctaagagtaaaggaggaagagatcaagctaaaaccagttgttacatttgactgtgctgagatacgtgcacgtgactggtgtaatgttgtcacatgccacatggatactccacaggcatatgtatggcgtcttcagaactttgttattggtgaacatgttttgacaccatcatcaagcactgtgacaccaattaaggcttgtgtgataagtgcatgtggtaattttactatcttgggcactgaaggtggttggattgaaaaatttaaccttcaatcagggtttagtcgtggtagttacattgacacctcgttggcaatgcaatgtgcacatgatggtgaagttgttggattagcttgcgatgccagaaatggctttttgattagtgctggataccaaggtgatattaaggcatgggattttaaaacttgcaagctgaaatctagattggatgttggtaaatctgttactaaaatcgcatttcaccggccaaatggtcttcttgctacggtagcaggtgatatggtactcatattgtttgatacggtgtccatgaaaatggttcgtagatttgaaggacatacagaccgtatcactgatttgtgcttcagtgaggatggaaaatggctcatctcgtctagcatggatgggactcttaggatttgggacatcagtttagcaaggcagatagatgcaatgcatgttgatgtatctataacatctatctctatgtctcctaatatggatgtgttggcaaccactcatgttgatcaaaatggtgtctacctctgggttaatcaatctttattctcggtctcaacaaatactgaaaattatgccagtggtaaacatgtacggaatgtgtgtttgccagctgtttcatcaacagagagatctgaggaagaacaagttcagaatttaggagagtcatataagtccagtattaaaccttttgtcataacggatcatcaaataccgaatctagttaccctctccttacttccaaagagtcaatggcaaagtttgactaatcttgacattataaaggttcgcaataaaccaattgagccacctaagaaacctgagaaggcaccattcttcttgccttcagttccatccctttctggggagatattgtttgagcctcctgccagctcaaaagatacagacatcagtaccacgaagaatacaaatcataagatgtctgaactctcctctcatttcagtcagcagttgcaattttgtggtgaaacaaagaactattcggcttttactgactacctaaaaggcctgtcaccgtcgtctttagatatggaactgcgaatgctacaaatattagatgatgaagagtctgaagatctggagcaaagacctgagcttcagtccatttcttcgctgttggattatttcattcatgaactttccttcaggaataactttgagtttgtccaggctgttctgaaattgtttttgaagatacatggtgaaacaatacgacggcactcaatgcttcagagtaaggtgaagaagcttcttgaggtccagagcttagtttggcagaagattgataagatctttcagggtgcacgatgcatggttacattcctcagtaactcacaattttagtagcaggccggagttccacataccagggcatacatggtgcctaatgcctgcacgagtgtggccattggattgagcaagtggatatagttgattttttttggagacggcattaaaatggatctggttctcaaacatggcatgactaggcattggagcattgttgagcagcagccatggctatattactctaggcttacaattttgctgtagctgttagtctgttacacagcaaggagtccacttggtaaacatttgtagctaccaaaacagccccatctcatggtgtaacaattttgtagttttacatttgtgtcatctttttgtaacaaactgatgtatcaaacaccgtattgcaagaaatactaaggcttgccattgctatttgaacaaaaaaccatatctgtatattcaacaagcttagcttctgtgttggtcttatattgtggaggataccaggtgaaaatatccaaatgtacctaagtttgcaattatataaactctgaaaacaatcagttatca

SEQ ID NO: 83323 - DNA, 1945 bp, Zea Mays
agagctggatgttaaaatactgaaacagaggacaatgctagaagggtacacggcaaaggatgtggtgcgaacaccagatttgggaaattgtcaaaattagggctcgctcctcttctttggtgcaccattattggcatgcttattacatacacacactctgttatatcaggacaatatgccatgactacgacagcaccatttgggatattcgcatggtcaggagtttttcttgcaactgctggcttggtcatgttctataaatgtagcaggaaagatccaggttacatcaacataaatgcaaggggctcgcaaaatcaaagggatgatgaaccgttgctgaagatggagttagaaaatcctgcacttctttctggcaactggtcacaactttgtataacctgcaaaatagtcagacctgttcgttcaaaacattgttctacatgtgatcgctgcgtggagcagtttgaccaccactgcccttgggtatctaattgcataggaaagaagaacaaatgggaattcttcatgttcctcactctagaagtttttgcaatgatcattactggctctgctgccattataagaattgtaagagatccaaattctccatcatcctttggtgcttggattcattattctgcgtttcagcatcctggggtggtttcatttctcgcattggattgttttcttttctttggtgttgcagttcttacagttgttcaagcatcacagatagcaaggaacattacaacaaatgagatggcaaactccatgagatatgcatacctcagaggcccaggtggcagattcaggaatccgtatgatcatgggattcgcaagaactgctctgacttcttgttaaatggatacaatgaggacactgaacggctagagcagacattgcccactgatgaggaaatgggaatgatacagatgacaagtgcagtttcgcagcagaacggtgacaatcatttacatcatggtaatggcactgaccatagttgcgctgtttcacaagcaaactcaaaacctcatagccaagtgggttcgtctcagtgttgtgaccacagtaagaggactgataggacaccgttgggcctaggattgggccttggacgaaacagtgcgtcccggcagtatgttcggtctcttatcccattgtgatccatcatttggcgatcatgtgtttgtttgactgtagattggatttgttcacttattctgttatacgtgcccttgacatggttcaccatggctgggcagggttaacgttattgtgccatgagctccggaatactaagatatatctggtgttgtagtttagcgttgaactcagagaagttgaaggtaacgacctggtttgcgagtatcagctgatcagcagtctggaatcagagagtttgtgcagaaaatgtaagagttatggactcatggcagatgcagtagcatgagatgtcttcagaattgttgtgtacatcaggttcggtggtacccccattgtttagcgtgatacgagtttggaaaaaaaaaaagtagtcgtaaattgagaaaattgtaaattgattagtaagctcactgcaacactagctgttttcctagttttcattcatttttgggtctggttattgttatgaaccacggaaagaattttcggttttcgggtatgggtacctcagttatatttggtctggttatggtacttactggtggtgcatgtttgtgtgagtgcttagagtttaggctatggccatcagatcatgtatatgactatatgactgtgtaaaacactgttttttatctgattgtgtaaaacagtgtttttgtatcgtacactattgttttatagattgaagtttaaaataagagatgtgaatgagtaagctactagagatgtccttaggacactgttgttacaaagcatgtttaaaatagcagtaaaagattg

SEQ ID NO: 83324 - DNA, 2301 bp, Zea Mays
tagctgaccaattatatccactttaccaggccacgcatgttgcagcacagtatggtcagactgcattcatttaccacattgttgcaaaatggaatgctgatccagatatccctgataatgatggaaggagccctttacactgggctgcttataagggatttgcagactccatacggcttcttttgtttttggatgcttataggggacggcaagacaaagaaggttgtactccattacattgggctgctattcgggggaatcttgaggcatgcactgtcttagttcaggttggcaaaaaggatgatttgatggtgaaagacaaaactggcttaactccagcacagcttgctgccgataagaatcatcggcaagttgcatttttcctcgacaatgctagaagggtacacggcaaaggatgtggtgcgaacaccagatttgggaaattgtcaaaattagggctcgctcctcttctttggtgcaccattattggcatgcttattacatacacacactctgttatatcaggacaatatgccatgactacgacagcaccatttgggatattcgcatggtcaggagtttttcttgcaactgctggcttggtcatgttctataaatgtagcaggaaagatccaggttacatcaacataaatgcaaggggctcgcaaaatcaaagggatgatgaaccgttgctgaagatggagttagaaaatcctgcacttctttctggcaactggtcacaactttgtataacctgcaaaatagtcagacctgttcgttcaaaacattgttctacatgtgatcgctgcgtggagcagtttgaccaccactgcccttgggtatctaattgcataggaaagaagaacaaatgggaattcttcatgttcctcactctagaagtttttgcaatgatcattactggctctgctgccattataagaattgtaagagatccaaattctccatcatcctttggtgcttggattcattattctgcgtttcagcatcctggggtggtttcatttctcgcattggattgttttcttttctttggtgttgcagttcttacagttgttcaagcatcacagatagcaaggaacattacaacaaatgagatggcaaactccatgagatatgcatacctcagaggcccaggtggcagattcaggaatccgtatgatcatgggattcgcaagaactgctctgacttcttgttaaatggatacaatgaggacactgaacggctagagcagacattgcccactgatgaggaaatgggaatgatacagatgacaagtgcagtttcgcagcagaacggtgacaatcatttacatcatggtaatggcactgaccatagttgcgctgtttcacaagcaaactcaaaacctcatagccaagtgggttcgtctcagtgttgtgaccacagtaagaggactgataggacaccgttgggcctaggattgggccttggacgaaacagtgcgtcccggcagtatgttcggtctcttatcccattgtgatccatcatttggcgatcatgtgtttgtttgactgtagattggatttgttcacttattctgttatacgtgcccttgacatggttcaccatggctgggcagggttaacgttattgtgccatgagctccggaatactaagatatatctggtgttgtagtttagcgttgaactcagagaagttgaaggtaacgacctggtttgcgagtatcagctgatcagcagtctggaatcagagagtttgtgcagaaaatgtaagagttatggactcatggcagatgcagtagcatgagatgtcttcagaattgttgtgtacatcaggttcggtggtacccccattgtttagcgtgatacgagtttggaaaaaaaaaaagtagtcgtaaattgagaaaattgtaaattgattagtaagctcactgcaacactagctgttttcctagttttcattcatttttgggtctggttattgttatgaaccacggaaagaattttcggttttcgggtatgggtacctcagttatatttggtctggttatggtacttactggtggtgcatgtttgtgtgagtgcttagagtttaggctatggccatcagatcatgtatatgactatatgactgtgtaaaacactgttttttatctgattgtgtaaaacagtgtttttgtatcgtacactattgttttatagattgaagtttaaaataagagatgtgaatgagtaagctactagagatgtccttaggacactgttgttacaaagcatgtttaaaatagcagtaaaagattg

SEQ ID NO: 83325 - DNA, 2251 bp, Zea Mays
aactaaagcaattttggatgtatatcttctagctgaccaattatatccactttaccaggccacgcatgttgcagcacagtatggtcagactgcattcatttaccacattgttgcaaaatggaatgctgatccagatatccctgataatgatggaaggagccctttacactgggctgcttataagggatttgcagactccatacggcttcttttgtttttggatgcttataggggacggcaagacaaagaaggttgtactccattacattgggctgctattcgggggaatcttgaggcatgcactgtcttagttcaggttggcaaaaaggatgatttgatggtgaaagacaaaactggcttaactccagcacagcttgctgccgataagaatcatcggcaagttgcatttttcctcgacaatgctagaagggtacacggcaaaggatgtggtgcgaacaccagatttgggaaattgtcaaaattagggctcgctcctcttctttggtgcaccattattggcatgcttattacatacacacactctgttatatcaggacaatatgccatgactacgacagcaccatttgggatattcgcatggtcaggagtttttcttgcaactgctggcttggtcatgttctataaatgtagcaggaaagatccaggttacatcaacataaatgcaaggggctcgcaaaatcaaagggatgatgaaccgttgctgaagatggagttagaaaatcctgcacttctttctggcaactggtcacaactttgtataacctgcaaaatagtcagacctgttcgttcaaaacattgttctacatgtgatcgctgcgtggagcagtttgaccaccactgcccttgggtatctaattgcataggaaaggaattgtaagagatccaaattctccatcatcctttggtgcttggattcattattctgcgtttcagcatcctggggtggtttcatttctcgcattggattgttttcttttctttggtgttgcagttcttacagttgttcaagcatcacagatagcaaggaacattacaacaaatgagatggcaaactccatgagatatgcatacctcagaggcccaggtggcagattcaggaatccgtatgatcatgggattcgcaagaactgctctgacttcttgttaaatggatacaatgaggacactgaacggctagagcagacattgcccactgatgaggaaatgggaatgatacagatgacaagtgcagtttcgcagcagaacggtgacaatcatttacatcatggtaatggcactgaccatagttgcgctgtttcacaagcaaactcaaaacctcatagccaagtgggttcgtctcagtgttgtgaccacagtaagaggactgataggacaccgttgggcctaggattgggccttggacgaaacagtgcgtcccggcagtatgttcggtctcttatcccattgtgatccatcatttggcgatcatgtgtttgtttgactgtagattggatttgttcacttattctgttatacgtgcccttgacatggttcaccatggctgggcagggttaacgttattgtgccatgagctccggaatactaagatatatctggtgttgtagtttagcgttgaactcagagaagttgaaggtaacgacctggtttgcgagtatcagctgatcagcagtctggaatcagagagtttgtgcagaaaatgtaagagttatggactcatggcagatgcagtagcatgagatgtcttcagaattgttgtgtacatcaggttcggtggtacccccattgtttagcgtgatacgagtttggaaaaaaaaaaagtagtcgtaaattgagaaaattgtaaattgattagtaagctcactgcaacactagctgttttcctagttttcattcatttttgggtctggttattgttatgaaccacggaaagaattttcggttttcgggtatgggtacctcagttatatttggtctggttatggtacttactggtggtgcatgtttgtgtgagtgcttagagtttaggctatggccatcagatcatgtatatgactatatgactgtgtaaaacactgttttttatctgattgtgtaaaacagtgtttttgtatcgtacactattgttttatagattgaagtttaaaataagagatgtgaatgagtaagctactagagatgtccttaggacactgttgttacaaagcatgtttaaaatagcagtaaaagattg

SEQ ID NO: 83326 - DNA, 2947 bp, Zea Mays
cttccctctcgttctccgcttccgcctccgcctccggccacgagtcaccagggaagggacaaacgcacaaaatcaacgaacgcccagcgcccagtcaaacactaccccttcctccctcccccctcgccgcctccccggaccccgccccgaccccaccgaacccatggcgtcggagatcgaggtgctcgaggacaccaccacctcctcgacttccctcgtcgcggccgcgtccacagtcccttctctcgcggagggcgcggaggcgccggcggaggacgactcgctgaagaacgacgtgtacaccgcggcggcgtacggcgatctggagaagctgcagcgactggtggagggggagggccgcccagtcaccgagcccgacggcgggggctaccacgcgcttcagtgggccgcactcaacaaccgcgttgccgccgcgcagtacatccttgagcatggagcagacataaatgctgtggatcacactggacaaacagcacttcactggagtgctgtacgtggtcatattcaagttgctgaactacttctgaaagaaggagctaaggtggatgctactgatttatacgggtatcaggccacgcatgttgcagcacagtatggtcagactgcattcatttaccacattgttgcaaaatggaatgctgatccagatatccctgataatgatggaaggagccctttacactgggctgcttataagggatttgcagactccatacggcttcttttgtttttggatgcttataggggacggcaagacaaagaaggttgtactccattacattgggctgctattcgggggaatcttgaggcatgcactgtcttagttcaggttggcaaaaaggatgatttgatggtgaaagacaaaactggcttaactccagcacagcttgctgccgataagaatcatcggcaagttgcatttttcctcgacaatgctagaagggtacacggcaaaggatgtggtgcgaacaccagatttgggaaattgtcaaaattagggctcgctcctcttctttggtgcaccattattggcatgcttattacatacacacactctgttatatcaggacaatatgccatgactacgacagcaccatttgggatattcgcatggtcaggagtttttcttgcaactgctggcttggtcatgttctataaatgtagcaggaaagatccaggttacatcaacataaatgcaaggggctcgcaaaatcaaagggatgatgaaccgttgctgaagatggagttagaaaatcctgcacttctttctggcaactggtcacaactttgtataacctgcaaaatagtcagacctgttcgttcaaaacattgttctacatgtgatcgctgcgtggagcagtttgaccaccactgcccttgggtatctaattgcataggaaagatactcaagcaacaaatcctgaaagcttgacatcaatgtatattcaacaatggaatttgataaaagttgacataaaaatcatgaagaacaaatgggaattcttcatgttcctcactctagaagtttttgcaatgatcattactggctctgctgccattataagaattgtaagagatccaaattctccatcatcctttggtgcttggattcattattctgcgtttcagcatcctggggtggtttcatttctcgcattggattgttttcttttctttggtgttgcagttcttacagttgttcaagcatcacagatagcaaggaacattacaacaaatgagatggcaaactccatgagatatgcatacctcagaggcccaggtggcagattcaggaatccgtatgatcatgggattcgcaagaactgctctgacttcttgttaaatggatacaatgaggacactgaacggctagagcagacattgcccactgatgaggaaatgggaatgatacagatgacaagtgcagtttcgcagcagaacggtgacaatcatttacatcatggtaatggcactgaccatagttgcgctgtttcacaagcaaactcaaaacctcatagccaagtgggttcgtctcagtgttgtgaccacagtaagaggactgataggacaccgttgggcctaggattgggccttggacgaaacagtgcgtcccggcagtatgttcggtctcttatcccattgtgatccatcatttggcgatcatgtgtttgtttgactgtagattggatttgttcacttattctgttatacgtgcccttgacatggttcaccatggctgggcagggttaacgttattgtgccatgagctccggaatactaagatatatctggtgttgtagtttagcgttgaactcagagaagttgaaggtaacgacctggtttgcgagtatcagctgatcagcagtctggaatcagagagtttgtgcagaaaatgtaagagttatggactcatggcagatgcagtagcatgagatgtcttcagaattgttgtgtacatcaggttcggtggtacccccattgtttagcgtgatacgagtttggaaaaaaaaaaagtagtcgtaaattgagaaaattgtaaattgattagtaagctcactgcaacactagctgttttcctagttttcattcatttttgggtctggttattgttatgaaccacggaaagaattttcggttttcgggtatgggtacctcagttatatttggtctggttatggtacttactggtggtgcatgtttgtgtgagtgcttagagtttaggctatggccatcagatcatgtatatgactatatgactgtgtaaaacactgttttttatctgattgtgtaaaacagtgtttttgtatcgtacactattgttttatagattgaagtttaaaataagagatgtgaatgagtaagctactagagatgtccttaggacactgttgttacaaagcatgtttaaaatagcagtaaaagattg

SEQ ID NO: 83327 - DNA, 2785 bp, Zea Mays
cttccctctcgttctccgcttccgcctccgcctccggccacgagtcaccagggaagggacaaacgcacaaaatcaacgaacgcccagcgcccagtcaaacactaccccttcctccctcccccctcgccgcctccccggaccccgccccgaccccaccgaacccatggcgtcggagatcgaggtgctcgaggacaccaccacctcctcgacttccctcgtcgcggccgcgtccacagtcccttctctcgcggagggcgcggaggcgccggcggaggacgactcgctgaagaacgacgtgtacaccgcggcggcgtacggcgatctggagaagctgcagcgactggtggagggggagggccgcccagtcaccgagcccgacggcgggggctaccacgcgcttcagtgggccgcactcaacaaccgcgttgccgccgcgcagtacatccttgagcatggagcagacataaatgctgtggatcacactggacaaacagcacttcactggagtgctgtacgtggtcatattcaagttgctgaactacttctgaaagaaggagctaaggtggatgctactgatttatacgggtatcaggccacgcatgttgcagcacagtatggtcagactgcattcatttaccacattgttgcaaaatggaatgctgatccagatatccctgataatgatggaaggagccctttacactgggctgcttataagggatttgcagactccatacggcttcttttgtttttggatgcttataggggacggcaagacaaagaaggttgtactccattacattgggctgctattcgggggaatcttgaggcatgcactgtcttagttcaggttggcaaaaaggatgatttgatggtgaaagacaaaactggcttaactccagcacagcttgctgccgataagaatcatcggcaagttgcatttttcctcgacaatgctagaagggtacacggcaaaggatgtggtgcgaacaccagatttgggaaattgtcaaaattagggctcgctcctcttctttggtgcaccattattggcatgcttattacatacacacactctgttatatcaggacaatatgccatgactacgacagcaccatttgggatattcgcatggtcaggagtttttcttgcaactgctggcttggtcatgttctataaatgtagcaggaaagatccaggttacatcaacataaatgcaaggggctcgcaaaatcaaagggatgatgaaccgttgctgaagatggagttagaaaatcctgcacttctttctggcaactggtcacaactttgtataacctgcaaaatagtcagacctgttcgttcaaaacattgttctacatgtgatcgctgcgtggagcagtttgaccaccactgcccttgggtatctaattgcataggaaaggaattgtaagagatccaaattctccatcatcctttggtgcttggattcattattctgcgtttcagcatcctggggtggtttcatttctcgcattggattgttttcttttctttggtgttgcagttcttacagttgttcaagcatcacagatagcaaggaacattacaacaaatgagatggcaaactccatgagatatgcatacctcagaggcccaggtggcagattcaggaatccgtatgatcatgggattcgcaagaactgctctgacttcttgttaaatggatacaatgaggacactgaacggctagagcagacattgcccactgatgaggaaatgggaatgatacagatgacaagtgcagtttcgcagcagaacggtgacaatcatttacatcatggtaatggcactgaccatagttgcgctgtttcacaagcaaactcaaaacctcatagccaagtgggttcgtctcagtgttgtgaccacagtaagaggactgataggacaccgttgggcctaggattgggccttggacgaaacagtgcgtcccggcagtatgttcggtctcttatcccattgtgatccatcatttggcgatcatgtgtttgtttgactgtagattggatttgttcacttattctgttatacgtgcccttgacatggttcaccatggctgggcagggttaacgttattgtgccatgagctccggaatactaagatatatctggtgttgtagtttagcgttgaactcagagaagttgaaggtaacgacctggtttgcgagtatcagctgatcagcagtctggaatcagagagtttgtgcagaaaatgtaagagttatggactcatggcagatgcagtagcatgagatgtcttcagaattgttgtgtacatcaggttcggtggtacccccattgtttagcgtgatacgagtttggaaaaaaaaaaagtagtcgtaaattgagaaaattgtaaattgattagtaagctcactgcaacactagctgttttcctagttttcattcatttttgggtctggttattgttatgaaccacggaaagaattttcggttttcgggtatgggtacctcagttatatttggtctggttatggtacttactggtggtgcatgtttgtgtgagtgcttagagtttaggctatggccatcagatcatgtatatgactatatgactgtgtaaaacactgttttttatctgattgtgtaaaacagtgtttttgtatcgtacactattgttttatagattgaagtttaaaataagagatgtgaatgagtaagctactagagatgtccttaggacactgttgttacaaagcatgtttaaaatagcagtaaaagattg

SEQ ID NO: 83328 - DNA, 684 bp, Zea Mays
gacgatagcatctcaattcagaaggctggtgcatctgagcatgcaagaaccttgggcccgaaaggttcagacccacacaaggctgctgtcatcggtgacaccatcggtgatcccctcaaggacacctcaggcccctcgctgaacatcctcatcaagctcatggctgtcgagtcccttgtctttgctcccttcttcgccacccatggaggcatcctcttcaaatggctttagaggaagaatggaagatggatgggtagtttatttttgccgggggagagcactagatatatgtcatagagaagtttcagtttacccatatggtgcacttcatccttttttgtttcgcttgtactgtgtcgcagtcttgttgaacttgtcagccgtggtatcacctagtttttgggtctagatgcagtagccgagtggagcaaaaacgtctagcattctacaggattggaatttggacatggatgtgttgggaagtttgatactgcatgtagatatttcgatgatgatgatcaaggaatgcacaagtcagatttacctgtgtttgtgaaacttgaaactctgcgtaggagtgtatggcggtagaatagtcaatcagtgaccgatcaaaatctgtaactcatcgaccttattttaatagtataaactagataaaattatacaacaaacccaattaaa

SEQ ID NO: 83329 - DNA, 2534 bp, Zea Mays
agttaacatcacaccaataaaagaggataagagcaacttctttccttttcactgaatacaagtatgtgggactattcatgggcatttttgctgtcctgatcttcctcttccttggttctgttgagagcttcagtaccaagagtcagccatgccactacagcaagggcaagacgtgcaagcctgcccttgccaatgctatcttcagcaccattgcctttgtgcttggtgcagtcacctctcttgtttctggtttccttggaatgaagattgccacatatgcaaatgccaggacaactcttgaggctaggaagggtgttggaaaggcattcattaccgctttccgctctggtgctgtgatgggcttcctgcttgctgctagtggcctttttgttctttatattgcaatcaacttgtttggaatttattatggtgatgactgggagggcctttatgaggctatcactggttatggtcttggtggttcttctatggctctttttggtcgtgttggtggtgggatttacactaaagctgctgatgttggtgctgatcttgttgggaaagtcgaaaggaatatccctgaagatgatccgagaaacccagctgtcattgcggacaatgttggtgacaatgttggagatattgctggtatggggtcagatctctttggctcttatgctgagtcttcatgcgctgcgcttgtcgttgcctcaatctcttcattcgggatcaatcatgaattcacccctatgttgtacccactcctcattagctctgtgggtatcatagcttgcttgataaccactctttttgcaactgatttctttgagatcaaggctgtagatgaaattgagccggctctcaagaagcagcttataatttccactgctgtgatgactgttggcattgcacttgtcagttggttagggcttccatatacattcacaatcttcaactttggtgtgcagaagacggtgtataactggcaattattcctatgcgtggcagttggtctgtgggcaggactagttattggatttgttacggagtattacacaagcaatgcatacagtcctgtacaggatgttgctgattcctgcagaactggagctgctacgaatgtcatctttggccttgctctgggatataaatccgtcattatccctatttttgctattgcttttagtatttttctcagcttcagccttgctgccatgtacggtgttgctgtggctgctcttggaatgctcagcacaatcgctactggccttgccattgatgcctatggtcctatcagtgacaatgctggaggaattgctgaaatggctggcatgagccacagaatccgtgagagaactgatgctcttgatgctgctggaaatactactgctgccattgggaagggttttgcaataggttcagcagccttggtgtctcttgccctctttggtgcttttgtcagccgtgctgagatctcgactgttgatgttctgacacccaaagttttcattggactgattgttggtgccatgctcccatactggttctcagcgatgacaatgaagagtgttggaagtgcagcactcaagatggttgaggaagtccgcaggcagttcaacaccatccctgggctcatggagggcattaccaagcctgactatgcgacgtgtgttaagatctctactgatgcatctatcaaggagatgatcccacctggtgcacttgtcatgcttacacctcttattgtggggatcttctttggtgttgaaaccctctctggagttcttgctggtgctcttgtttctggtgtccagattgccatctctgcatccaacactggaggtgcctgggacaacgcaaagaaatacattgaggctggtgcatctgagcatgcaagaaccttgggcccgaaaggttcagacccacacaaggctgctgtcatcggtgacaccatcggtgatcccctcaaggacacctcaggcccctcgctgaacatcctcatcaagctcatggctgtcgagtcccttgtctttgctcccttcttcgccacccatggaggcatcctcttcaaatggctttagaggaagaatggaagatggatgggtagtttatttttgccgggggagagcactagatatatgtcatagagaagtttcagtttacccatatggtgcacttcatccttttttgtttcgcttgtactgtgtcgcagtcttgttgaacttgtcagccgtggtatcacctagtttttgggtctagatgcagtagccgagtggagcaaaaacgtctagcattctacaggattggaatttggacatggatgtgttgggaagtttgatactgcatgtagatatttcgatgatgatgatcaaggaatgcacaagtcagatttacctgtgtttgtgaaacttgaaactctgcgtaggagtgtatggcggtagaatagtcaatcagtgaccgatcaaaatctgtaactcatcgaccttattttaatagtataaactagataaaattatacaacaaacccaattaaa

SEQ ID NO: 83330 - DNA, 2985 bp, Zea Mays
tcctctccgctctgctccctccgccgtgcgctcgaacgaactccacacgaaattatccgcgtaaagttggggagcagcgaacccgtagcgcgcgccccggatccctccacggggggcaatggcctcgtcggcgttcctgcccgagctgggcacgcaggtggtggtgcccgtcgcggccgtggtaggcatcgcgttcgcggtgctgcagtgggtgctggtctccaaggtgaagctctcccccgagccgcgccgcggagacggctccgccgggaagagcggcgccggcgccggcgccagcgagtacctcatcgaggaggaggaggggctcaacgagcacaacgtcgtcgtcaagtacgccgagatccagaacgccatctccgaaggaatcagcagagtagtccgtatgaagatttttgtgaaccagcagagtagtccatatgaagattttgtgaaccagcagagtagtccgtatgaagattttgagcaacttctttccttttcactgaatacaagtatgtgggactattcatgggcatttttgctgtcctgatcttcctcttccttggttctgttgagagcttcagtaccaagagtcagccatgccactacagcaagggcaagacgtgcaagcctgcccttgccaatgctatcttcagcaccattgcctttgtgcttggtgcagtcacctctcttgtttctggtttccttggaatgaagattgccacatatgcaaatgccaggacaactcttgaggctaggaagggtgttggaaaggcattcattaccgctttccgctctggtgctgtgatgggcttcctgcttgctgctagtggcctttttgttctttatattgcaatcaacttgtttggaatttattatggtgatgactgggagggcctttatgaggctatcactggttatggtcttggtggttcttctatggctctttttggtcgtgttggtggtgggatttacactaaagctgctgatgttggtgctgatcttgttgggaaagtcgaaaggaatatccctgaagatgatccgagaaacccagctgtcattgcggacaatgttggtgacaatgttggagatattgctggtatggggtcagatctctttggctcttatgctgagtcttcatgcgctgcgcttgtcgttgcctcaatctcttcattcgggatcaatcatgaattcacccctatgttgtacccactcctcattagctctgtgggtatcatagcttgcttgataaccactctttttgcaactgatttctttgagatcaaggctgtagatgaaattgagccggctctcaagaagcagcttataatttccactgctgtgatgactgttggcattgcacttgtcagttggttagggcttccatatacattcacaatcttcaactttggtgtgcagaagacggtgtataactggcaattattcctatgcgtggcagttggtctgtgggcaggactagttattggatttgttacggagtattacacaagcaatgcatacagtcctgtacaggatgttgctgattcctgcagaactggagctgctacgaatgtcatctttggccttgctctgggatataaatccgtcattatccctatttttgctattgcttttagtatttttctcagcttcagccttgctgccatgtacggtgttgctgtggctgctcttggaatgctcagcacaatcgctactggccttgccattgatgcctatggtcctatcagtgacaatgctggaggaattgctgaaatggctggcatgagccacagaatccgtgagagaactgatgctcttgatgctgctggaaatactactgctgccattgggaagggttttgcaataggttcagcagccttggtgtctcttgccctctttggtgcttttgtcagccgtgctgagatctcgactgttgatgttctgacacccaaagttttcattggactgattgttggtgccatgctcccatactggttctcagcgatgacaatgaagagtgttggaagtgcagcactcaagatggttgaggaagtccgcaggcagttcaacaccatccctgggctcatggagggcattaccaagcctgactatgcgacgtgtgttaagatctctactgatgcatctatcaaggagatgatcccacctggtgcacttgtcatgcttacacctcttattgtggggatcttctttggtgttgaaaccctctctggagttcttgctggtgctcttgtttctggtgtccagattgccatctctgcatccaacactggaggtgcctgggacaacgcaaagaaatacattgaggctggtgcatctgagcatgcaagaaccttgggcccgaaaggttcagacccacacaaggctgctgtcatcggtgacaccatcggtgatcccctcaaggacacctcaggcccctcgctgaacatcctcatcaagctcatggctgtcgagtcccttgtctttgctcccttcttcgccacccatggaggcatcctcttcaaatggctttagaggaagaatggaagatggatgggtagtttatttttgccgggggagagcactagatatatgtcatagagaagtttcagtttacccatatggtgcacttcatccttttttgtttcgcttgtactgtgtcgcagtcttgttgaacttgtcagccgtggtatcacctagtttttgggtctagatgcagtagccgagtggagcaaaaacgtctagcattctacaggattggaatttggacatggatgtgttgggaagtttgatactgcatgtagatatttcgatgatgatgatcaaggaatgcacaagtcagatttacctgtgtttgtgaaacttgaaactctgcgtaggagtgtatggcggtagaatagtcaatcagtgaccgatcaaaatctgtaactcatcgaccttattttaatagtataaactagataaaattatacaacaaacccaattaaa

SEQ ID NO: 83331 - DNA, 2983 bp, Zea Mays
ctctcctctccgctctgctccctccgccgtgcgctcgaacgaactccacacgaaattatccgcgtaaagttggggagcagcgaacccgtagcgcgcgccccggatccctccacggggggcaatggcctcgtcggcgttcctgcccgagctgggcacgcaggtggtggtgcccgtcgcggccgtggtaggcatcgcgttcgcggtgctgcagtgggtgctggtctccaaggtgaagctctcccccgagccgcgccgcggagacggctccgccgggaagagcggcgccggcgccggcgccagcgagtacctcatcgaggaggaggaggggctcaacgagcacaacgtcgtcgtcaagtacgccgagatccagaacgccatctccgaagagccatactatgctcattatccttacaggaatcagcagagtagtccgtatgaagatttttgtgaaccagcagagtagtccatatgaagattttgagcaacttctttccttttcactgaatacaagtatgtgggactattcatgggcatttttgctgtcctgatcttcctcttccttggttctgttgagagcttcagtaccaagagtcagccatgccactacagcaagggcaagacgtgcaagcctgcccttgccaatgctatcttcagcaccattgcctttgtgcttggtgcagtcacctctcttgtttctggtttccttggaatgaagattgccacatatgcaaatgccaggacaactcttgaggctaggaagggtgttggaaaggcattcattaccgctttccgctctggtgctgtgatgggcttcctgcttgctgctagtggcctttttgttctttatattgcaatcaacttgtttggaatttattatggtgatgactgggagggcctttatgaggctatcactggttatggtcttggtggttcttctatggctctttttggtcgtgttggtggtgggatttacactaaagctgctgatgttggtgctgatcttgttgggaaagtcgaaaggaatatccctgaagatgatccgagaaacccagctgtcattgcggacaatgttggtgacaatgttggagatattgctggtatggggtcagatctctttggctcttatgctgagtcttcatgcgctgcgcttgtcgttgcctcaatctcttcattcgggatcaatcatgaattcacccctatgttgtacccactcctcattagctctgtgggtatcatagcttgcttgataaccactctttttgcaactgatttctttgagatcaaggctgtagatgaaattgagccggctctcaagaagcagcttataatttccactgctgtgatgactgttggcattgcacttgtcagttggttagggcttccatatacattcacaatcttcaactttggtgtgcagaagacggtgtataactggcaattattcctatgcgtggcagttggtctgtgggcaggactagttattggatttgttacggagtattacacaagcaatgcatacagtcctgtacaggatgttgctgattcctgcagaactggagctgctacgaatgtcatctttggccttgctctgggatataaatccgtcattatccctatttttgctattgcttttagtatttttctcagcttcagccttgctgccatgtacggtgttgctgtggctgctcttggaatgctcagcacaatcgctactggccttgccattgatgcctatggtcctatcagtgacaatgctggaggaattgctgaaatggctggcatgagccacagaatccgtgagagaactgatgctcttgatgctgctggaaatactactgctgccattgggaagggttttgcaataggttcagcagccttggtgtctcttgccctctttggtgcttttgtcagccgtgctgagatctcgactgttgatgttctgacacccaaagttttcattggactgattgttggtgccatgctcccatactggttctcagcgatgacaatgaagagtgttggaagtgcagcactcaagatggttgaggaagtccgcaggcagttcaacaccatccctgggctcatggagggcattaccaagcctgactatgcgacgtgtgttaagatctctactgatgcatctatcaaggagatgatcccacctggtgcacttgtcatgcttacacctcttattgtggggatcttctttggtgttgaaaccctctctggagttcttgctggtgctcttgtttctggtgtccagattgccatctctgcatccaacactggaggtgcctgggacaacgcaaagaaatacattgaggctggtgcatctgagcatgcaagaaccttgggcccgaaaggttcagacccacacaaggctgctgtcatcggtgacaccatcggtgatcccctcaaggacacctcaggcccctcgctgaacatcctcatcaagctcatggctgtcgagtcccttgtctttgctcccttcttcgccacccatggaggcatcctcttcaaatggctttagaggaagaatggaagatggatgggtagtttatttttgccgggggagagcactagatatatgtcatagagaagtttcagtttacccatatggtgcacttcatccttttttgtttcgcttgtactgtgtcgcagtcttgttgaacttgtcagccgtggtatcacctagtttttgggtctagatgcagtagccgagtggagcaaaaacgtctagcattctacaggattggaatttggacatggatgtgttgggaagtttgatactgcatgtagatatttcgatgatgatgatcaaggaatgcacaagtcagatttacctgtgtttgtgaaacttgaaactctgcgtaggagtgtatggcggtagaatagtcaatcagtgaccgatcaaaatctgtaactcatcgaccttattttaatagtataaactagataaaattatacaacaaacccaattaaa

SEQ ID NO: 83332 - DNA, 3052 bp, Zea Mays
cgcctctcctataaaatggcggctgccggtgtcatcctctcctctccgctctgctccctccgccgtgcgctcgaacgaactccacacgaaattatccgcgtaaagttggggagcagcgaacccgtagcgcgcgccccggatccctccacggggggcaatggcctcgtcggcgttcctgcccgagctgggcacgcaggtggtggtgcccgtcgcggccgtggtaggcatcgcgttcgcggtgctgcagtgggtgctggtctccaaggtgaagctctcccccgagccgcgccgcggagacggctccgccgggaagagcggcgccggcgccggcgccagcgagtacctcatcgaggaggaggaggggctcaacgagcacaacgtcgtcgtcaagtacgccgagatccagaacgccatctccgaagagccatactatgctcattatccttacaggaatcagcagagtagtccgtatgaagatttttgtgaaccagcagagtagtccatatgaagattttgtgaaccagcagagtagtccgtatgaagattttgagcaacttctttccttttcactgaatacaagtatgtgggactattcatgggcatttttgctgtcctgatcttcctcttccttggttctgttgagagcttcagtaccaagagtcagccatgccactacagcaagggcaagacgtgcaagcctgcccttgccaatgctatcttcagcaccattgcctttgtgcttggtgcagtcacctctcttgtttctggtttccttggaatgaagattgccacatatgcaaatgccaggacaactcttgaggctaggaagggtgttggaaaggcattcattaccgctttccgctctggtgctgtgatgggcttcctgcttgctgctagtggcctttttgttctttatattgcaatcaacttgtttggaatttattatggtgatgactgggagggcctttatgaggctatcactggttatggtcttggtggttcttctatggctctttttggtcgtgttggtggtgggatttacactaaagctgctgatgttggtgctgatcttgttgggaaagtcgaaaggaatatccctgaagatgatccgagaaacccagctgtcattgcggacaatgttggtgacaatgttggagatattgctggtatggggtcagatctctttggctcttatgctgagtcttcatgcgctgcgcttgtcgttgcctcaatctcttcattcgggatcaatcatgaattcacccctatgttgtacccactcctcattagctctgtgggtatcatagcttgcttgataaccactctttttgcaactgatttctttgagatcaaggctgtagatgaaattgagccggctctcaagaagcagcttataatttccactgctgtgatgactgttggcattgcacttgtcagttggttagggcttccatatacattcacaatcttcaactttggtgtgcagaagacggtgtataactggcaattattcctatgcgtggcagttggtctgtgggcaggactagttattggatttgttacggagtattacacaagcaatgcatacagtcctgtacaggatgttgctgattcctgcagaactggagctgctacgaatgtcatctttggccttgctctgggatataaatccgtcattatccctatttttgctattgcttttagtatttttctcagcttcagccttgctgccatgtacggtgttgctgtggctgctcttggaatgctcagcacaatcgctactggccttgccattgatgcctatggtcctatcagtgacaatgctggaggaattgctgaaatggctggcatgagccacagaatccgtgagagaactgatgctcttgatgctgctggaaatactactgctgccattgggaagggttttgcaataggttcagcagccttggtgtctcttgccctctttggtgcttttgtcagccgtgctgagatctcgactgttgatgttctgacacccaaagttttcattggactgattgttggtgccatgctcccatactggttctcagcgatgacaatgaagagtgttggaagtgcagcactcaagatggttgaggaagtccgcaggcagttcaacaccatccctgggctcatggagggcattaccaagcctgactatgcgacgtgtgttaagatctctactgatgcatctatcaaggagatgatcccacctggtgcacttgtcatgcttacacctcttattgtggggatcttctttggtgttgaaaccctctctggagttcttgctggtgctcttgtttctggtgtccagattgccatctctgcatccaacactggaggtgcctgggacaacgcaaagaaatacattgaggctggtgcatctgagcatgcaagaaccttgggcccgaaaggttcagacccacacaaggctgctgtcatcggtgacaccatcggtgatcccctcaaggacacctcaggcccctcgctgaacatcctcatcaagctcatggctgtcgagtcccttgtctttgctcccttcttcgccacccatggaggcatcctcttcaaatggctttagaggaagaatggaagatggatgggtagtttatttttgccgggggagagcactagatatatgtcatagagaagtttcagtttacccatatggtgcacttcatccttttttgtttcgcttgtactgtgtcgcagtcttgttgaacttgtcagccgtggtatcacctagtttttgggtctagatgcagtagccgagtggagcaaaaacgtctagcattctacaggattggaatttggacatggatgtgttgggaagtttgatactgcatgtagatatttcgatgatgatgatcaaggaatgcacaagtcagatttacctgtgtttgtgaaacttgaaactctgcgtaggagtgtatggcggtagaatagtcaatcagtgaccgatcaaaatctgtaactcatcgaccttattttaatagtataaactagataaaattatacaacaaacccaattaaa

SEQ ID NO: 83333 - DNA, 688 bp, Zea Mays
ctacaaatgattcattaccccacaacgtgccagctggaactcatctgattgaggtctcctcaattggttacttcttttcccctgtccgagttgatataagtgcaaggaatcctggatatattcaagcagcattgactgaaaccagaagggttctgaatgagcttgttctggaacctctgaaagaagagcagtactatgaggttagggagccgttctccatcatgtcacttttgaagagccccatggggttaatggttggttttatggtcttaatggtctttgtgatgcccaagatgatggagaacatagatcccgaggagatgaagcaagctcaagaacaaatgaggaacaaccctgtatcattctctggcttgctcgccagagcgcagggctagagaagtagactgtagacatgaggatactgcaaaggtcaaacattctagaatgtgaatctttgacaccttgcttagtcatcatcagaccacggcggactgtggacatttttagacttgtgtagtgatgcgtcagagacctcgccaggatggacagagggatacccatgcaaatttgtgcacttatgcatccagctaggggtgtaatcggatcgaatacagagtatccagccatccgattcgtatccaacacatgtcagcgaatatgagtaatttttttaaaaaataaacgtccg

SEQ ID NO: 83334 - DNA, 1045 bp, Zea Mays
aaaccgaaccgaagtgcaaccatccgtcacatcacaaaccgaaaaaggccgcgacgagccgaccagctctactgcccccttccggccttcggcgaccgtgacgagcaacgacgaccacggcgacgatggccgcttcctccctctgccacgggcacttgctcctgtttctcctcgtgtccgtcacatcggcctgcctcggtaccgcggcagcgcatcaagccgggtctggagagggttacacgatcgccggccgcgtcaagatcgatggcatgagtgagaagggctatggtcttccagccaagacatcaaacacaaaagtgatacttaatggcggccaaagggttacatttgccaggccagacggctactttgcattccacaacgtgccagctggaactcatctgattgaggtctcctcaattggttacttcttttcccctgtccgagttgatataagtgcaaggaatcctggatatattcaagcagcattgactgaaaccagaagggttctgaatgagcttgttctggaacctctgaaagaagagcagtactatgaggttagggagccgttctccatcatgtcacttttgaagagccccatggggttaatggttggttttatggtcttaatggtctttgtgatgcccaagatgatggagaacatagatcccgaggagatgaagcaagctcaagaacaaatgaggaacaaccctgtatcattctctggcttgctcgccagagcgcagggctagagaagtagactgtagacatgaggatactgcaaaggtcaaacattctagaatgtgaatctttgacaccttgcttagtcatcatcagaccacggcggactgtggacatttttagacttgtgtagtgatgcgtcagagacctcgccaggatggacagagggatacccatgcaaatttgtgcacttatgcatccagctaggggtgtaatcggatcgaatacagagtatccagccatccgattcgtatccaacacatgtcagcgaatatgagtaatttttttaaaaaataaacgtccg

SEQ ID NO: 83335 - DNA, 1386 bp, Zea Mays
aaaccgaaccgaagtgcaaccatccgtcacatcacaaaccgaaaaaggccgcgacgagccgaccagctctactgcccccttccggccttcggcgaccgtgacgagcaacgacgaccacggcgacgatggccgcttcctccctctgccacgggcacttgctcctgtttctcctcgtgtccgtcacatcggcctgcctcggtaccgcggcagcgcatcaagccgggtctggagagggttacacgatcgccggccgcgtcaagatcgatggcatgagtgagaagggctatggtcttccagccaagacatcaaacacaaaagtgatacttaatggcggccaaagggttacatttgccaggccagacggctactttgcattgtatcctacaaatgattcattaccccacaacgtgccagctggaactcatctgattgaggtctcctcaattggttacttcttttcccctgtccgagttgatataagtgcaaggaatcctggatatattcaagcagcattgactgaaaccagaagggttctgaatgagcttgttctggaacctctgaaagaagagcagtactatgaggttagggagccgttctccatcatgtcacttttgaagagccccatggggttaatggttggttttatggtcttaatggtctttgtgatgcccaagatgatggagaacatagatcccgaggagatgaagcaagctcaagaacaaatgaggaacaaccctgtatcattctctggcttgctcgccagagcgcagggctagagaagtagactgtagacatgaggatactgcaaaggtcaaacattctagaatgtgagtaagagcactattaaagtgcttggcacgtcactcactcggggcaatttcctggggataagaaggaaatcctttccccctgtttttaccgtattttagggctagtttgggaacaccaatttcctaaaagatttatattttcccatgggaaaatgaactaatttcccttgggaaaataaaaatcttttggaaatttggggttccaaactagcccttaagttgtaatttgtctgcggtgtagaaccttctgaaacctctgagctagtgatgcgtcagattgagatattttgttcaatgtttgctgtttgaatcaggtgaatctttgacaccttgcttagtcatcatcagaccacggcggactgtggacatttttagacttgtgtagtgatgcgtcagagacctcgccaggatggacagagggatacccatgcaaatttgtgcacttatgcatccagctaggggtgtaatcggatcgaatacagagtatccagccatccgattcgtatccaacacatgtcagcgaatatgagtaatttttttaaaaaataaacgtccg

SEQ ID NO: 83336 - DNA, 936 bp, Zea Mays
aaaccgaaccgaagtgcaaccatccgtcacatcacaaaccgaaaaaggccgcgacgagccgaccagctctactgcccccttccggccttcggcgaccgtgacgagcaacgacgaccacggcgacgatggccgcttcctccctctgccacgggcacttgctcctgtttctcctcgtgtccgtcacatcggcctgcctcggtaccgcggcagcgcatcaagccgggtctggagagggttacacgatcgccggccgcgtcaagatcgatggcatgagtgagaagggctatggtcttccagccaagacatcaaacacaaaagtgatacttaatggcggccaaagggttacatttgccaggccagacggctactttgcattccacaacgtgccagctggaactcatctgattgaggtctcctcaattggttacttcttttcccctgtccgagttgatataagtgcaaggaatcctggatatattcaagcagcattgactgaaaccagaagggttctgaatgagcttgttctggaacctctgaaagaagagcagtactatgagatcccgaggagatgaagcaagctcaagaacaaatgaggaacaaccctgtatcattctctggcttgctcgccagagcgcagggctagagaagtagactgtagacatgaggatactgcaaaggtcaaacattctagaatgtgaatctttgacaccttgcttagtcatcatcagaccacggcggactgtggacatttttagacttgtgtagtgatgcgtcagagacctcgccaggatggacagagggatacccatgcaaatttgtgcacttatgcatccagctaggggtgtaatcggatcgaatacagagtatccagccatccgattcgtatccaacacatgtcagcgaatatgagtaatttttttaaaaaataaacgtccg

SEQ ID NO: 83337 - DNA, 1357 bp, Zea Mays
aaaccgaaccgaagtgcaaccatccgtcacatcacaaaccgaaaaaggccgcgacgagccgaccagctctactgcccccttccggccttcggcgaccgtgacgagcaacgacgaccacggcgacgatggccgcttcctccctctgccacgggcacttgctcctgtttctcctcgtgtccgtcacatcggcctgcctcggtaccgcggcagcgcatcaagccgggtctggagagggttacacgatcgccggccgcgtcaagatcgatggcatgagtgagaagggctatggtcttccagccaagacatcaaacacaaaagtgatacttaatggcggccaaagggttacatttgccaggccagacggctactttgcattccacaacgtgccagctggaactcatctgattgaggtctcctcaattggttacttcttttcccctgtccgagttgatataagtgcaaggaatcctggatatattcaagcagcattgactgaaaccagaagggttctgaatgagcttgttctggaacctctgaaagaagagcagtactatgagggagccgttctccatcatgtcacttttgaagagccccatggggttaatggttggttttatggtcttaatggtctttgtgatgcccaagatgatggagaacatagatcccgaggagatgaagcaagctcaagaacaaatgaggaacaaccctgtatcattctctggcttgctcgccagagcgcagggctagagaagtagactgtagacatgaggatactgcaaaggtcaaacattctagaatgtgagtaagagcactattaaagtgcttggcacgtcactcactcggggcaatttcctggggataagaaggaaatcctttccccctgtttttaccgtattttagggctagtttgggaacaccaatttcctaaaagatttatattttcccatgggaaaatgaactaatttcccttgggaaaataaaaatcttttggaaatttggggttccaaactagcccttaagttgtaatttgtctgcggtgtagaaccttctgaaacctctgagctagtgatgcgtcagattgagatattttgttcaatgtttgctgtttgaatcaggtgaatctttgacaccttgcttagtcatcatcagaccacggcggactgtggacatttttagacttgtgtagtgatgcgtcagagacctcgccaggatggacagagggatacccatgcaaatttgtgcacttatgcatccagctaggggtgtaatcggatcgaatacagagtatccagccatccgattcgtatccaacacatgtcagcgaatatgagtaatttttttaaaaaataaacgtccg

SEQ ID NO: 83338 - DNA, 1253 bp, Zea Mays
aaaccgaaccgaagtgcaaccatccgtcacatcacaaaccgaaaaaggccgcgacgagccgaccagctctactgcccccttccggccttcggcgaccgtgacgagcaacgacgaccacggcgacgatggccgcttcctccctctgccacgggcacttgctcctgtttctcctcgtgtccgtcacatcggcctgcctcggtaccgcggcagcgcatcaagccgggtctggagagggttacacgatcgccggccgcgtcaagatcgatggcatgagtgagaagggctatggtcttccagccaagacatcaaacacaaaagtgatacttaatggcggccaaagggttacatttgccaggccagacggctactttgcattccacaacgtgccagctggaactcatctgattgaggtctcctcaattggttacttcttttcccctgtccgagttgatataagtgcaaggaatcctggatatattcaagcagcattgactgaaaccagaagggttctgaatgagcttgttctggaacctctgaaagaagagcagtactatgagatcccgaggagatgaagcaagctcaagaacaaatgaggaacaaccctgtatcattctctggcttgctcgccagagcgcagggctagagaagtagactgtagacatgaggatactgcaaaggtcaaacattctagaatgtgagtaagagcactattaaagtgcttggcacgtcactcactcggggcaatttcctggggataagaaggaaatcctttccccctgtttttaccgtattttagggctagtttgggaacaccaatttcctaaaagatttatattttcccatgggaaaatgaactaatttcccttgggaaaataaaaatcttttggaaatttggggttccaaactagcccttaagttgtaatttgtctgcggtgtagaaccttctgaaacctctgagctagtgatgcgtcagattgagatattttgttcaatgtttgctgtttgaatcaggtgaatctttgacaccttgcttagtcatcatcagaccacggcggactgtggacatttttagacttgtgtagtgatgcgtcagagacctcgccaggatggacagagggatacccatgcaaatttgtgcacttatgcatccagctaggggtgtaatcggatcgaatacagagtatccagccatccgattcgtatccaacacatgtcagcgaatatgagtaatttttttaaaaaataaacgtccg

SEQ ID NO: 83339 - DNA, 871 bp, Zea Mays
tggcttactttggagcagcaggggtcagcatatggtgatatattttcttcatggacacatgtgcatatatgaggtttgcaagaatttaaactagcaataacaacctcatgagtggtattcaacatgatatgatcatcaattaatttccatgggttttggagtgagctagcatccagttcatcggtcgtttgaagagagatcgacatgagaggatgtcgtctgcttcgtcgttccaagctgaagaaggcacgccggaggaggaagagagtaacaacggccgggtcgatcagctaacgatggatcgatcatttttttccccatatttattgtgttgcgtctgctgtagtttctaattttctagatgtgctttcggtttggtctgtagaccctgcagcttgatttggttaagtttgatttgatgcaagggaaatgggtggcggttgattgctaataattcccgttgatatttgtcatgcgtacgtgaacttgataacaaaatgcatgatgtcttctctttgcgtgatttcgagttgattgtcatcaccatggcactcgatcgtgctctttggcagtgttaacgtagtctgttatattatgctgactaatctttcccatcatggaggtataattgtgaccgtcgtggagtacatctaaggtgccgtttggttcacgaaaatgtaatgtaaataataatggtaacgattcacagtcgaataccggcgttaacaaatttgaataagacggtatccattttttttgaaaggaagcggcaaaagacttgcctcttcattgtattagattaagaagaataagataatccacaggaccgaagacacaccgaaaaaagagaaaaatacaaaaacacaaaaaa

SEQ ID NO: 83340 - DNA, 1343 bp, Zea Mays
tatatgtctatggtgtatgatcctacacctaaatggtggagttttaaaaaccctaaaaacatttagcaataaaatggttttcaaaaactataagcttgttgcacctgaacactccatggcactctagaactattttataaaaccattgtacttttctaaaactcaatatttgcatccaaacaagatctaagttttaggattagcaaggggatttatttgttgcctctagtttatggatggctagggagatctctagcatcaaaatagtcatgattggggaggccacatgttgggtagggatgttcgtggttagagaatgagcaactagcacgatgtaggccttttgttttatctttttctgacgagcttttttgagaatctggttgtggcatgtggaagaatctgagtatcatgggcattacacgcggaggaagatgaagggtccataggatctatgatctagaaagtggtagatttctactatcacgatggctcgaccgattaagtgttcacgttgattttggatggttttcaccaaagcaattctcacaaaaatgggttaaaaagctaagcgtttggcagtccacaacaatagcttttggtggctagaagttggaataaagctgaaacaaacatcatatagttgaagttgccatttccaaacatgatgtctagggcaagcattcttacaataacaaagaaaagagaggagaaaacatctaggcagaaaaatgggacaatgtgagtgatgccgagaatataagtagtggtggttatctttgaaagccttgttatgctagggtacaatatcactaaggtattgggaacatgggacacaagtcacacaactatagttagggttacaataccaaattgtacctaaaaggaacgcggacacctaagagggggggggggtgaattaggaattctatttttgcactctaaactaggtcaataaaagttctcttaaacaaaacctatgcaaataacttaacacgaatgtgcactatagttttgtctaagtgttgctatctccaccgcaaaagaaatttagcaacctaagttccaatcctaccaactaccccatattctaaactaggaatggtaaagatcacaacttaagtatgcaataaatacggaagcttaaagagaccgatagagatgcaaactctcattgacgcaccaatatttttacggatgtatctagaaccgtgcaaggttctaactaatcctcattggtgtccctacgcaatgggaagtccacgcgagggccaagcacccggtcaagtaactccatagagagccacatgacttctccatgtgtaagtggtgctctgcttccg

SEQ ID NO: 83341 - DNA, 1208 bp, Zea Mays
caggacacggtcgccacacgacgactcccacccgcagccaccgcacggccgtgttggcaccaaaccgcgtggtggtgttaggctcttcgcccagatcaaaatcgaatcgatcccccaacccgatcgcctcgtcgtcaaaaaatccccattcgttccccttctcgcctccacgagccttcacaaattgccctctcagctcttctcctaatctcactctagccctagccaaatcccagacccatcccagccctagcgacaccaaccagctcgccagcgaccatggggaacccggagaagctgatgaatcagatcttcgacctcaagttcacctccaagtcgctgcagcggcaggcgcgcaagtgcgagaaggaggagaaggagcagaagctcaaggtcaagaaggcgatcgagaagggcaacatggacggcgcccgcatctacgccgagaacgccatccgcaagcgcaccgagcacatgaactacctccgcctcgcctctcgcctcgacgccgtcgtggcccgcctcgacacgcaggccaagatgcaggtcatcggcaagtccatgcagtccatcgtcaagtcgctcgactcctcgctcgccaccgggaacctccagaagatgtccgagaccatggacaatttcgagcgccagttcgtcaacatggaggtccaggccgagttcatggagggcgccatggccggctccacctccctctccacgccggagaccgaggtcaacagcctcatgcagcaggtcgcggacgactacgggctcgaggtctccgtcggtctgccgcaggcagccgcccacgccatccctgccgccaaggataaggagaaagtcgacgaggatgacctttctcgccgcctcgccgagcttaaggcccgcggctgagaggttgtttcaggctttatcaggcttatgctgttgagccgcaatgacccattgtcctgtggactgctactcatgtttggtagattcgtaaatactactgttatatgcttgaaggcgtgtgttggcattgccatgtggggtttgtgtgactcgatggaaactttgctgtcttattgtactttaaaatccaataatttgcgcgattgcggacatctgtgattctgtgtttctgtctgggtcgcccacatctggtatgaacaatgttgaagctgatgcttggcatcagtttgccataccgttgattctgttgcctt

SEQ ID NO: 83342 - DNA, 951 bp, Zea Mays
caggacacggtcgccacacgacgactcccacccgcagccaccgcacggccgtgttggcaccaaaccgcgtggtggtgttaggctcttcgcccagatcaaaatcgaatcgatcccccaacccgatcgcctcgtcgtcaaaaaatccccattcgttccccttctcgcctccacgagccttcacaaattgccctctcagctcttctcctaatctcactctagccctagccaaatcccagacccatcccagccctagcgacaccaaccagctcgccagcgaccatggggaacccggagaagctgatgaatcagatcttcgacctcaagttcacctccaagtcgctgcagcggcaggcgcgcaagtgcgagaaggaggagaaggagcagaagctcaaggtcaagaaggcgatcgagaagggcaacatggacggcgcccgcatctacgccgagaacgccatccgcaagcgcaccgagcacatgaactacctccgcctcgcctctcgcctcgacgccgtcgtggcccgcctcgacacgcaggccaagatgcaggtcatcggcaagtccatgcagtccatcgtcaagtcgctcgactcctcgctcgccaccgggaacctccagaagatgtccgagaccatggacaatttcgagcgccagttcgtcaacatggaggtccaggccgagttcatggagggcgccatggccggctccacctccctctccacgccggagaccgaggtcaacagcctcatgcagcaggtcgcggacgactacgggctcgaggtctccgtcggtctgccgcaggcagccgcccacgccatccctgccgccaaggataaggagaaagtcgacgaggatgacctttctcgccgcctcgccgagcttaaggcccgcggctgagaggttgtttcaggctttatcaggcttgcagtgctataatgaaacctgataatgccg

SEQ ID NO: 83343 - DNA, 587 bp, Zea Mays
atgaggctgccatatgcttgcaagcttttgttaaagatgggagacgtgttgattccaagcctgcagtgtgggaacttatttgtgacgatatgcgtccgtgtttctcgtttttgggacttttctgatcctcaggatgatgcaaggctgctacactgtgatatggtgctgctcgatgaagagggaaatagcatacacgctacgatatacccacccttcatagagaaattcaggccactcataaaagaaggcagcgtgtacaacatgacatactttcgagttcgagcatcgaacaacttgtacaagccagttccaaatgatatcatgattaccttcacgaattggacaaagttagagcagatccattcgcgcgtcgaccataaagactactatacagatgccattgggatagttacttcagtctcgaatgtttcgccacatcgctccaaaggacaataagcttctagcttgaagaggaacatttccatatgcagtgcaagaggtgcttcggtcaatgtcgtgttgtggggtgcccaagccaccctattcccaggagagcgcatatacgaagatgggcagaattccccaca

SEQ ID NO: 83344 - DNA, 2451 bp, Zea Mays
atttccttaagaaggtttgtcttgatactacacaaatttgggagaaatgttggtccaaagaggggctgtcaggatttaatgtctgaattcaggtttcacccaactgaaagtccaagttcagtgtgcttactcagttttagatccttgttgtgactaatccatgtgggtatgagccatgactcctgtagcaatgttgaagatctttggttagtgagtagatttcttattatgaggttggcatggtcctgcacagagcttgcagtaaactgtcccaaaacattcactgtcaggttttggatttcagctaactgaaacaagaaaattccattggtttaggacaagttggggcattataactttctatcagtgtgttttataccctgtgttgctatagcaagttgttgagggatggttggagagcagtttttgttaatatggattctcctgtttttacttcaaatcgacagcaaattctgctccaagtcgagttgtcagtctggggaaatgctgaatttttttcagttagtaaaagccacaattcaggattttcaccccactttgaggcacaataattcgttatctgtaagctttcgaccttgagttgctgcagcaggttggtaaagctatgttttgggagcaagttttattaactgcggttggcctgttactttaggaaatagatagattgaagggggtcagcagggaaggttcagtcggctgctgctgcatttttgtctcaagtggctgatgtgtggttcggttctgggagcagagaaaaatcttcatatgtctgttgtgctccacgtgggtttagttggttatggtgctgagttcagttcaaatgactgaaactgggttcagtctttaggcgagtgaagcattcccacacctctgttgtgttcaccggtgccaattcgagctgcagttggtgtgggggtttgaaggggttaggagggaggaggtcgtcagttgataaacaatggattcataagtttagagtttggtgtcgaactctgaaaaaaatatcattcttgctgtactccacaggtttgtcaaggttgagatatgggtgagtattgcaaggagtggtctggaagtttccagcataaagatttactggagtttcacatggtaaatatctaggtcctcatagttatctctagtgaattccccctgcctacttgtttctgtccgagtgttgctcctccaacgtgccatggtattggcatgggcttaggccgcgtggtgtcatggttttgcagccgcgtgtctcagtccatgccacgccagtgtcatcacgtatgccacaccgataacagcaagtactcaaaacccttttccttgttccctcttattagtttgccccttcgtgtagtacagctcttagccgtctcatgatccccagaaaggctcgccgagcgtttcgtctatccttgttctcctattcgtgtagaagtcatgtgacaccgttcattttgtcggaggccgctgttcctcgtgttttccctaaacttgtgaccacactgacaacggacgtctcgcctccactgtggtcaggctaacacggccgaactgcatgaactctctgcggcgctgaccttcgccaggccatacgcctcatcttccatcgcaaggacccgacgtgcatccgcccctgctgcttattctgccacggcgccggtcctccacctcgctccttccgccgtcaggccctggtcgcgggtctcctccgctctgaatcttcaagccggctaccgacgctcgcctttgttttcgtgttgccggcacccagtcctcctctccacgtcagagtccttgtctcaccatcaagacgtcgtcgtcgcgccgtcagctcccagaaaaggaagttgaaattcaagaagtggttcctaaagaggagtctgctccagtgctgtagatccagtggtggaggcccatctaactgtagaaaggttttggatcttttctgcaacaaggcaagccctggtgcatttgtcacctcccttgtgtttacaaaattttatcacttatatgctgcatcaggtgataggagttgattgattaaacaattgatgcattaccatccttgaaagattgattaccataccttgtcacctgttttataaaagctagagatgcttagtcatgctgatagactaagaaaaatgtttttcatctatgactcatgtttttacaaaaagaaaatgggcttgggataatgaaggcatcaagacgttgataaattcattatccaggcatggcccctctgtcaggcgccaaaattttgaaatagtttaaaatgggaccagacgctgagcaggaaaggtcgcccgtctgtgtcgattaaggaccgtattgattgttggcctgatgatctaggaccttttaactggccacatacctcgtcatgggcaagcctgaacccggctattccatacgtgaaaagacaac

SEQ ID NO: 83345 - DNA, 2958 bp, Zea Mays
atccccctgaccttgcttataactaggagaaaagcttgcttgaagctgtggtgtcagacttttgggtttcagcactaggttcagtttattgaagctgaaattcattgtttttcatctaactttggagttctcctttgccttgcccatggtgtttcgagctgcatgccctatagcaaaatgttaggggatggattggtgaacaaatttccttaagaaggtttgtcttgatactacacaaatttgggagaaatgttggtccaaagaggggctgtcaggatttaatgtctgaattcaggtttcacccaactgaaagtccaagttcagtgtgcttactcagttttagatccttgttgtgactaatccatgtgggtatgagccatgactcctgtagcaatgttgaagatctttggttagtgagtagatttcttattatgaggttggcatggtcctgcacagagcttgcagtaaactgtcccaaaacattcactgtcaggttttggatttcagctaactgaaacaagaaaattccattggtttaggacaagttggggcattataactttctatcagtgtgttttataccctgtgttgctatagcaagttgttgagggatggttggagagcagtttttgttaatatggattctcctgtttttacttcaaatcgacagcaaattctgctccaagtcgagttgtcagtctggggaaatgctgaatttttttcagttagtaaaagccacaattcaggattttcaccccactttgaggcacaataattcgttatctgtaagctttcgaccttgagttgctgcagcaggttggtaaagctatgttttgggagcaagttttattaactgcggttggcctgttactttaggaaatagatagattgaagggggtcagcagggaaggttcagtcggctgctgctgcatttttgtctcaagtggctgatgtgtggttcggttctgggagcagagaaaaatcttcatatgtctgttgtgctccacgtgggtttagttggttatggtgctgagttcagttcaaatgactgaaactgggttcagtctttaggcgagtgaagcattcccacacctctgttgtgttcaccggtgccaattcgagctgcagttggtgtgggggtttgaaggggttaggagggaggaggtcgtcagttgataaacaatggattcataagtttagagtttggtgtcgaactctgaaaaaaatatcattcttgctgtactccacaggtttgtcaaggttgagatatgggtgagtattgcaaggagtggtctggaagtttccagcataaagatttactggagtttcacatggtaaatatctaggtcctcatagttatctctagtgaattccccctgcctacttgtttctgtccgagtgttgctcctccaacgtgccatggtattggcatgggcttaggccgcgtggtgtcatggttttgcagccgcgtgtctcagtccatgccacgccagtgtcatcacgtatgccacaccgataacagcaagtactcaaaacccttttccttgttccctcttattagtttgccccttcgtgtagtacagctcttagccgtctcatgatccccagaaaggctcgccgagcgtttcgtctatccttgttctcctattcgtgtagaagtcatgtgacaccgttcattttgtcggaggccgctgttcctcgtgttttccctaaacttgtgaccacactgacaacggacgtctcgcctccactgtggtcaggctaacacggccgaactgcatgaactctctgcggcgctgaccttcgccaggccatacgcctcatcttccatcgcaaggacccgacgtgcatccgcccctgctgcttattctgccacggcgccggtcctccacctcgctccttccgccgtcaggccctggtcgcgggtctcctccgctctgaatcttcaagccggctaccgacgctcgcctttgttttcgtgttgccggcacccagtcctcctctccacgtcagagtccttgtctcaccatcaagacgtcgtcgtcgcgccgtcgtacgttatctagctccttagcgcagcactgtcctccaactcgacatctttacgtgtgtggagcttgctggcgtcgttgggtaattgcaccttggtgattggcatggttgcgtgtgtgtttggattaatcgtagcatagttttatgtcccgggaaagattgttcgcgactgtttatagctggcttgtggttcacaccatcaacttgggctttgtgatgtgcgtgtgaatcgtagtggtgcgatcagtggatgaaaggaattagttggtgaagaaacaagtttacataaaagaccatggattttgagctcccagaaaaggaagttgaaattcaagaagtggttcctaaagaggagtctgctccagtgctgtagatccagtggtggaggcccatctaactgtagaaaggttttggatcttttctgcaacaaggcaagccctggtgcatttgtcacctcccttgtgtttacaaaattttatcacttatatgctgcatcaggtgataggagttgattgattaaacaattgatgcattaccatccttgaaagattgattaccataccttgtcacctgttttataaaagctagagatgcttagtcatgctgatagactaagaaaaatgtttttcatctatgactcatgtttttacaaaaagaaaatgggcttgggataatgaaggcatcaagacgttgataaattcattatccaggcatggcccctctgtcaggcgccaaaattttgaaatagtttaaaatgggaccagacgctgagcaggaaaggtcgcccgtctgtgtcgattaaggaccgtattgattgttggcctgatgatctaggaccttttaactggccacatacctcgtcatgggcaagcctgaacccggctattccatacgtgaaaagacaac

SEQ ID NO: 83346 - DNA, 1029 bp, Zea Mays
atggcgcccaagcgaaccaccttcagtgttgtcctcctgatcgccatcgccgtggccgtggcgtccatgctgtccgcgcatgccactcgcaccctgcggcaggaggacgtgaacctaccggtgcgtgtggcctcttcttcttcgccgacgacgtgcgtcaccttcttcgacgacgccccggcagaagagatggaggcggacggtcctagtcctgcggcgcccgggcctgacgatgcgtggaactacgatgatgataaaacacctataacgggaccattattattatagacagtcactcttttatcatatagttttgacagcgacgaacacggccgggtgtgtccagcatatatgaactggtgctgtatttgttatatgctgcgtcaaccatgtaagctagcgttcaaataaatgtcgagcacacgaccacacgtgatcattcaacatcaacaaaatgggggactctcagcattgtcaactgagccaagaaggaatccaccacccaaaatccctgccagagagcaccaaacaacaatgattcactgactactaattcacagcattttttcaataaaaacacaaggtttggtttttatgtgctcttcgtcacatgaactaatttgcacgcatatctaattctaagcatactccaaccaggctaattgcttcatgcttgtgcaccacttccacacatcccagacctttttagataatggaataattatcttagcatctgtatcacaagatgaacatagccaaacctagatgcaaggaaaatgatagcgcataatagattattaagcaaataaaatcgtcagcaaatacaagccactgtaacgctccaatttccaactgtatcgtttgtgtcaaaacggccagattaaacatacatgcccaaacatcgtccataccgcaatactgatattttcctcgctcaacatcattcgagacacgaaaacaaaatacagtaatactaataccatcaacgcaatgatgagctttttttagtaaaaaaaaagagggtttgag

SEQ ID NO: 83347 - DNA, 618 bp, Zea Mays
ataaaaaaaggtgagaactagaaggaaccgctgtgtcacacacacacacaccacacggcggccggagcggcggagccaccataaattggtgctctctccgtccgaagtgctctctgaaattccccccaaatatcccagccactgccgtcgtgcagtcaaagtgtcaaaccatgccggcagtagcgttcgcgtcggctcctgccatattcgcctccgcctccgcgcgtccctgccgcagcgcggctccgggcatcctttcctccgactccgggcggccccgccgcggcgcgcgtggcgccgtccagtgtgaggtcgcctcctcctcggcaccgtcggcggctggaccccaggccgcccggtgggcccagaggaccgtggtcatcccgccacagcgccgcgggtgccacctcatcaccaacaagatcgtaaatgagatagggaatgacctggccgacttcaagtgtggcatggcgcatctgttcttgcagcacacaagtgcgtcgttgactattaatgagaactacgactctgatgtccaggttgacactgaaacatttcttagtcgcattgttccagagggtccatctgctccatggaggcacaccatagaagtttcat

SEQ ID NO: 83348 - DNA, 3953 bp, Zea Mays
  misc_feature (1)..(1): n is a, c, g, or t
nttagtattggtgagaatatccagaaggaaagccaaatgcccatggatccaagtgcttttcaaataatagaatgtgccgaagctcctaatacaggagttgttagtagtaagtttgctctgaatgtagcatgcgatagtcccatggatttaaatttgacaaatgttgggacttcagataacatcctgtacacttcagagtttgctgtaccaggtcgaaccgaggatagaagcatgcaagttgattttcatgatgcgaaagctgctttacataagccaaatcttcccctggaagtagtggatacagatacccatgatctgcagtcatccagaaatactgagagcacaattctgccatcattcggtgatgatcctatgaaggattcctctggtgctctgaataatggtctagggaggagcacttcatctcaagtaaccgaactgacacatcttcatagatcccacccgcctgctgactacaatccattctccttgcattcccatgattcaccatctgtatctggtaacagtgagcattctgttccgacagctttgacacttggtaataatatctatttcagtagtgcagagagtgagggacagcctgaggaaaaccataacctattggatgtaaacttaggatttgatgtgacaacgacagaatttggtaatgttgtcaaaagaaaaggtgaatctggcaatgacttaatgaatgcaggcagtcagaattggttgactttaccacttactgtcagctgcttggataatgcttctgctgttagtaatgggaggataggtttagagcagattgtggatgaaggtgtccctgttatctgtcaggatcatgatattatgctggatattgaccagcggggcagtattgatgttttgtctggccaggatcacaacctcaaactatgtggtatcagtattcctcaagcagtccttttggcaacagaagagagaaataaggatgttgatgatgagatcgttcgcccaggtcgagacttagcttctcagatatctgttgattctgatcacacttaccatggaagtactgaggatcctgtgggcatgtcaagtacaacacctgattcggtatcctcctggattgaagccattgtaccagaagctaacaaggaacaccaatcatgcaaatcttctctacttcctatctgttcttcagaaaaggtatcagcaccaaaggaggatagcaagaaggcgttgtcagattcagtagtcaactctgtagtaaaatctcctcctcgaattaatattgcaagctccacagtattgaaggtacctactaaacaggtagctttgcctggttcattgctagagccccctcgcttaaaccagaatgcaaggaacaggacatggcgtcgtgacaatgcatcatcttctaattcgtcattgcatgtttcacagacttcaggattaccccctaaactgccattaaaaaagaacagcaaaagtcaaaactcttatatccgcaagggtaatgccctaattagaaatccagccaatggaaatcatcttcattcttcttctagtctagattctcaaaataagttgagtaagcctgttatgaggagaagcatgaactttgtcaggaatgtcgattcaaaagacgcagcacattctcatatttcagttgaaagacccaagaccccacctttgccacttcataccaaatccatcagttgtgctgtgaatgttttggagccattgtctcaaaatttgcagcaacaggtccttgaaactgaaaaggaagattccagtgggcaggttaactcaggtgctgacaatctaagcattattagtttgcacaagtctgaagcccttgatgctggtaaagcaatttatgttaggccaaagttaaatcaactagttgcacaggggcggcatcttggtgagtcgagtaacatttccttggataaagtgacgttgctgcagccttccgcaacatctgatctctatttcaagaaaaggaaaaatcagattattttgggtccctctacttctgatgccccgagttcaaaagatacatttcaggctgaaaatataaagtcaggtgagagtaaagttctaatgtcttcatcttccaacaacaatatcactgtggcaaaggacaggctgcacaaagctcttcagacaacaaatactgtcagaagtttctctcatgtatggacacttaatggacaaaatcctcgaaagaaatcttatgtgggagctagtcatatgaaggtcttacctcgtatacttccatggaaaagaaaaatattctgccagaactttagaggcagttattcttcgttgttgaatacaagctctataggaataatgagaaaattattgcaaacaaggaagagaagtactatttacactgtctctactgatggattctctcttcggaaatctggagtgttaagtataggcgggtcaagtttgaaatggtcaaggtccctcgagaaacattctcgaaaggttaatgaggaagctacacaggcagttgctgaagttgaaagaaagaaaagagaaaagagaaaacggcagtctctccgtagcaagggaaggaatgatcggtactctgcatcagttgctgccaatcaattaacaaacagaagcagagcatcttcagattcaagggtgtcatcaacttgcaatgaatatgtgcgtgttaacaaaggtaaccaactggtcagaaatccgaagaaagtaatccgcatgctagcaagtgagaaagttcgatggagtttgcacactgttagaacacgattggcaaagaagaggcaatattgtcaattcttcacccgcttcggcgagtgtaaaaaatctggtggcaagtgtccctacattcatgaccgagctaaagtggttatttgtactaaatttcttaaaggcttgtgttctagtactagctgcaaactaactcacaaggtcctgccagaaagaatgccagattgttcttactttctgcaagggctatgtaccaacacagcctgtccctataggcatgtgaaagtgaactcgaatgctcctgtctgtgaagattttttaaagggatattgtgctgatggtgatgagtgtcgtaaaaagcacagctatgtatgcctcgtctttgaggcaacaggagagtgcccacaaggatcaagatgcaagcttcatcacccgaagaagaaaagcaaatccaagagaagcaaagtagacaccgtccaaaacaacagttggggtcggtattttgagacaaacgttggccatggcagtggagcaagaatagtttatttggaggaagatgagagacagaaaccagagcaagtctctgctgatggaactggacttagggaatctcgaggtgcaggctgacaataatgacgcgataatcaagccacttcggatcatgagaacggcaagagtttgatgagttctttggttggatacagctgcagtgttcctgggtcagggtggtattttacgctatgtttgacgtggcatataggcgctgactggagtttctatttctcgaagactggttctgacgggggcaatcggtttttgcttggttgaaggtttgattttgttcatcttgtacatcttttattaggaaatatattaggaccatatggcagtggtagaggccatgagggttactggctgttaacccgtgttttttcaacattacccagagttgaatgtaacaaacagtgctttacaatatgaaatgaatgaaggtttgcatacaggaaatgaagctttcattttgtgtatattgcacatttgcaccgcacatcttttggttataaattcgttaattccttccgtaagatatatttttatgatgcaagcaaagaaacttgctccctgtggtaaaaaaaacaacataacgtgagtttttggaagccgtcattcaaaagcaaagaaacttttaggtttccaacctgaaaggtggttctgtg

SEQ ID NO: 83349 - DNA, 4368 bp, Zea Mays
  misc_feature (1)..(1): n is a, c, g, or t
nttagtattggtgagaatatccagaaggaaagccaaatgcccatggatccaagtgcttttcaaataatagaatgtgccgaagctcctaatacaggagttgttagtagtaagtttgctctgaatgtagcatgcgatagtcccatggatttaaatttgacaaatgttgggacttcagataacatcctgtacacttcagagtttgctgtaccaggtcgaaccgaggatagaagcatgcaagttgattttcatgatgcgaaagctgctttacataagccaaatcttcccctggaagtagtggatacagatacccatgatctgcagtcatccagaaatactgagagcacaattctgccatcattcggtgatgatcctatgaaggattcctctggtgctctgaataatggtctagggaggagcacttcatctcaagtaaccgaactgacacatcttcatagatcccacccgcctgctgactacaatccattctccttgcattcccatgattcaccatctgtatctggtaacagtgagcattctgttccgacagctttgacacttggtaataatatctatttcagtagtgcagagagtgagggacagcctgaggaaaaccataacctattggatgtaaacttaggatttgatgtgacaacgacagaatttggtaatgttgtcaaaagaaaaggtgaatctggcaatgacttaatgaatgcaggcagtcagaattggttgactttaccacttactgtcagctgcttggataatgcttctgctgttagtaatgggaggataggtttagagcagattgtggatgaaggtgtccctgttatctgtcaggatcatgatattatgctggatattgaccagcggggcagtattgatgttttgtctggccaggatcacaacctcaaactatgtggtatcagtattcctcaagcagtccttttggcaacagaagagagaaataaggatgttgatgatgagatcgttcgcccaggtcgagacttagcttctcagatatctgttgattctgatcacacttaccatggaagtactgaggatcctgtgggcatgtcaagtacaacacctgattcggtatcctcctggattgaagccattgtaccagaagctaacaaggaacaccaatcatgcaaatcttctctacttcctatctgttcttcagaaaaggtatcagcaccaaaggaggatagcaagaaggcgttgtcagattcagtagtcaactctgtagtaaaatctcctcctcgaattaatattgcaagctccacagtattgaaggtacctactaaacaggtagctttgcctggttcattgctagagccccctcgcttaaaccagaatgcaaggaacaggacatggcgtcgtgacaatgcatcatcttctaattcgtcattgcatgtttcacagacttcaggattaccccctaaactgccattaaaaaagaacagcaaaagtcaaaactcttatatccgcaagggtaatgccctaattagaaatccagccaatggaaatcatcttcattcttcttctagtctagattctcaaaataagttgagtaagcctgttatgaggagaagcatgaactttgtcaggaatgtcgattcaaaagacgcagcacattctcatatttcagttgaaagacccaagaccccacctttgccacttcataccaaatccatcagttgtgctgtgaatgttttggagccattgtctcaaaatttgcagcaacaggtccttgaaactgaaaaggaagattccagtgggcaggttaactcaggtgctgacaatctaagcattattagtttgcacaagtctgaagcccttgatgctggtaaagcaatttatgttaggccaaagttaaatcaactagttgcacaggggcggcatcttggtgagtcgagtaacatttccttggataaagtgacgttgctgcagccttccgcaacatctgatctctatttcaagaaaaggaaaaatcagattattttgggtccctctacttctgatgccccgagttcaaaagatacatttcaggctgaaaatataaagtcaggtgagagtaaagttctaatgtcttcatcttccaacaacaatatcactgtggcaaaggacaggctgcacaaagctcttcagacaacaaatactgtcagaagtttctctcatgtatggacacttaatggacaaaatcctcgaaagaaatcttatgtgggagctagtcatatgaaggtcttacctcgtatacttccatggaaaagaaaaatattctgccagaactttagaggcagttattcttcgttgttgaatacaagctctataggaataatgagaaaattattgcaaacaaggaagagaagtactatttacactgtctctactgatggattctctcttcggaaatctggagtgttaagtataggcgggtcaagtttgaaatggtcaaggtccctcgagaaacattctcgaaaggttaatgaggaagctacacaggcagttgctgaagttgaaagaaagaaaagagaaaagagaaaacggcagtctctccgtagcaagggaaggaatgatcggtactctgcatcagttgctgccaatcaattaacaaacagaagcagagcatcttcagattcaagggtgtcatcaacttgcaatgaatatgtgcgtgttaacaaaggtaaccaactggtcagaaatccgaagaaagtaatccgcatgctagcaagtgagaaagttcgatggagtttgcacactgttagaacacgattggcaaagaagaggcaatattgtcaattcttcacccgcttcggcgagtgtaaaaaatctggtggcaagtgtccctacattcatgaccgagctaaagtggttatttgtactaaatttcttaaaggcttgtgttctagtactagctgcaaactaactcacaaggtcctgccagaaagaatgccagattgttcttactttctgcaagggctatgtaccaacacagcctgtccctataggcatgtgaaagtgaactcgaatgctcctgtctgtgaagattttttaaagggatattgtgctgatggtgatgaggtatttatgatatcactagaattatatagatgtttactttttttctgcaccttgcatcgaagagtaggtaggcacatgaattcttatggagatggcatgaagcttgcttccattgggtttttagcgaacaatattttatatcagaattaatatatttaggttggagtcctttatttgtatatttgttccaacacgaaatgttctatgggacacgtagtgtcaacatatccacaccttctagttccttatatttttggatagtgttgattcttcatctgaaaaagcatgctgtctctgctttaaaacaatggtcgtattatcttttaaatttctgggaccttagatgaacctttacggttctgaatggatatcactaatcttttcatggacttgaaacaatctctgttacgagcagtgtcgtaaaaagcacagctatgtatgcctcgtctttgaggcaacaggagagtgcccacaaggatcaagatgcaagcttcatcacccgaagaagaaaagcaaatccaagagaagcaaagtagacaccgtccaaaacaacagttggggtcggtattttgagacaaacgttggccatggcagtggagcaagaatagtttatttggaggaagatgagagacagaaaccagagcaagtctctgctgatggaactggacttagggaatctcgaggtgcaggctgacaataatgacgcgataatcaagccacttcggatcatgagaacggcaagagtttgatgagttctttggttggatacagctgcagtgttcctgggtcagggtggtattttacgctatgtttgacgtggcatataggcgctgactggagtttctatttctcgaagactggttctgacgggggcaatcggtttttgcttggttgaaggtttgattttgttcatcttgtacatcttttattaggaaatatattaggaccatatggcagtggtagaggccatgagggttactggctgttaacccgtgttttttcaacattacccagagttgaatgtaacaaacagtgctttacaatatgaaatgaatgaaggtttgcatacaggaaatgaagctttcattttgtgtatattgcacatttgcaccgcacatcttttggttataaattcgttaattccttccgtaagatatatttttatgatgcaagcaaagaaacttgctccctgtggtaaaaaaaacaacataacgtgagtttttggaagccgtcattcaaaagcaaagaaacttttaggtttccaacctgaaaggtggttctgtg

SEQ ID NO: 83350 - DNA, 914 bp, Zea Mays
gagagagttgtactcactacctataggcgtatatcttttcatctgcccttgctcatcattctgctcactaccctccctcatggaggctgggcataaaaacccagcgcatgctagctaggttcccgtccagtttgtgccctaccttctctacatcttcatttcttctgcttcgccattatcactgttgtgttctatggccttctggatgccctgtgtctaagctctccagcatatggctaatctctcaacaggtagcagcaatatcaggtgatctgttcgatcaccatttgcaaaggagttccatgatatatacacccttccaattaaccctagcaatactcagaatctttcgaagctctctcttttttgtttcctcccggccctcactagccataccatgtggtttcttgatgcattcacttcgatctgatccatgaagggcgggatcgatccgatgatcgctacctggtatgtcatctcatgtcctatatgtgagcaaggcttagctgcaacgcgacgagagttccatccatgaatcatctgcatgcatgcgtgcatatgtgtttgatcaatggaaagagcgatattggtgaggttcaatccgatgttaggttttacaaaagctgtaaaatcagtatctgattgagccgcgccaatatctcttcctccaatttgccactcttccttggacgtccctagtaaagtatgattcatggcacgcatcaggtcagcatcactactccgtccatctatgtcgttgttggcagcatttttcatcactgcaactagctatttctgtagacaattaatttgaattgtgaactccgctctatacaatttctttggcaagttgttgattggtacttaatgaataattaagttgaaaccgaatagatagagataacacgatcaag

SEQ ID NO: 83351 - DNA, 596 bp, Zea Mays
gtcataccttagctgcaagaatacatttggggaaggcgggcgggcgcggtccgctgaaactgcatttaccgtcgccggcgtcggtgtcggcttccgccaccgccgcaagcgcgacgagctggaggaggccggcggccagtgtcgcgtgctcctctacacggccatagagatgatcaccgtgggcggcagcacctccccctcaccctgctcctccgcagctctatctatcatccatcagcgacagccgagggaatgggatgcagtgtggtgtcggcaaagctcactctctctgtctgctgtgctgctgccagctgggactgggagggaggagggaacagaagagagaatgaacaggtagagcggagaggacgacggtcggcgtgaccaaatttggagtgcggcaggggtctcgcatcgcactcgaacaccaccgatgctggaccggcacgggtctggtctggtctggcatgttccataccgtgtttgtgtctaggccatatattcggtgtacactgtcagcatgggtatgagtgacaccacctagaactggattcataaatgcggttcgatactttttttctatcgttggattctct

SEQ ID NO: 83352 - DNA, 561 bp, Zea Mays
cggcgccgcaggggtcgccgccgctggcggaccagccggcgaggcgcgccgggctgttccaggagctgtagaggttccccagggcggcaactgcgagaaccagagcacccgtgctcctctacacggccatagagatgatcaccgtgggcggcagcacctccccctcaccctgctcctccgcagctctatctatcatccatcagcgacagccgagggaatgggatgcagtgtggtgtcggcaaagctcactctctctgtctgctgtgctgctgccagctgggactgggagggaggagggaacagaagagagaatgaacaggtagagcggagaggacgacggtcggcgtgaccaaatttggagtgcggcaggggtctcgcatcgcactcgaacaccaccgatgctggaccggcacgggtctggtctggtctggcatgttccataccgtgtttgtgtctaggccatatattcggtgtacactgtcagcatgggtatgagtgacaccacctagaactggattcataaatgcggttcgatactttttttctatcgttggattctct

SEQ ID NO: 83353 - DNA, 1758 bp, Zea Mays
cgcccccgtccggcgtccgctgctccgctccgtttacccttttcccctccgatcgcggcggcagcttccgcgaaggccttcgctaaaaaaccgagctcgccacgccaggtatctcctatttttttctcctccgcctcgagttccgccacctccgagcctcccccgccgcgtcccagggaccgggagccccagtcccctagttcgctcgccttccgccggcgcaagagaagcccctatctcctcccatcctatgggcgccgtggcgtcgacggtggcggcgcgcttcgcgttcttcccgccgaccccgccgtcgtacggggtagagccaccgccgtcgccggccgcggctgcggcggacacggaggtggtggagctcagcggggtgccggtgtcacggggccgcggcgtggaggcgcgccggctgccaacgaagcgcggcaccgaggtggtgtccatgtacgtccgccagcccggggcgcgcctcacgctgctctactcccacggcaacgccgccgacctgggacagatgtacgagctcttcgtcgagctcagcgcccacctcaatgtcaacctcatgggttatgactattctgggtacgggcaatcatctgggaaggtataaattgagcttttttctacgaaaccaagtgaacaaaatacttatgctgatatagaagctgtgtataggtgtcttctagaaacatatggagcctctgaagaaaacatcattctatatggtcaatcagtggggagtggccctactttggatttagcatcccgtttgcctcatttacgagctgttgttctacatagcccaatttcatctggtttaagagtgatgtatcctgtaaagcatacatattggtttgacatatataagaacattgacaaaattcctctggtcaggtgtcctgtattagttatacatggtacagctgatgaggttgttgactgttctcatgggagggcactatgggaactatccaaagtgaaatacgagcctctgtggatcaagggagggaaccactgtaatttggaactgtacccagaatacattaagcacctgaaaaaatttgttactgccatagagaaatcacaaccagttaaagacgaatctccagagagttcaggtccttcagatcctagtgaaattggatccgaaagtgcagagaactcaaggagaagcaccgatatccgggacaaaccaagatcaagcattgatcatagacctagcattgatcgacgggagaaacctaggggaagtatagacaggagagataaaaacagaaagagtattgatcagcttgacaaaccacgggctagtgtggatcaacctgacagggcacgtaagagcattgatcgctttggggggatgatgaggtcagtcaaattgtgcaatattgattgtttcactgcagcttccgggagctgataatatcgggaggttagtacttcgtagtgtctcttagtcatctgtatgtattccattttttataatttattattcaattgggtgttttagtgtggctgtggaaaaggtgtattggtctgaatgagggcttgtatttgtttcccatgaattgtttgtttctggaaaggaaactcccatagtttccaaacaagatcattttttttcttgaagtctttcatttgttacctgatgaaatccgaagaaaatgcaaagcaacgagaagcattgtctttgcagaactgtaaatatgttgtactattccacctttttttcattctggacttgtt

SEQ ID NO: 83354 - DNA, 2548 bp, Zea Mays
acgagcaccacctcgccctcgccagattccaaagggagtgggccaggcaaagtcggctcttgcgtcgacatcgacggggagaaacagctgtgggcaggcgatgaactgtagcgcgtgacagtgaggggatttggttggatccaatgtttggtcggtctgcttgcatcacctggttgcagctctgcattttctggctataaagcgacggggcccttgcgctgggcgcggagactggagagggcgagagtcctcccatccacaagttcttagcttttgcgagattgagatccggctggggacagaccgacagaggaaggaggacagaaaaatggggattggagatggatcttcaaatgggaaccagcaaccggtgcataaggaaatacgagatgagaccacaccacttcttccagtcaaggtggaggaggacgaggggtttcatgagttcaatggagcttcattctctggggcagttttcaatctgtcgaccaccatagttggggctggaattatggctcttccagcaagtatcaagatgctgggcatcatcccggggattctgttgatcatccttgtggcactgctcacagaggcatccatcgacatgcttgtaaggtgcagccaccagggcaagattacatcatatgggtggctgatgggcgaggttttcgggcagtgggggagaattgcgctgcaggcctccgtcatcataaacaatgttggcgtgctaattgtttacatgattatcattggtactcttaaactcagcactctacatctaatcttatttttgaaaatttgagatgcacactaaaatgactcggtatgagtagttatcccagtatactttttattcattcagcccagtatactttttagtcctttttacctgagatcatgacacactctttttgagcatgcctctggagccccaaatcaatttttcctaaggatgttcatatacaatattttttttaaaaaaattcgttccatagctttagatatgggtttcttcagtatattactctctgttaattcaagaaacttacctatgacctttatgatgatagtttctctcctgttagagagagaaagagagaaatattcccgttgtgcaacaccttgtgccttaaactgaacaacctatgcaatggagaatgtactgaaattgatactggttcttgatactttgataggtgatgtattatctggaacaacatcaggcgatgttcatcatcgtggtatattggagggctggtttggagctcatttgtggaattctcgtgccattgttcttcttgccacagctcttttggtgttcgctccgttggtgagctttaagcgcttggattcattaagatacacatctgcgctatcagttgccctggcagtagtttttgtcgtaattactgctgggattgccatcatcaaactcttcaatggaactgtagcgatgcccaaactttttccagaattagatggtcttaattctatctggaatctttttacagctgtccctgttcttgttacggcctatatctgccactataacgcattgacaatgaacttgaagacagaacacagatcaagccgattgtgcgaacatcgctgttcctgtgctccagtgtttacattgccacaagtttctttgcttatctcctcttcggtgaaggcacactggacgacgtgctcgccaactttgacgcaaatcttggcattccattcagttcagtcttcgatgacatagtgcgagtgagctatgcagcacatgtcatgcttgtctttcccattgtcttctttgccctccggctcaacttggatgggttgctcttccccacgtcaaggcacatctctcgtgacaacaagagattcgccatcatcaccgtctctctcctcgcagtaatttatcttgctgccattctcataccaagcatctgggacgcgttccagtttactggtgccacagctgctgtcctgattggttttatatttcctgccatggtcatacttagggattcttacggaatcgcgagcaagcgcgacaagattctggctgtaaccatgatcgtgcttgctgtcctgtcaaattctgtcgccctatacagtgacgcgatgaacatcttccgtaagaaggaagtggcctgatctcagatttcaaaagtagtcagtgctggatgaagaatggtctcgcaatgcaagactcgatggtacgaaggaaaacgatgcgcttggattccgtgaaggaacgatttctttgtcagcacctcagaatttggccacttgaaagaatctgatgcttgaagtttcctggttctgtgtacacaagtcggctcaatgtcagaattgagccgcttgaaatatatttagttatattctatgcggagagtaggtcttggaaacagccttttccacaataatgtacagttattatgccaatttctgagttcagttaaattttgtgaaatatggacatgggcgtcttgtctcgattaaaattgagaatggtatgattgcacattacgtcgctaccatgtttgtttttgccttc

SEQ ID NO: 83355 - DNA, 465 bp, Zea Mays
tagtcagcacggaccagactatgactggaggacctcacctattgatcctcaggttgtgtatgcaagtggtggaaaaggtcatggaaggtacacaatatttgctaacgtcaacgactcgatccaggtgagagttcagtgtggaggttcgtcgagatctgctgctcgtagctcccgtcgctccaatcaagatctagtagaagtggagcaactgcaagaagaacaggcgacatcaggattacttgagacaataagctgcgcaacatgaatactatgctacacagattcaacaacaacaaacactcatacaagtaagttcaaaagataatagctttcgctttaagatatgtattgatttaaaacgctaatgtgaatgagttcaacaattttgtagcaactagcacaggcccaagggatacatgtcccggtgtccccaccaccaccaccaccacctcccgtacattatcc

SEQ ID NO: 83356 - DNA, 1420 bp, Zea Mays
gtgctacttggcgaacaaatttttttgcagccagacgacagcaatcgcaccccgaaattcgacaggataatcctgcatggagacgcaatcggacgcaaaaaggaaggttcgccgtcagcacgatgcatcatgcatgcctgaagctttagggctctctctctgtgtgtgcagtttaaagaaactcactcacctcgatctgtatctgtatatataaatacgtcgtcgtcgtcgtccccttccctcggtcccttcatcgatcgaagagtccctctttagatttagaggaggaagaggatacgacaacagctagcttccaaaccatctcctcgtcatttgcaactttaacttcggagggagagctaccctgcaacagctattagcttccattccaatcatgcagagagacgacatggcgacgttggtgtgccacacgctcggcgcagcagacttggcgagcttctacttcgtcacaccgcaccaccatcacggctcgctcgcccaggggccgtcgtcctgcccgggcaccgcggctggcggtggccacggcgccggcgcgagcatgctcgcgggcgagctggagcagcaggagcaggcggccgcaggcgccgcggcgcgcgacgagcggaaggcgaggcggcaggcgtcgaaccgcgagtcggcgcggcgcgcgcgcgcccggcggagggggcagctcgacgagctgtcgtcgcgcgtcgccgcgctccgcgccgcgaacgcgcggctggccgtggagctgagccgcgtgtcggccgcgcgcgcgcgggaggcgcgggagaacgcgcggctccgggccgaggcaggcgccctgcgggagaggctcgcggcagccgaggctgcggcggcggcggctggccacggccaggtgcgcgtcgtcccggaaggaaggcgccggcgatgaggaagcggcgatgtttcttgtttttcgagacgactagctaggcacgtgttcggcggctaagatgacgtatagtaattcctaagaaaataggacaagaagaggaaggccagattatatgtcgtaaatagtcgacgagctcattaattctgaacctccggatactccatccggcgatcgtccacaaagacaaaggtcaagatcatccgactgatggttttggaatctagctaatacgatcacgaggccctgttatacaactgaattgcttcatttgcgattagcataaccatggtaaagcatgacctgtagcctttagggctagtttgaagccacaaaatcgaaaagtattggaaggactaaaaatcaccttcttattcaagttcctctgatctctttcgattttgtgcctctcaaacgaaaactgatcaacaaattatgggcctggacatcattcgctaataggctcaaaagcgcccagtatatgcagaacaggatagtggc

SEQ ID NO: 83357 - DNA, 619 bp, Zea Mays
ggttatttcattgaccaaacaaaccttttccttacaggaagacagtcctgacttatttactaataaataaaaaaatcgatgaagtagaatcaatggatataggattgctgctgactcgtcttctaagcatggtgaagttgacatatcacattagcaatgaactatcagggcaatgatcatgattttgtacactactttggtgtatcatcgcctaataaagtatccacaaacccatgagccttttttctggttccagctgcagaccccaaagcagaacctgtagttctagcaaataagtctaaatggtcaccagagctggggcaacataggatttgacgcccattctatgttgctgaagtcgaagcacatgtgctcacaatcgaaaagcatggaacaagaagcaatgtaggctactggcagttttggtgactgcaacagccagcaatggtctaatgccatcaagggggtgtcaagcaaggcgttcatggtatttagtccttattgtttatgtggtcgtagattgctgtgggtaacactgatcgcttctatgccgctgcaagcaaacatcaacggtgtgtgaggaggttctgtcatgcctaccaaatttgtaagaaggctc

SEQ ID NO: 83358 - DNA, 905 bp, Zea Mays
agggaatacaatggcacccgatccaccctcaccacacaggtcggatgaggcggcgtcgcccctgcatgcggcggctggctagattgaaggcgctcgacgcccccagcccccaaatccccacccaaataattctacacgatgaagagaggatccaaacttcatggatgattccttacccatggttttgtcatgccggacttcattcacggcgaggagcggatccacggtggctaaatttctctggtgagcaattggtagtgctctggtggactacgtcgcccgagaaggccacgaccacatgtagcgcgccaccacgaactgtctcgagtacttcaccggcatcagtctcgtgcccagacaaggagtagctatggagacgatctcctctgcttcacccgtggcgggtcctgggttgggctcgacgggatggtatggctctggcgtaccgtattatatagccgtggaggaggacgccaatgcgtttgttgaagcgcggggccaaaatcctcggagcaccagtgttctcggcagctttgttcccagggatgcctcagccaaggagggcccaccagtcggcgagaaagcttgcgcgcgtaggctccgtgtggctggcgcgtgggaaagggaagctgggccgcgatactaggaattcggcccaaaacgcagtccgaagacggaaaagtgagaaagcgaaagcttcccagttcccatgacaagcctaaagtaaggatgcaaaaagattaaggtcatcaatagcatttgtgttgtcttagaaaatgtttccactatctatgtcaactcactagctaagcggcaaactctgtaatcctgcattttttgggccagtaaaataaatgccatcataccaaagcaatactcttttgtgtgtaccttcttgtttgctt

SEQ ID NO: 83359 - DNA, 465 bp, Zea Mays
gagtcatcccgtaaaaaggaaggtggaggaggagattgcaatgttctgccccatgatatgttgggaaattgtgaaaaatgacacagggtcatccaaaaaatcatactagaaaacacccaggcgacaataaacaccggatcatgaactctcggtatgtcaacatgataaggacggactgccctcgccatccaaaattatatccttatgcaacaagcagccctagaaaggagtatacaaagggggaaaagatacaaacaatgttttgcattcatttttcctgcatgcgcgaatagacacaaaattaaactccaacttacaattcatgctatttactatttaccacgcgtgcatgggcgcgcttactacactagtattctcaagcgatggtgcagatgtattttcttagtttggacatctccggtactctactccaagaacctcatagacaacccgaacaaatttatg

SEQ ID NO: 83360 - DNA, 2148 bp, Zea Mays
atggatgaccacaagattcaagaagccgatatcaatggattattcgtcccattccagtcgcatgtgctgttggctccaacgccgtcagactttgggcacggcagcgagggaggcctccagcttgtccgccgggtgcgagagatcgaccatgtctcccctcaggttgtattcaggggacatagtggctaaggctctgggcacgattgcagtgacttattggtcaacaggagatgcagattttagcttgccaaaacttggagtcagtaggacagtagctatgcaattttttttgactcctattgacggtcatcgtttttttaggattggtcaatgatgccaaactctgtcataatgtcctatagcttttgcgagtgaatttataaccacggatatttctctccaataatttgcgactgataccttgtcttcgatggggttgaagccggaacaatcggtccgtctcaaaatattaatcattttagtttttttatttttatatctatgtttaaatggatgataatgaatctagagagtaaaacaaatatattaattatcgtataaatcaactaaaaaggtaaaaacgaatttttattttaggatggatggagtattatctaaaaaaattacttcaaataaggatccaaacaagtctaaatgtagtcatcaaatcagacagaccagtgacggagcacaaatgaaaagcgaggtatggaaatgaaaagcaaggtatggcagtggagaactgtagatgccaggtaatgcaggcgtcgtcgtgtagggttgcggagctgcgcacgactttgaggtagggtggggcgcgaggcatgagcgctatgggtctaggctatagagcagtgtgagtgcagaactgtcgatggagacttgtggcgcgtctgtggcaaggatatgaagagtgagacatcggatgggaggtggggtgagttggacataaaggccttgagtgcaaggcactaaggcagtaaatcgacgagtgctcgcactagaagggcatgaagaggaggtcagcggacgacgccatggaagagtgaggagacgcgcttcatcgacagcttcgccttgccatctcactctcgaccttggtgttctctgtccactactgtctgagcctgaagcaccggttcctcacgatggaggatggagtaaggtatggcgagcatcatagctcggcataccgagcgctccgccactgataatgcccttccatagcccaactcagccatatactcacctttagctcccaaacatgtgtgagattcaacccggtccattttgaatataataattctcaaaaacatgtcggccagctttcaatgcctggcctagctacgacccaaccacttattcatgaagtatccaactatacccgatcaggaactaaaaaatggtcccctccgcgactttggtgtagcatttgaagccgtcatactccaacccagaggtgaaagaacctaaacatgcttctgaaaccgtaaaaaaaagaacttttatgcaatcatgggtgcatccatggttcctgaccttcgtgttatatccgatactccccaactatccgaagaaacagacaatactttgtttttcgaagaactagtactaaaatgttatagtcagactatcttcagtagcttatccatatctatatctatatctatatctatatttaaactttattctgcgaataatacaatctacagaataaaacggtattcagggtaaacttcagctgaaccgatgtagtcggcctcggagtcagatgcgttgaacagctagatatggtacactggttgctgggacgggtaatggtcaacaaccagcctccaaaaccaaaacgataacgtactatagtccctggagatctgcgctggcagaaagaaagctaaaaaaataaaaaattgcgagggcacaagcttctagttctagcctgccaagctcaacctgaccgagcggagaggttcttaatcctcctattcctatcttagcgacgacgacggacgacccatccaaagaactacgtggagagatttatgaggtcgacaagctataaggctataataactagctaggtaggtaggatcggagtcggagaaaacaagccaaggagtcggcggtggggatggcgaagcgggtgtg

SEQ ID NO: 83361 - DNA, 5959 bp, Zea Mays
atggatgaccacaagattcaagaagccgatatcaatggattattcgtcccattccagtcgcatgtgctgttggctccaacgccgtcagactttgggcacggcagcgagggaggcctccagcttgtccgccgggtgcgagagatcgaccatgtctcccctcaggtacttctcgtacgcggcgaggtcgaaatgtccgtgcccgcacatggccatcaggatgaccttctcctccccggtccgcttgcactccagcgcctccctgatcgccgcggcgattgcgtgcgtcggctccggcgccgggatgatgccctccgtcctggcgaattgcaaggcagcttggaagcattcagtctgctgtatagcaacggcatccatgaagcccagctcgtacacgtgcgagatcagaggtgccattccatggtaccgaagcccacctgcatggatcgggtcggggacgaagccgtggccgagggtgtgcatcttcatcagcggcgtgagcccggccgtgtcgccgaagtcgtacgcgtagacgcccttggtgagcgtggggcacgcggcgggctccacggccctgaacgcggggctcatcttgccgcgcagcttctcgcgcaagaacgggaacgcgagcccgccgaagttggacccgccgccggtgcagccgatgacgacgtcgggcgtctcgccgagcgccgccagctgctccaggcactcctccccgatgacggtctggtggagcaggacgtggttgagcacgctgcccaggcagtacttggtgtcggcgctggtggccgccacctccaccgcctcggagatggcaatcccgaggctgcccgggctggacgggtccgcctcaaggatcctcttgccggcctccgtcgccgtcgacggcgacgggtgcaccttggcgccccacgtctccatcatcagcctccggtacggcttctggtcgaacgacgcgcgcacctgccatacctcgcagttgaggccgaagaggctgctggcgaaggacagcgcgctgccccactggccggcgccggtctcggtgaccacgttcttcacccccgccgcggcgttgtaccacgcctgcggcacggcggtgttgggcttgtgcgaccccgccgggctggtcccctcgtacttgtagtagatcttcgccggcgtgccgagcagcttctccagcctcctggccctgatcaggggcgtcgggcgccagagcttgtacacgtcgatgacctcctcgggtatgtcgacgaaccgctcgtcggtgacctcctgtgtcaggcatccagtgacagatacaggctacgtctaaggacataaagacaattgggccgggacagagtgagcgagcccggacggcaattgtgaagctgagcggcccagagtggtcagcaatgtaattttgtgtcgtgagccagttgaacgagtatttagaggagatcgtccataggacaagggagatattcagactgtaaacagaactataccttcttcttcgtctctaacctctgcttcctctgttcctatgaatctcttgctatcttcctgaatccccagttcctgcttcctacctccaattcctgtctcggatctatctccactatctgccgctaacaattggtatcagattcgttcgatcctcgacttcaatttgcccacgccatgtcgctcgatttcaagctcatcctcgacgagctcaaccggcgattcgacgagctggaggttcgctgggaccggcgcttctcgccttctgcgtacctcgaccttccgcccacactgctcagcgtccaccaatcctccgacacatccgccagcatgccgcccaccccgactgcggctgttggggccgtcgtcatcgccgacaactggggcgggtgcttcgatgacggcaaggagtactatgcagcgccatctgtcgtcgccgacaactggggcgggctcttcgagggttgtgatgctgacggcgatatctcttcgaacctgcgcgactccgaccccgacgaggcgttcgtcacctcccactcggacaaggcgttgctcgacaaccaccacgccggtgagctcatcgccaccggcatcgaatatggctcatacaactccgtccatggtagcggcggcgctgcgctgtctcaactcgcgcacagcaacaccaacttcgccatgcccacaacctgttcgacttgggggctcaccgagcatgctatggccgaggccgtgcaccgtcgcgcgctatggctgccccgacgcgagccacttccgcgcctacttcgtgcgttcctaacgctcgagcggctcgacctctccgcatgcgcctcgctcgacgacgcctccctcgctgcgtccgtcggcgatggaccagcagccgcgacaacctggtggtggtgcgcttcggcttcggccacgggcgacatggagagcacgctcaaggggattcgcggcagcgacgcgccgttcgtgatggacctaaacgacgcagccaccgtggcgggcggcatcgaggacacttacggcgaggaccgcgccatcgaggagcagctcgccacgcccttggacacgctcctgtgcgcccgcctcgaccctgtcaagtcgcacatcgggtgcctgctgctgcagtacctcaagctttcgcctaccttgattggtgccaaggtcgcctttggcaggttcgacggacacttcttccacgacttcaccatcatcaagctgaagacggacagcagcagctcgcccctcgagtgttcgaccaaatgtctcagccacgatattggacatgattcacgaaattatgcacacaaattacagaatgcagtcactcatggaatcactgctgctggacatgatatcctacaggtgggattggcttcaacacctgcaatgttcaacattatacttatagaagatgagagaagtcatttacctgttgacgccatttgctctcctgatgaattgataaagacatcacgtctttgtgctttagaaatggttcattgccgtaaaccttggatgagatctcttggcaacacagataggcttggactattctctgaagctcgtgctgtgttaaatgcagcaagacagcaagcaatgaagattgcactaaacatgccacagcaccagacctgcatagatgtgatgggagaaggcatattatatggaggtcgacctggtgttttgaaggaagccattgtttgctcgattccgggtgtcatggtgtttacttggactgttaggaatttttctggagttactcatttatacagtcagcatgacagaggtgtggtgtggctaatcgttgctcctgattgctacttcattcaacacaatgagaggatgcacatgatattctatggcttcgatctactgagtttgcaacacttccatggacatttcattgaagctgatatgtttgctccttgggatggtcaggaattaacccagtttctattttctgaactaccaatatattggcagcagtcacatggtgaatttttctcagctagcataattagacaatttcagttcatatcacagctgattttattggcaattacaggcatgaacagtctattatttttcagaaagctcaagtattcatcatcagttgagatattttgtggtgcacagttttcatttcctaatattctattgcccaagtcttggtcacaggagttagccaccaacatagaaagacatttactatcagaaatgctagaagtggctaatggctataattttcatgagcttcatctgatgcttgcctctattggagtgacacaaatgatcagttgtggtaaatatttgatatggatcattggcttgctaactccatgggatccgggcagaatggtcttcgacctcaagttcgtgatgcttttggcttgagggcaagccaaatcttaagaggggggaatgtcaggcatccagtgacagatacaggctacgtctaaggacataaagacaattgggccgggacagagtgagcgagcccggacggcaattgtgaagctgagcggcccagagtggtcagcaatgtaattttgtgtcgtgagccagttgaacgagtatttagaggagatcgtccataggacaaaggggagatattcagactgtaaacagaactataccttctttcttcgtctctaacctctgcttcctctgttcctatgaatctcttgctatcttcctgaatccccagttcctgcttcctacctccaattcctgtctcggatctatctccactatctgccgctaacatcctgcctgatcagctcgtcggggaacagaggggagaggtcgctgggattcagaggctggtgtgtctgcgggtgcagcggtggcggtggcttcaccggcaggtcggcgatgaggttataccattgcttagggatgctcacactggcgcccgcattcgagctggccctagtggtgaatctcaagcttctcctgctggcagcaactcggtgcttcggtgtgcacagcagtgaagctctctgctcttgccctgttgctgttagaaacaatcttgccattagcatttgcatgtttaattctgtttttgtgtatgcatcggcaaatcaagaaatcgtgtgagctgctgttgactcggcatatacgcaagcgcgagaggccagtatgccgtgtgatacgtcagtgcgtgatatacacgataagtattagactaagtctggtcatagcatgcatttttgttagcctgagatgcgcgttgttcgcataaggccaagagcatgatctgcatgtccacggcgatgagcctggattgtgctggagttgcaggtgtggcggcagcattgtggcgtcagtattgctgtaatccctttccactgtttgcgtctggtttattaaccaagaggtgcgagaggcaatattccaaaaggaaaatgataaagcaccagaacttagatggttttcccccagaattttatcagatacttccctattttcaaatatatgtcgtccattagtttattttttaactaaaacgtgataaataaaaaaacggaggagaaggtattttagagtttaatcaaagatgacgatggctctttccggggggactttcatgttgggatgctacctcttcacagagtaaattttaggacaatgattctatactaaaaactattgaggcaaaccaaatacaacaattttaaaaaaaggacaaatggatcgtgacccgtctttaaatgaatatcctcttttgtacaatattgttcattgaaattaagcaacaatagccaatgttctaaatacggtgggaaacaaactactagaattgcagcacttagttgccacaattatgattttaaaattacagtaggtattggtaagcttatttggaatttaaagaaaaaatggacattactcggttaaatatatgtataagtttcttatcaacaacaacatccagacttcctaacaatgaaatttggagaacaaaaagtacctttaagaattagtttggaaacttaaatcccctccgggattttcggggattgagagaaaaactaaccccgaaggtactaccggaattcggctttttgccgagtgtctcgatctttgccgagtgcaatttatcagacactcgacaaaacttgcttcgtcgagtgccacactcagcacagaccccccatttgttgagagccaagcgctcgtcatagaatgactctcggcaaaggcttctttgccgatcgtcaagctctcgacgaaacaaggggtaaactgccgttagtagtcgtctatagttgacaaccgttagctatgcaacaaactaacttctttgccaagtgtcttttcctgagtcctgaaacattcggcaaagcagctgtgtctggtagcgagtggatttaaatttctaaactagctctaaagaataaaatatttatgtggtattttaaaactgttgtcctcacagtggataacctagcgagaaggaattgac

SEQ ID NO: 83362 - DNA, 728 bp, Zea Mays
ctgcgtgttagcgccacagaagggaatatcggagagaagagagatgttcaggtagaagaagggttgaagaaggagatagcagcgaggaagacgatctaatttgatatctgatagccaaattgttctagaaggtagagaaacaggatacatgagaggagagattatgaagagataacagtaatggaaaggtagagaggatttagtttgttcaaatggttctttcatatcccttggtctatacgttctccctttttataggcacacatgccacccacttgccatctatccagggtcctgacactgcgcttcattatttcgttacagttacagcagatgccttacgctattcgcagcccagcaacgtctgtgatctactgtcatcctatcttcaatgccctgaacgcactagttacaacaactgtatgcaagaaccaacctgcttttactgtacatgtgaagctacatgacctcaaacaataaattctttttcacgaccttgctgagtcattaactcaacgctcctcggggaaaaaatgcagccaccaagcttttggttgtggctcaggatataatagtcttccagatccagatcaaatgcttgaattatctttaaacagttttgctgggaaacgacagtcaacatgcagtctcctagggccatgtgactccctgtcttggggagcaagcaaacaaagaagaatcgtcaactttcaggtgctcatatgcaa

SEQ ID NO: 83363 - DNA, 2430 bp, Zea Mays
caccgttccgttccgttccgtccgcatttttctttcttcccatcccatctctctctccgcgctgtgtcaaggaaaaagaggggagcgaggagatatttatatatatatatatataatatcgctatatacgtgtacatataaaataacaataataattttcgctttcgctacggccctgctagctagctagctctgagtgctgcgcggcgcgatatatactttgggacaacgacgacgacgacgccgccgagaaaattcttggatttccagaaggccccgatcgatcgaccgaggcggcgaatcatccgtccactcgctggcctcaccacctccccgtgcgcagccgtcgtcgtcctctcctcccttatcgatcgggttccggttccggccgctcaactcttctagtcttcttccttcctttccttcctttctcccccgtcccgctctggcctcctgcgtcctgctgccctgtgattgaagcaggcaacggccggctgttgggacggtagataaatagtaaatcggttgatactactgctgctgctgctattaaccgctcgggctggccggggcccccctcctcctcctgttgcttcgattccatcacacatcagcttggtgcattcgtcttcctgcttcctccttgcttcgtctctcttcagttcagtctccccttggagcgaggatgccttgtgcagcctggtctgcagggcggggctgagtcgtcgtcgtcggtgcaaagacgactgagggaaatatatatatatgtcagctgctgctgtagctctggaggaacctgctgtacaaatggtgatggtgagcgtggcgagcccgaggagcccggcggtgcggtcggaggaggacctgggcccggcgtggctgcggccgctgctgggcacgagcttcttcgtgccgtgccggctgcacccggagctgagcaagaacgagtgcaacctcttctgcctcggctgctgcacgggcgacgccctctgcgcctactgcctgccggcgcaccgagaccaccacgtcgtccagatacgtcggtcgtcgtaccacaacgtgatccgggtgtcggaggtggggaagctgatcgacatctcccacgtgcagacgtacgtgatcaacagcgccaagatcgtgttcctcaacggccgcccgcaggccaggcccggcaagggcgtcaccaacacctgccagatctgctgccggagcctcccggactcctttccgcttctgctccctcggatgcaagctgggagggatgcagtgggacccgagcctgacgttcgccatacggccgaaacgcgggcagggatccggcgacgacggcggctccggctccgacgactcgttcagccccaagaagccacggaggatggccgggttcgacctcggccgcttcgagcggccgggcggcatccggtggtccgacgacgagggcagcaggtccaacaacgggctcatcacgccggggacaccgccgatcaaccggtgccggccgtccaggaggaagggcatcccccaccgcgccccgttctacggttagctcgctcgtctaagctcctccagcggttggagtgcaacacccagtcgtcgtcgtcgtcaacctttaaaataatacagtaaaactcttcagccagcacgagatgatgctgtgtgacactcatcaggtctgagcagtgaagtgatccaaaatctgctgctggtggtaggtcaccatatatagctaggtacatatgtttagagctatagcttgttacataatagatatatagttgtatacatgcatacatacactacacaaataatgtaggcgaaagatatatgtacatgccagtatattgacaagggttgtcagtatctgtatagacataatctcaaaaaaggagatagaaacgtaggtagggtttggatttcattattagcttggctagtagtagtagtggtcgagattgatatgtgaaaaggaacaagcatcatgtatttatctcagtttgtagtatttgcctgcttgcctccgccacccaatgcgtttattagcgttgtggtgcgaagctaagagtttttgttaatctcctccttaattaggagcttaatctgatgtaaacagagtgtatgtatgtatgtatatacacacacaagtatggcgtatgtatatgtttgtgtaccatcagaaattgaagaaagatatggggaagaaataccttgtgggggtgtatgtaaggctatatctagcattttagttatcatcatccccatatttaaactccactctatggacaatatagtttacagtacaaaataatgttttgagtgaccatatgagtgaactgttagaaacggtctaacttacgacctaaaaaaatgtttgtcaatttatatatgagtgataaggtgcaattttcttgagttgagctgtttttcttttgg

SEQ ID NO: 83364 - DNA, 3755 bp, Zea Mays
ggcggacaggcggcccacggccaagcctgggggaggacctccattgttgccgcattggcgtattgtgtctggttatcagactgagacgacagcgtgtgctttcatttatcaggctgacgcgaggcaccgagagtccgagaccgcgcgatggtggcgcaggcagacgcgggggagacgggtggcgtaggtgccgatggacgcggacgtcgtaacagggagagtgagcgtgggaaggagaggtggagtgtaccctgtgatgcgcgtgcggcggtgcgggtctcacgggggaggggttctaatttggggttggggcgaagatggggggatcttggttggttgcgcagtgtaccgcggcgtagaggcggaggcgcatcggacggatggacgctggagggctcggcttcctcgtcgcgggctcccggcgcgagttcgtcgtcctcaacgtcgacgatttctccaagcaaggatcttcacagggctgtccagactatatttgtcagatatgtggagatgacattgacatactccaggaagaaaatgagtatttcgtcgcatgtaatgattgtgcttttcctgtttgccgcacttgctatgagtacgagcgtcaggagggcacacaagtatgccctcggtgcaagacccggtacaaacgccacaaaggtagtcctcgagtccatggggatgaggaagaagaaggttctgatgacattgagagtgagtttgcttccagtatagctggacgatcaaatatagtgcatccataccgtgtctctgtggcagaaagctccatcaactcatgggacattgatagtgtcagtatcaccaacagtggagctagtgtccatttttatgaagagcatgttggaactccaacaaatcatcatgctcttgttgttcaccctaacaccggagaaattatgcgatataatcccttgcaaacaagaccaataaatcccaatagagacctagcattgtatggctatggatcagttgcctggaagaacagagttgagtggaaaacaaaacaacagaataaaatgcaaaaggtctcatctgatggtgaaggatctgatttaaatgattttgacagcgactgcgatattcccaggtgtgctgaaattatttgtgaaatttggttcgccttttcatggattttagaccaatttcccaagtggcacccaatacagagagaaacatacttagatcgattatcattaaggtacgagaaggaaggaaaaccaccagaacttgctcggatcgatgtatttgtcagtacagttgatccaatgaaggagcctcctttaattattgcaaacacagttttgtccatactggctgtggattatcctgttgataaagtttgctgctatgtgtcggatgatggtgctgcaatgcttacttttgaagcacttacagaaacatgtctatttgcacgaaaatgggttcccttctgtaagaaacacaaaatcgagcctcgggctcctgaatggtattttgctcagaaaattgactatctaagagaaaaggttcacccagagtttgttcgagaacgacgtgcaatgaagagagaatacgaagaatttaaggttcgcataaacacagtagttgctaattcatgcaaagttcccgagggaggatggtccctaccagaaggagctccatggcatggaaataatgttcgagaccatgccggaatggtccaggtcatcactggtaatgattgtgtcatggatgatgctggaaataagctgccttggttggtctatgtttcacgtgagaaaaggcctggacatgatcatcataaaaaagccggtgccttgaatgcattgctgcgaacttcagcaattctctccaacgcaccttttgtactgaatgtggattgtgaccactatatgaacaatagcaaagcgctacgggaggcaatgtgttttctgatggacccagtgttgggagagaagatttgttatgttcaatttccgcagagatttgatggcattgatcaacacgatagatattcaaaccacaatgttgtgttttttgatattaacatgaaaggtcttgatgggatccaaggaccaatatatgttgggactggttgtgttttcagaagacatgctttgtatggttatgatgccccaactgcaacaaaacctcctagcaagacatgtaactgctggccaaagtcatgctgcttgtgttgtggatcgaaaagaaaatgttccaaagctaagaaaaaacaagaacaccaaaagaaagtgaaatgcaggaatgcgtccaagcaagtgcatgctctcgaagtagctggaagagaaactgcacctcctgtgcctcgagaaaagtttgagaagagatttgggcagtcagatgcatttttggcttcaacattgcaagataatggtgaaggttgtcacttcgacatgctcaaaagccttgatgattgcatccatgtgctaagttgtgggtacgagaataagacacaatgggggaaagaggttggttggatttatggatctgtcactgaggatatcctcacgggcttcaagatgcactgccatggttggcgatctgtgtactgcatgcccaagagaccagcattcaaaggatctgcacctatcaatctcactgatcgtctccatcaagttctaagatgggcacttggctctgtggagatcttccttagcaagcactgcccaatatggtacgggtatcgatgtggtctgaaaccattggagaggttgtcatatatcaactgtgtcatctatccatggacatcaatcccgctgctaatctactgcgccctgccagcgttttgcctgttatcagggaagtttatggtgcctgagctaccagcatcctagagatgcagtggggaggagtcggaatcgacgattggtggagaaacgagcagttctgggtcattggcggtgtctcctcgcacctctttgcgctgtgccaggggctcctcaaggttctcggtggcgtgagtaccaagttcagggtgactctgaagggaggcggcacggacgagttctcagagctgtacgagttcaagtggacctggctactggtccctccgatgacactgctcctgctaaacgtcgtcgcggtcttggccggcgtgtccaaggcggtgacggacgggtacgaagcctggggcccgctgctcggcaagctgttcttctccttctgggtcgtcctccacctccacccgttcctcaagggcgtgatcggcaggcaggacagggtgccgaccgttgtcgttgtgctgtcaatgctactggcatccatactctctctgttgtgggtccgggtgagccccttcgccaccaagttcgatggacctgttctggaggtctgtggcttggattgtgagtgagggaggtaggagaagatacagcttctttgcttagggaataggttttgagttaccccagtgctagagtagtgagagggttctattctttcgttagctattcaacgttttctatctgattagcgtaggttttagtgaagcggtgttttatgtttatgagcaggagggaaatagagaatggagaagatggtagtgctgctgctgactgttgtagatattgagacaggcacaatagagaatagagtgacacttggtatggccataaatcgctactttttccactagagcgaatagcattctccgtgtacatctgttgagagaactgtgctttttcacttgcaccatttcaaacttcgaatgtggccgtgcttcttcgatcgaa

SEQ ID NO: 83365 - DNA, 3705 bp, Zea Mays
ggcggacaggcggcccacggccaagcctgggggaggacctccattgttgccgcattggcgtattgtgtctggttatcagactgagacgacagcgtgtgctttcatttatcaggctgacgcgaggcaccgagagtccgagaccgcgcgatggtggcgcaggcagacgcgggggagacgggtggcgtaggtgccgatggacgcggacgtcgtaacagggagagtgagcgtgggaaggagaggtggagtgtaccctgtgatgcgcgtgcggcggtgcgggtctcacgggggaggggttctaatttggggttggggcgaagatggggggatcttggttggttgcgcagtgtaccgcggcgtagaggcggaggcgcatcggacggatggacgctggagggctcggcttcctcgtcgcgggctcccggcgcgagttcgtcgtcctcaacgtcgacgatttctccaagcaaggatcttcacagggctgtccagactatatttgtcagatatgtggagatgacattgacatactccaggaagaaaatgagtatttcgtcgcatgtaatgattgtgcttttcctgtttgccgcacttgctatgagtacgagcgtcaggagggcacacaagtatgccctcggtgcaagacccggtacaaacgccacaaaggtagtcctcgagtccatggggatgaggaagaagaaggttctgatgacattgagagtgagtttgcttccagtatagctggacgatcaaatatagtgcatccataccgtgtctctgtggcagaaagctccatcaactcatgggacattgatagtgtcagtatcaccaacagtggagctagtgtccatttttatgaagagcatgttggaactccaacaaatcatcatgctcttgttgttcaccctaacaccggagaaattatgcgatataatcccttgcaaacaagaccaataaatcccaatagagacctagcattgtatggctatggatcagttgcctggaagaacagagttgagtggaaaacaaaacaacagaataaaatgcaaaaggtctcatctgatggtgaaggatctgatttaaatgattttgacagcgactgcgatattcccagaccaatttcccaagtggcacccaatacagagagaaacatacttagatcgattatcattaaggtacgagaaggaaggaaaaccaccagaacttgctcggatcgatgtatttgtcagtacagttgatccaatgaaggagcctcctttaattattgcaaacacagttttgtccatactggctgtggattatcctgttgataaagtttgctgctatgtgtcggatgatggtgctgcaatgcttacttttgaagcacttacagaaacatgtctatttgcacgaaaatgggttcccttctgtaagaaacacaaaatcgagcctcgggctcctgaatggtattttgctcagaaaattgactatctaagagaaaaggttcacccagagtttgttcgagaacgacgtgcaatgaagagagaatacgaagaatttaaggttcgcataaacacagtagttgctaattcatgcaaagttcccgagggaggatggtccctaccagaaggagctccatggcatggaaataatgttcgagaccatgccggaatggtccaggtcatcactggtaatgattgtgtcatggatgatgctggaaataagctgccttggttggtctatgtttcacgtgagaaaaggcctggacatgatcatcataaaaaagccggtgccttgaatgcattgctgcgaacttcagcaattctctccaacgcaccttttgtactgaatgtggattgtgaccactatatgaacaatagcaaagcgctacgggaggcaatgtgttttctgatggacccagtgttgggagagaagatttgttatgttcaatttccgcagagatttgatggcattgatcaacacgatagatattcaaaccacaatgttgtgttttttgatattaacatgaaaggtcttgatgggatccaaggaccaatatatgttgggactggttgtgttttcagaagacatgctttgtatggttatgatgccccaactgcaacaaaacctcctagcaagacatgtaactgctggccaaagtcatgctgcttgtgttgtggatcgaaaagaaaatgttccaaagctaagaaaaaacaagaacaccaaaagaaagtgaaatgcaggaatgcgtccaagcaagtgcatgctctcgaagtagctggaagagaaactgcacctcctgtgcctcgagaaaagtttgagaagagatttgggcagtcagatgcatttttggcttcaacattgcaagataatggtgaaggttgtcacttcgacatgctcaaaagccttgatgattgcatccatgtgctaagttgtgggtacgagaataagacacaatgggggaaagaggttggttggatttatggatctgtcactgaggatatcctcacgggcttcaagatgcactgccatggttggcgatctgtgtactgcatgcccaagagaccagcattcaaaggatctgcacctatcaatctcactgatcgtctccatcaagttctaagatgggcacttggctctgtggagatcttccttagcaagcactgcccaatatggtacgggtatcgatgtggtctgaaaccattggagaggttgtcatatatcaactgtgtcatctatccatggacatcaatcccgctgctaatctactgcgccctgccagcgttttgcctgttatcagggaagtttatggtgcctgagctaccagcatcctagagatgcagtggggaggagtcggaatcgacgattggtggagaaacgagcagttctgggtcattggcggtgtctcctcgcacctctttgcgctgtgccaggggctcctcaaggttctcggtggcgtgagtaccaagttcagggtgactctgaagggaggcggcacggacgagttctcagagctgtacgagttcaagtggacctggctactggtccctccgatgacactgctcctgctaaacgtcgtcgcggtcttggccggcgtgtccaaggcggtgacggacgggtacgaagcctggggcccgctgctcggcaagctgttcttctccttctgggtcgtcctccacctccacccgttcctcaagggcgtgatcggcaggcaggacagggtgccgaccgttgtcgttgtgctgtcaatgctactggcatccatactctctctgttgtgggtccgggtgagccccttcgccaccaagttcgatggacctgttctggaggtctgtggcttggattgtgagtgagggaggtaggagaagatacagcttctttgcttagggaataggttttgagttaccccagtgctagagtagtgagagggttctattctttcgttagctattcaacgttttctatctgattagcgtaggttttagtgaagcggtgttttatgtttatgagcaggagggaaatagagaatggagaagatggtagtgctgctgctgactgttgtagatattgagacaggcacaatagagaatagagtgacacttggtatggccataaatcgctactttttccactagagcgaatagcattctccgtgtacatctgttgagagaactgtgctttttcacttgcaccatttcaaacttcgaatgtggccgtgcttcttcgatcgaa

SEQ ID NO: 83366 - DNA, 3751 bp, Zea Mays
ggcggacaggcggcccacggccaagcctgggggaggacctccattgttgccgcattggcgtattgtgtctggttatcagactgagacgacagcgtgtgctttcatttatcaggctgacgcgaggcaccgagagtccgagaccgcgcgatggtggcgcaggcagacgcgggggagacgggtggcgtaggtgccgatggacgcggacgtcgtaacagggagagtgagcgtgggaaggagaggtggagtgtaccctgtgatgcgcgtgcggcggtgcgggtctcacgggggaggggttctaatttggggttggggcgaagatggggggatcttggttggttgcgcagtgtaccgcggcgtagaggcggaggcgcatcggacggatggacgctggagggctcggcttcctcgtcgcgggctcccggcgcgagttcgtcgtcctcaacgtcgacgatttctccaagcaaggatcttcacagggctgtccagactatatttgtcagatatgtggagatgacattgacatactccaggaagaaaatgagtatttcgtcgcatgtaatgattgtgcttttcctgtttgccgcacttgctatgagtacgagcgtcaggagggcacacaagtatgccctcggtgcaagacccggtacaaacgccacaaagtcctcgagtccatggggatgaggaagaagaaggttctgatgacattgagagtgagtttgcttccagtatagctggacgatcaaatatagtgcatccataccgtgtctctgtggcagaaagctccatcaactcatgggacattgatagtgtcagtatcaccaacagtggagctagtgtccatttttatgaagagcatgttggaactccaacaaatcatcatgctcttgttgttcaccctaacaccggagaaattatgcgatataatcccttgcaaacaagaccaataaatcccaatagagacctagcattgtatggctatggatcagttgcctggaagaacagagttgagtggaaaacaaaacaacagaataaaatgcaaaaggtctcatctgatggtgaaggatctgatttaaatgattttgacagcgactgcgatattcccaggtgtgctgaaattatttgtgaaatttggttcgccttttcatggattttagaccaatttcccaagtggcacccaatacagagagaaacatacttagatcgattatcattaaggtacgagaaggaaggaaaaccaccagaacttgctcggatcgatgtatttgtcagtacagttgatccaatgaaggagcctcctttaattattgcaaacacagttttgtccatactggctgtggattatcctgttgataaagtttgctgctatgtgtcggatgatggtgctgcaatgcttacttttgaagcacttacagaaacatgtctatttgcacgaaaatgggttcccttctgtaagaaacacaaaatcgagcctcgggctcctgaatggtattttgctcagaaaattgactatctaagagaaaaggttcacccagagtttgttcgagaacgacgtgcaatgaagagagaatacgaagaatttaaggttcgcataaacacagtagttgctaattcatgcaaagttcccgagggaggatggtccctaccagaaggagctccatggcatggaaataatgttcgagaccatgccggaatggtccaggtcatcactggtaatgattgtgtcatggatgatgctggaaataagctgccttggttggtctatgtttcacgtgagaaaaggcctggacatgatcatcataaaaaagccggtgccttgaatgcattgctgcgaacttcagcaattctctccaacgcaccttttgtactgaatgtggattgtgaccactatatgaacaatagcaaagcgctacgggaggcaatgtgttttctgatggacccagtgttgggagagaagatttgttatgttcaatttccgcagagatttgatggcattgatcaacacgatagatattcaaaccacaatgttgtgttttttgatattaacatgaaaggtcttgatgggatccaaggaccaatatatgttgggactggttgtgttttcagaagacatgctttgtatggttatgatgccccaactgcaacaaaacctcctagcaagacatgtaactgctggccaaagtcatgctgcttgtgttgtggatcgaaaagaaaatgttccaaagctaagaaaaaacaagaacaccaaaagaaagtgaaatgcaggaatgcgtccaagcaagtgcatgctctcgaagtagctggaagagaaactgcacctcctgtgcctcgagaaaagtttgagaagagatttgggcagtcagatgcatttttggcttcaacattgcaagataatggtgaaggttgtcacttcgacatgctcaaaagccttgatgattgcatccatgtgctaagttgtgggtacgagaataagacacaatgggggaaagaggttggttggatttatggatctgtcactgaggatatcctcacgggcttcaagatgcactgccatggttggcgatctgtgtactgcatgcccaagagaccagcattcaaaggatctgcacctatcaatctcactgatcgtctccatcaagttctaagatgggcacttggctctgtggagatcttccttagcaagcactgcccaatatggtacgggtatcgatgtggtctgaaaccattggagaggttgtcatatatcaactgtgtcatctatccatggacatcaatcccgctgctaatctactgcgccctgccagcgttttgcctgttatcagggaagtttatggtgcctgagctaccagcatcctagagatgcagtggggaggagtcggaatcgacgattggtggagaaacgagcagttctgggtcattggcggtgtctcctcgcacctctttgcgctgtgccaggggctcctcaaggttctcggtggcgtgagtaccaagttcagggtgactctgaagggaggcggcacggacgagttctcagagctgtacgagttcaagtggacctggctactggtccctccgatgacactgctcctgctaaacgtcgtcgcggtcttggccggcgtgtccaaggcggtgacggacgggtacgaagcctggggcccgctgctcggcaagctgttcttctccttctgggtcgtcctccacctccacccgttcctcaagggcgtgatcggcaggcaggacagggtgccgaccgttgtcgttgtgctgtcaatgctactggcatccatactctctctgttgtgggtccgggtgagccccttcgccaccaagttcgatggacctgttctggaggtctgtggcttggattgtgagtgagggaggtaggagaagatacagcttctttgcttagggaataggttttgagttaccccagtgctagagtagtgagagggttctattctttcgttagctattcaacgttttctatctgattagcgtaggttttagtgaagcggtgttttatgtttatgagcaggagggaaatagagaatggagaagatggtagtgctgctgctgactgttgtagatattgagacaggcacaatagagaatagagtgacacttggtatggccataaatcgctactttttccactagagcgaatagcattctccgtgtacatctgttgagagaactgtgctttttcacttgcaccatttcaaacttcgaatgtggccgtgcttcttcgatcgaa

SEQ ID NO: 83367 - DNA, 3411 bp, Zea Mays
ggcggacaggcggcccacggccaagcctgggggaggacctccattgttgccgcattggcgtattgtgtctggttatcagactgagacgacagcgtgtgctttcatttatcaggctgacgcgaggcaccgagagtccgagaccgcgcgatggtggcgcaggcagacgcgggggagacgggtggcgtaggtgccgatggacgcggacgtcgtaacagggagagtgagcgtgggaaggagaggtggagtgtaccctgtgatgcgcgtgcggcggtgcgggtctcacgggggaggggttctaatttggggttggggcgaagatggggggatcttggttggttgcgcagtgtaccgcggcgtagaggcggaggcgcatcggacggatggacgctggagggctcggcttcctcgtcgcgggctcccggcgcgagttcgtcgtcctcaacgtcgacgatttctccaagcaaggatcttcacagggctgtccagactatatttgtcagatatgtggagatgacattgacatactccaggaagaaaatgagtatttcgtcgcatgtaatgattgtgcttttcctgtttgccgcacttgctatgagtacgagcgtcaggagggcacacaagtatgccctcggtgcaagacccggtacaaacgccacaaaggtagtcctcgagtccatggggatgaggaagaagaaggttctgatgacattgagagtgagtttgcttccagtatagctggacgatcaaatatagtgcatccataccgtgtctctgtggcagaaagctccatcaactcatgggacattgatagtgtcagtatcaccaacagtggagctagtgtccatttttatgaagagcatgttggaactccaacaaatcatcatgctcttgttgttcaccctaacaccggagaaattatgcgatataatcccttgcaaacaagaccaataaatcccaatagagacctagcattgtatggctatggatcagttgcctggaagaacagagttgagtggaaaacaaaacaacagaataaaatgcaaaaggtctcatctgatggtgaaggatctgatttaaatgattttgacagcgactgcgatattcccagaccaatttcccaagtggcacccaatacagagagaaacatacttagatcgattatcattaagagagaatacgaagaatttaaggttcgcataaacacagtagttgctaattcatgcaaagttcccgagggaggatggtccctaccagaaggagctccatggcatggaaataatgttcgagaccatgccggaatggtccaggtcatcactggtaatgattgtgtcatggatgatgctggaaataagctgccttggttggtctatgtttcacgtgagaaaaggcctggacatgatcatcataaaaaagccggtgccttgaatgcattgctgcgaacttcagcaattctctccaacgcaccttttgtactgaatgtggattgtgaccactatatgaacaatagcaaagcgctacgggaggcaatgtgttttctgatggacccagtgttgggagagaagatttgttatgttcaatttccgcagagatttgatggcattgatcaacacgatagatattcaaaccacaatgttgtgttttttgatattaacatgaaaggtcttgatgggatccaaggaccaatatatgttgggactggttgtgttttcagaagacatgctttgtatggttatgatgccccaactgcaacaaaacctcctagcaagacatgtaactgctggccaaagtcatgctgcttgtgttgtggatcgaaaagaaaatgttccaaagctaagaaaaaacaagaacaccaaaagaaagtgaaatgcaggaatgcgtccaagcaagtgcatgctctcgaagtagctggaagagaaactgcacctcctgtgcctcgagaaaagtttgagaagagatttgggcagtcagatgcatttttggcttcaacattgcaagataatggtgaaggttgtcacttcgacatgctcaaaagccttgatgattgcatccatgtgctaagttgtgggtacgagaataagacacaatgggggaaagaggttggttggatttatggatctgtcactgaggatatcctcacgggcttcaagatgcactgccatggttggcgatctgtgtactgcatgcccaagagaccagcattcaaaggatctgcacctatcaatctcactgatcgtctccatcaagttctaagatgggcacttggctctgtggagatcttccttagcaagcactgcccaatatggtacgggtatcgatgtggtctgaaaccattggagaggttgtcatatatcaactgtgtcatctatccatggacatcaatcccgctgctaatctactgcgccctgccagcgttttgcctgttatcagggaagtttatggtgcctgagatgaatgtctattcgagcatattgttcatagctctatttgtctccatagcagctaccagcatcctagagatgcagtggggaggagtcggaatcgacgattggtggagaaacgagcagttctgggtcattggcggtgtctcctcgcacctctttgcgctgtgccaggggctcctcaaggttctcggtggcgtgagtaccaagttcagggtgactctgaagggaggcggcacggacgagttctcagagctgtacgagttcaagtggacctggctactggtccctccgatgacactgctcctgctaaacgtcgtcgcggtcttggccggcgtgtccaaggcggtgacggacgggtacgaagcctggggcccgctgctcggcaagctgttcttctccttctgggtcgtcctccacctccacccgttcctcaagggcgtgatcggcaggcaggacagggtgccgaccgttgtcgttgtgctgtcaatgctactggcatccatactctctctgttgtgggtccgggtgagccccttcgccaccaagttcgatggacctgttctggaggtctgtggcttggattgtgagtgagggaggtaggagaagatacagcttctttgcttagggaataggttttgagttaccccagtgctagagtagtgagagggttctattctttcgttagctattcaacgttttctatctgattagcgtaggttttagtgaagcggtgttttatgtttatgagcaggagggaaatagagaatggagaagatggtagtgctgctgctgactgttgtagatattgagacaggcacaatagagaatagagtgacacttggtatggccataaatcgctactttttccactagagcgaatagcattctccgtgtacatctgttgagagaactgtgctttttcacttgcaccatttcaaacttcgaatgtggccgtgcttcttcgatcgaa

SEQ ID NO: 83368 - DNA, 3758 bp, Zea Mays
ggcggacaggcggcccacggccaagcctgggggaggacctccattgttgccgcattggcgtattgtgtctggttatcagactgagacgacagcgtgtgctttcatttatcaggctgacgcgaggcaccgagagtccgagaccgcgcgatggtggcgcaggcagacgcgggggagacgggtggcgtaggtgccgatggacgcggacgtcgtaacagggagagtgagcgtgggaaggagaggtggagtgtaccctgtgatgcgcgtgcggcggtgcgggtctcacgggggaggggttctaatttggggttggggcgaagatggggggatcttggttggttgcgcagtgtaccgcggcgtagaggcggaggcgcatcggacggatggacgctggagggctcggcttcctcgtcgcgggctcccggcgcgagttcgtcgtcctcaacgtcgacgatttctccaagcaaggatcttcacagggctgtccagactatatttgtcagatatgtggagatgacattgacatactccaggaagaaaatgagtatttcgtcgcatgtaatgattgtgcttttcctgtttgccgcacttgctatgagtacgagcgtcaggagggcacacaagtatgccctcggtgcaagacccggtacaaacgccacaaaggtagtcctcgagtccatggggatgaggaagaagaaggttctgatgacattgagagtgagtttgcttccagtatagctggacgatcaaatatagtgcatccataccgtgtctctgtggcagaaagctccatcaactcatgggacattgatagtgtcagtatcaccaacagtggagctagtgtccatttttatgaagagcatgttggaactccaacaaatcatcatgctcttgttgttcaccctaacaccggagaaattatgcgatataatcccttgcaaacaagaccaataaatcccaatagagacctagcattgtatggctatggatcagttgcctggaagaacagagttgagtggaaaacaaaacaacagaataaaatgcaaaaggtctcatctgatggtgaaggatctgatttaaatgattttgacagcgactgcgatattcccaggtgtgctgaaattatttgtgaaatttggttcgccttttcatggattttagaccaatttcccaagtggcacccaatacagagagaaacatacttagatcgattatcattaaggtacgagaaggaaggaaaaccaccagaacttgctcggatcgatgtatttgtcagtacagttgatccaatgaaggagcctcctttaattattgcaaacacagttttgtccatactggctgtggattatcctgttgataaagtttgctgctatgtgtcggatgatggtgctgcaatgcttacttttgaagcacttacagaaacatgtctatttgcacgaaaatgggttcccttctgtaagaaacacaaaatcgagcctcgggctcctgaatggtattttgctcagaaaattgactatctaagagaaaaggttcacccagagtttgttcgagaacgacgtgcaatgaagagagaatacgaagaatttaaggttcgcataaacacagtagttgctaattcatgcaaagttcccgagggaggatggtccctaccagaaggagctccatggcatggaaataatgttcgagaccatgccggaatggtccaggtcatcactggtaatgattgtgtcatggatgatgctggaaataagctgccttggttggtctatgtttcacgtgagaaaaggcctggacatgatcatcataaaaaagccggtgccttgaatgcattgctgcgaacttcagcaattctctccaacgcaccttttgtactgaatgtggattgtgaccactatatgaacaatagcaaagcgctacgggaggcaatgtgttttctgatggacccagtgttgggagagaagatttgttatgttcaatttccgcagagatttgatggcattgatcaacacgatagatattcaaaccacaatgttgtgttttttgatattaacatgaaaggtcttgatgggatccaaggaccaatatatgttgggactggttgtgttttcagaagacatgctttgtatggttatgatgccccaactgcaacaaaacctcctagcaagacatgtaactgctggccaaagtcatgctgcttgtgttgtggatcgaaaagaaaatgttccaaagctaagaaaaaacaagaacaccaaaagaaagtgaaatgcaggaatgcgtccaagcaagtgcatgctctcgaagtagctggaagagaaactgcacctcctgtgcctcgagaaaagtttgagaagagatttgggcagtcagatgcatttttggcttcaacattgcaagataatggtgaaggttgtcacttcgacatgctcaaaagccttgatgattgcatccatgtgctaagttgtgggtacgagaataagacacaatgggggaaagaggttggttggatttatggatctgtcactgaggatatcctcacgggcttcaagatgcactgccatggttggcgatctgtgtactgcatgcccaagagaccagcattcaaaggatctgcacctatcaatctcactgatcgtctccatcaagttctaagatgggcacttggctctgtggagatcttccttagcaagcactgcccaatatggtacgggtatcgatgtggtctgaaaccattggagaggttgtcatatatcaactgtgtcatctatccatggacatcaatcccgctgctaatctactgcgccctgccagcgttttgcctgttatcagggaagtttatggtgcctgagcagctaccagcatcctagagatgcagtggggaggagtcggaatcgacgattggtggagaaacgagcagttctgggtcattggcggtgtctcctcgcacctctttgcgctgtgccaggggctcctcaaggttctcggtggcgtgagtaccaagttcagggtgactctgaagggaggcggcacggacgagttctcagagctgtacgagttcaagtggacctggctactggtccctccgatgacactgctcctgctaaacgtcgtcgcggtcttggccggcgtgtccaaggcggtgacggacgggtacgaagcctggggcccgctgctcggcaagctgttcttctccttctgggtcgtcctccacctccacccgttcctcaagggcgtgatcggcaggcaggacagggtgccgaccgttgtcgttgtgctgtcaatgctactggcatccatactctctctgttgtgggtccgggtgagccccttcgccaccaagttcgatggacctgttctggaggtctgtggcttggattgtgagtgagggaggtaggagaagatacagcttctttgcttagggaataggttttgagttaccccagtgctagagtagtgagagggttctattctttcgttagctattcaacgttttctatctgattagcgtaggttttagtgaagcggtgttttatgtttatgagcaggagggaaatagagaatggagaagatggtagtgctgctgctgactgttgtagatattgagacaggcacaatagagaatagagtgacacttggtatggccataaatcgctactttttccactagagcgaatagcattctccgtgtacatctgttgagagaactgtgctttttcacttgcaccatttcaaacttcgaatgtggccgtgcttcttcgatcgaa

SEQ ID NO: 83369 - DNA, 3807 bp, Zea Mays
ggcggacaggcggcccacggccaagcctgggggaggacctccattgttgccgcattggcgtattgtgtctggttatcagactgagacgacagcgtgtgctttcatttatcaggctgacgcgaggcaccgagagtccgagaccgcgcgatggtggcgcaggcagacgcgggggagacgggtggcgtaggtgccgatggacgcggacgtcgtaacagggagagtgagcgtgggaaggagaggtggagtgtaccctgtgatgcgcgtgcggcggtgcgggtctcacgggggaggggttctaatttggggttggggcgaagatggggggatcttggttggttgcgcagtgtaccgcggcgtagaggcggaggcgcatcggacggatggacgctggagggctcggcttcctcgtcgcgggctcccggcgcgagttcgtcgtcctcaacgtcgacgatttctccaagcaaggatcttcacagggctgtccagactatatttgtcagatatgtggagatgacattgacatactccaggaagaaaatgagtatttcgtcgcatgtaatgattgtgcttttcctgtttgccgcacttgctatgagtacgagcgtcaggagggcacacaagtatgccctcggtgcaagacccggtacaaacgccacaaaggtagtcctcgagtccatggggatgaggaagaagaaggttctgatgacattgagagtgagtttgcttccagtatagctggacgatcaaatatagtgcatccataccgtgtctctgtggcagaaagctccatcaactcatgggacattgatagtgtcagtatcaccaacagtggagctagtgtccatttttatgaagagcatgttggaactccaacaaatcatcatgctcttgttgttcaccctaacaccggagaaattatgcgatataatcccttgcaaacaagaccaataaatcccaatagagacctagcattgtatggctatggatcagttgcctggaagaacagagttgagtggaaaacaaaacaacagaataaaatgcaaaaggtctcatctgatggtgaaggatctgatttaaatgattttgacagcgactgcgatattcccaggtgtgctgaaattatttgtgaaatttggttcgccttttcatggattttagaccaatttcccaagtggcacccaatacagagagaaacatacttagatcgattatcattaaggtacgagaaggaaggaaaaccaccagaacttgctcggatcgatgtatttgtcagtacagttgatccaatgaaggagcctcctttaattattgcaaacacagttttgtccatactggctgtggattatcctgttgataaagtttgctgctatgtgtcggatgatggtgctgcaatgcttacttttgaagcacttacagaaacatgtctatttgcacgaaaatgggttcccttctgtaagaaacacaaaatcgagcctcgggctcctgaatggtattttgctcagaaaattgactatctaagagaaaaggttcacccagagtttgttcgagaacgacgtgcaatgaagagagaatacgaagaatttaaggttcgcataaacacagtagttgctaattcatgcaaagttcccgagggaggatggtccctaccagaaggagctccatggcatggaaataatgttcgagaccatgccggaatggtccaggtcatcactggtaatgattgtgtcatggatgatgctggaaataagctgccttggttggtctatgtttcacgtgagaaaaggcctggacatgatcatcataaaaaagccggtgccttgaatgcattgctgcgaacttcagcaattctctccaacgcaccttttgtactgaatgtggattgtgaccactatatgaacaatagcaaagcgctacgggaggcaatgtgttttctgatggacccagtgttgggagagaagatttgttatgttcaatttccgcagagatttgatggcattgatcaacacgatagatattcaaaccacaatgttgtgttttttgatattaacatgaaaggtcttgatgggatccaaggaccaatatatgttgggactggttgtgttttcagaagacatgctttgtatggttatgatgccccaactgcaacaaaacctcctagcaagacatgtaactgctggccaaagtcatgctgcttgtgttgtggatcgaaaagaaaatgttccaaagctaagaaaaaacaagaacaccaaaagaaagtgaaatgcaggaatgcgtccaagcaagtgcatgctctcgaagtagctggaagagaaactgcacctcctgtgcctcgagaaaagtttgagaagagatttgggcagtcagatgcatttttggcttcaacattgcaagataatggtgaaggttgtcacttcgacatgctcaaaagccttgatgattgcatccatgtgctaagttgtgggtacgagaataagacacaatgggggaaagaggttggttggatttatggatctgtcactgaggatatcctcacgggcttcaagatgcactgccatggttggcgatctgtgtactgcatgcccaagagaccagcattcaaaggatctgcacctatcaatctcactgatcgtctccatcaagttctaagatgggcacttggctctgtggagatcttccttagcaagcactgcccaatatggtacgggtatcgatgtggtctgaaaccattggagaggttgtcatatatcaactgtgtcatctatccatggacatcaatcccgctgctaatctactgcgccctgccagcgttttgcctgttatcagggaagtttatggtgcctgagatgaatgtctattcgagcatattgttcatagctctatttgtctccatagcagctaccagcatcctagagatgcagtggggaggagtcggaatcgacgattggtggagaaacgagcagttctgggtcattggcggtgtctcctcgcacctctttgcgctgtgccaggggctcctcaaggttctcggtggcgtgagtaccaagttcagggtgactctgaagggaggcggcacggacgagttctcagagctgtacgagttcaagtggacctggctactggtccctccgatgacactgctcctgctaaacgtcgtcgcggtcttggccggcgtgtccaaggcggtgacggacgggtacgaagcctggggcccgctgctcggcaagctgttcttctccttctgggtcgtcctccacctccacccgttcctcaagggcgtgatcggcaggcaggacagggtgccgaccgttgtcgttgtgctgtcaatgctactggcatccatactctctctgttgtgggtccgggtgagccccttcgccaccaagttcgatggacctgttctggaggtctgtggcttggattgtgagtgagggaggtaggagaagatacagcttctttgcttagggaataggttttgagttaccccagtgctagagtagtgagagggttctattctttcgttagctattcaacgttttctatctgattagcgtaggttttagtgaagcggtgttttatgtttatgagcaggagggaaatagagaatggagaagatggtagtgctgctgctgactgttgtagatattgagacaggcacaatagagaatagagtgacacttggtatggccataaatcgctactttttccactagagcgaatagcattctccgtgtacatctgttgagagaactgtgctttttcacttgcaccatttcaaacttcgaatgtggccgtgcttcttcgatcgaa

SEQ ID NO: 83370 - DNA, 1345 bp, Zea Mays
tgctgcagctggggcctggcggggctcgcggatgatgggaggtgggagtgggatgggacaggaggatttcataccaagcttcttagttttttttgcctgtgacatccatggaaaggagacgacgatccgattcgactgatgaggtatgatgtcagtcttctgaggctaatgtctgtgccatgccaactaaccagtatgctcttaccgctatgccagaaatttctaagctacatcttagacagcatttggctaaaggttttatcttagatagcatttggatgataaaggtttaagtttatgtgcgtaggggaatgtaagctagaaaaagaaaagtgagagtcaagaaaatcgcgttgacagatcttgccttcctcgttccctcatccacgcacaaactcatttccatgttctttcatttccattctctgttctgtcttttccattctcccctcccgcaaagcttattctcattctcacgtctagctaaaatttaaaaacacaaatgactccaagggaattcgaatgcgacctcccaggcaattgcgagcagtagctaccgctacaccacatgtgtgtctatgtatacatctatgacaggaaaaacatctactacatctcctcaagcttacctgttacccttgcacaatgcgtaatagtagataagtatcaccgagattcttgaattatatatttaaagaagagccttggatgcaatttcttttgtttgaataatgttttcaacttaaattccttttttgaatgcgtggcatttattttccataatatttttttccatggatctgacttgtgagtcattttcataagcaagcgcgtatgatggtttgtgcctgatgactgacgatgtacgagggaacttcttccggcaaggtgtggggcgtgctttccaatgatgagaccatgtaaatcatggcatatatcgaagtctgcatgatactgattgttgcaatgtagtggtgaaacaactagattaaaataataaaatttatgtatgaccaggatcacaaatggattatgaaacattttctcataacagtataacacacattttgtatataagctaccgtgttattatatgtccccgttgcaacgcacgagcactcacctagtggaatatgatttgaactggtgttaaatatatttgaggaattatcgagtttaaaaatcaatttcttcaagagtaagcttttctgttatggtaaagctgagaataattatgtccaagaatatgcacaccatttttagttgcccttgctccagagagagcactccttttaaatgtctagatattcctatgtactttcccgtcacaaaatatagtttattt

SEQ ID NO: 83371 - DNA, 687 bp, Zea Mays
gggcggaggcgacgccatagccgctgctgcagctggggcctggcggggctcgcggatgatgggaggtgggagtgggatgggacaggaggatttcataccaagcttcttagttttttttgcctgtgacatccatggaaaggagacgacgatccgattcgactgatgagcaagcgcgtatgatggtttgtgcctgatgactgacgatgtacgagggaacttcttccggcaaggtgtggggcgtgctttccaatgatgagaccatgtaaatcatggcatatatcgaagtctgcatgatactgattgttgcaatgtagtggtgaaacaactagattaaaataataaaatttatgtatgaccaggatcacaaatggattatgaaacattttctcataacagtataacacacattttgtatataagctaccgtgttattatatgtccccgttgcaacgcacgagcactcacctagtggaatatgatttgaactggtgttaaatatatttgaggaattatcgagtttaaaaatcaatttcttcaagagtaagcttttctgttatggtaaagctgagaataattatgtccaagaatatgcacaccatttttagttgcccttgctccagagagagcactccttttaaatgtctagatattcctatgtactttcccgtcacaaaatatagtttattt

SEQ ID NO: 83372 - DNA, 1232 bp, Zea Mays
gctatatctgttcaggaatcaggacgtcgctagcaacaagttgtcaactacccaaatctgcacgaggtcaataggagtatctcaaatcggctaacaagtaataatcctctcgatacccgaatcggtgaaggaaaacaagacgagtccgtcggtcgtgatcggtaccaatggaaggcgcagcggggatcaggacgaggccggcggtgtgcgtgaccggcgcgggcggcttcgtggcctcgtggctcgtcgagcgcctcctcgccggcggccgatacatggtccatggcaccgtccgtgatccgggtagagctgctcgctccggccgtgacgggcaccaagaacgtcctgaaggcgtgctcggaggccaaggtgaagagggtcgtcgtggtgtcgtcggtggccgccgtgatggtgaaccctggctggccccagaacgaggccatggacgaggcttgttggtccgacgtcgaattctgcagaaccactcaggtcagaactggtactgtctctccaagacactcgcggagctggaagcgcttgattacgcaaagaggagtggactagacgtggtgtccgtctgcccgtcgctggtgatcgggcccttgctgcagtcgacggtgaacgcaagcagctccgtcatagtcgattgcttgaaaggagatcgtgaggtgaagctgaagctgaggaacttcgtggacgtccgcgacgtcgccgacgctctgctcctggtgtacgagactccggaggcgtctggacggtacatctgcgacgcaaatgcaaggcagatgtctgaggtcgtagcgctgctcaaggactggtaccctgcctacagtcatgctgccaccaagttcgtgcaggtgagcgatgagcctttgttcagctccaagaagctgcaggcgctgggctggaaattccggactctggaggagagcctcagggacagcgttgaatccttcaaggcggcaggtgtcctggtggattgaacagaacaggcagcgccctattcctggatgaccttcgcattttgtaaaccgaagttgctgtcttgtgcaagagcatcccgacgtcctcggataatgtaataaaaaaagcaaaagcgacaaagtttgccgtgtattatagcggcattgttacttaacgctgttttattttgtggaaatacttaacggtgttttagtttaatgccttgttgcttttgaaacatatgagaaatggtggctctgaactaaaag

SEQ ID NO: 83373 - DNA, 1493 bp, Zea Mays
tgcattcactgcggcagaggagttgaatttctgctacaagatcgacgggccgtccgctgaccatttcatcttctccgagcaaggaatccgctgtaaaggatctgccaataaagtctgagaagagcgaatcccatctccgattctagaatccgcaggcgacttagcagatctggagacatcgattcccagtaggccccccagagaagacgataaaccatccccacaaatctgaatatcttgacaagatttgcgaattgccggcttggagtggtgcggatggcaaggaacagacccccaaaaacttaccgccgttggagagtgctgccagagcggccctaccggatcttcaaaataaccattgtcttgcttcacgggaagacgaacgcggaaggcaggagacgaaggcggcaccagacgagtaaggccagccccaccagatctgaggagaccgaaaagctggcggcgccgggagaaggagcggaggccccgccgccagggaagtcggcaccgcgagcggccgcgaccgcccgaccgtcagtcttgcaccgcatgtcctctgtaaattgaaggtagagctgctcgctccggccgtgacgggcaccaagaacgtcctgaaggcgtgctcggaggccaaggtgaagagggtcgtcgtggtgtcgtcggtggccgccgtgatggtgaaccctggctggccccagaacgaggccatggacgaggcttgttggtccgacgtcgaattctgcagaaccactcagaactggtactgtctctccaagacactcgcggagctggaagcgcttgattacgcaaagaggagtggactagacgtggtgtccgtctgcccgtcgctggtgatcgggcccttgctgcagtcgacggtgaacgcaagcagctccgtcatagtcgattgcttgaaaggagatcgtgaggtgaagctgaagctgaggaacttcgtggacgtccgcgacgtcgccgacgctctgctcctggtgtacgagactccggaggcgtctggacggtacatctgcgacgcaaatgcaaggcagatgtctgaggtcgtagcgctgctcaaggactggtaccctgcctacagtcatgctgccaccaagttcgtgcaggtgagcgatgagcctttgttcagctccaagaagctgcaggcgctgggctggaaattccggactctggaggagagcctcagggacagcgttgaatccttcaaggcggcaggtgtcctggtggattgaacagaacaggcagcgccctattcctggatgaccttcgcattttgtaaaccgaagttgctgtcttgtgcaagagcatcccgacgtcctcggataatgtaataaaaaaagcaaaagcgacaaagtttgccgtgtattatagcggcattgttacttaacgctgttttattttgtggaaatacttaacggtgttttagtttaatgccttgttgcttttgaaacatatgagaaatggtggctctgaactaaaag

SEQ ID NO: 83374 - DNA, 1963 bp, Zea Mays
ggcactgtttgcattcactgcggcagaggagttgaatttctgctacaagatcgacgggccgtccgctgaccatttcatcttctccgagcaaggaatccgctgtaaaggatctgccaataaagtctgagaagagcgaatcccatctccgattctagaatccgcaggcgacttagcagatctggagacatcgattcccagtaggccccccagagaagacgataaaccatccccacaaatctgaatatcttgacaagatttgcgaattgccggcttggagtggtgcggatggcaaggaacagacccccaaaaacttaccgccgttggagagtgctgccagagcggccctaccggatcttcaaaataaccattgtcttgcttcacgggaagacgaacgcggaaggcaggagacgaaggcggcaccagacgagtaaggccagccccaccagatctgaggagaccgaaaagctggcggcgccgggagaaggagcggaggccccgccgccagggaagtcggcaccgcgagcggccgcgaccgcccgaccgtcagtcttgcaccgcatgtcctctgtaaattgaaggaatcaggacgtcgctagcaacaagttgtcaactacccaaatctgcacgaggtcaataggagtatctcaaatcggctaacaagtaataatcctctcgatacccgaatcggtgaaggaaaacaagacgagtccgtcggtcgtgatcggtaccaatggaaggcgcagcggggatcaggacgaggccggcggtgtgcgtgaccggcgcgggcggcttcgtggcctcgtggctcgtcgagcgcctcctcgccggcggccgatacatggtccatggcaccgtccgtgatccgggcgacgccaagaacgcgcacctggcggcgatggacggcgccgcggaccggctgcgcctgttcagggccgaattgctcgactacggcagcgtggcggcggccatcgccggctgcgacggcgtcttccacgtcgcgtccccagtccccatgacctatccaatcggtgaccccgaggtagagctgctcgctccggccgtgacgggcaccaagaacgtcctgaaggcgtgctcggaggccaaggtgaagagggtcgtcgtggtgtcgtcggtggccgccgtgatggtgaaccctggctggccccagaacgaggccatggacgaggcttgttggtccgacgtcgaattctgcagaaccactcagaactggtactgtctctccaagacactcgcggagctggaagcgcttgattacgcaaagaggagtggactagacgtggtgtccgtctgcccgtcgctggtgatcgggcccttgctgcagtcgacggtgaacgcaagcagctccgtcatagtcgattgcttgaaaggagatcgtgaggtgaagctgaagctgaggaacttcgtggacgtccgcgacgtcgccgacgctctgctcctggtgtacgagactccggaggcgtctggacggtacatctgcgacgcaaatgcaaggcagatgtctgaggtcgtagcgctgctcaaggactggtaccctgcctacagtcatgctgccaccaagttcgtgcaggtgagcgatgagcctttgttcagctccaagaagctgcaggcgctgggctggaaattccggactctggaggagagcctcagggacagcgttgaatccttcaaggcggcaggtgtcctggtggattgaacagaacaggcagcgccctattcctggatgaccttcgcattttgtaaaccgaagttgctgtcttgtgcaagagcatcccgacgtcctcggataatgtaataaaaaaagcaaaagcgacaaagtttgccgtgtattatagcggcattgttacttaacgctgttttattttgtggaaatacttaacggtgttttagtttaatgccttgttgcttttgaaacatatgagaaatggtggctctgaactaaaag

SEQ ID NO: 83375 - DNA, 903 bp, Zea Mays
ctcattgtcactcgagcccatggacaaggtgtaagcacaaggcacggaagatcagtttcaccgcttcatgcgtgacacacgacggtggaagcaattgctttataagagactggtattgcctttccaagacactggcagagatggaggcatttgactacgccaagagaaccggagtggacgtggtttcagtttgtccatccctagtgatcgggccaatgctgcaactgacagtgaacgcgagcagttcggtcgtggttgacttcctcaaaggagaccgtttggtgaaaatgaaactcagacacttcgtggatgttcgcgacgtcgccgatgctcttctcctggtgtatgagaccccggaggcatctgggaggtatatctgcaattcgcacgcgaggctggtgtctgatgtcataaggctactcaggagctggtacccgacctatcaatgtgccaccaagttcgtgcaagtgagccacgagcccgcgttcagttccaacaagttgcaggcgcttggctggaaattcaggccgtttgaggagaccctcagggacagcgttgaatccttcaaggctgcaggcgtcatccactgaggaaacaccactgccgtgagcatttgaaaaatccaagccattgcctcgtgcagtacaccagtcttgatcgataattgggatgagtaatgtgtaatcatcaaaaggggatcaatgtttgttcgtgtcatagactgcatttagcaatagcagtaataagtacatggaatttatatgaaggtatgttatcttcttttttttgaaagggagaggcaaaagagtccaagcgaagaagcgacactttggttcagtttttgctttccaaatggaacagattttcattgtgcagaagtttgttgagaactgaatgttatat

SEQ ID NO: 83376 - DNA, 5857 bp, Zea Mays
gttcaagcctccagtcgcctctacagctctactcccgttgatctgttccagcttccagtcaccggccatcagcaacgcgtcaccggccatcagatctctccccgccgcctagtcgcgccgccccagtcccccaccaccgcactccacaccaccgcccaatgtcgtcgtcggagcccgatgccgagggcgccctcggcggcgcctccccatccgcccgcgtgctcgcccgcgccctcgacaagatcatcaagcactcctcctggcgcaggcacgccgctctcgtcgccgcctcccaagtcagcgctcgatctcctctcctcctccccagctcctgatgacgagcccgagacctcctcgccctcccccgtccccggcctcccagcgcccgccgcggaagccgccctcaccgcacttctcctcgcgctcgacccggcgtccccgaaggtagccgagcccgcgctcgagtgcgtcgccggcctcctctccctgcgccttctcctcggcgacgtcgacgcggctgacccctccctgatctcgaaactcttcgccgcggtgctctcctgcgtctcgctgggtggcagcggggacgaagcgctcgagctgtccgtgctgcgcgttctcgtcgctttcgcgcggtgcccgggagtctccgtcagcggggagtgcctgggccaggtggtcaaggcgtgctacaacgtctacctcgggagccccagcggcggcaaccagctctgtgctaaactagctctcgcacaagtgctggtcatcgtgtttgcgcgcgtcgaggctgacgccatggacgtccgcgtgcgcactgtctccgctgccgacatgatggacctctctgaccgcagcctcaatgactccagcgttgtacaggcggcacaagtgttcataaacgaggccatggaggggagcgacgtgccggaggaggcaccacatgtagatgaggcgtcagttgaggcggaaggcgctggggaggatggtggaataagcaagataagggaggatggcctggctttgttcaagaacctatgcaagttgtcaatgaagtttggtacgcctgatagcccggatgatccaatgctattgagggggaaggtgttatcgctggagctggttaggatggtcattgacaatgcagggctattctggaagacaaatgaaaagtatcttgaagcagttaagcagtacctttgtttatccttgttgaagaatagtgctttgtccgcaatgagtgtcttccagttattgtgttccatatttatgagtctaatatcaaggtttagatctggtttgaaagaggaaattggaatgttttttcctatgcttatcttaagagttcttgaaaatgttctccagcctagttttttgcagaagatgacagttctaaacttcttggagaaaatgtctaaagaacctcaggttatcattgatatctttgtgaacttcgattgtgatgttgatgcaccgaatatttttgaaaggattgtcaatggacttttaaagactgctttaggtgtccctactggatctacaacaacattaactgttgcacaagaccaaacatttaggcttgagtctgtcaagtgccttgcaattgttgttaagtcgatgagtgcatggatggaccaacaactgagaattggtgaattttcaccaggcaattctgaaactctaagttcagctgataaccataatattcataatggagaagaatggagcggaatagattatgaactgcagtttgacactagtagttctgacataaccgactcttcctcacttgagcagcgacgtgcttacaagatggagcttcagaaaggaattaccttgttcaacaaaaaaccttccaaaggtattgattttctcattcggagcaagaaaataggcaattctccagaaggtgtggcatctttcttgagaagtactgctggattgaatgcaacaatgataggcgactatttgggtgagagggatgactttcccctcaaagtaatgcatgcttatgtggacgctttaaacttcgaaggcatggactttggtcaggcaattaggttcttcttgcaaggtttcaggttaccaggagaagctcaaaaaattgaccggatcatggaaaagtttgctcaaggctactgtaaatgcaatccaaatgcttttattagtgcagatacagcatatgttcttgcatattctgtgatcttgctaaacactgatgctcataatccaatggtgaagaacaagatgtctaaggcagattttatgcgcaacaatcgaggaatagatgatgggaaggatttgccagaagattatctgagtgcgctgtatgaccagattgtcaacaatgaaatcaagatgagtgctgattcttcagttgcacaaaccaagcaatccaatagtgtagggaggcttctaggcttggacaacattatcaactttgtcaattggagaccagcagaagacaaggcagtaggagcaaatgacttgctcattaagcacatacaggaaaaaatcaaagcaaaacgtgggaaatcagagtccacgttttatgttgttgctgatgcaaccattttaaggttcatgatggagtcctgttgggcacctatgatggctgcattcagtgtgcttcttgatcagtgtgatgataaggctgctacatcacagtgtttaaagggattaagattttctgtgcacatcacttctgttatgtgcatgcagacacagagggatgctttcttaacgtccatagccaaattcacatctctccattctgccgcagaaatgaagcaaaaaagtattgattctatgaaggctataatatctatcgcaatcgaagatggcaattacttgcaggaagcttgggagcatgtattaacatgtttatcacggtttgagcatttacatctgcttggagaaggggttcccactgatgcatcctttctgacagttcctctgattgagtcagaagaaaaaactaagaagtctacttctgttctatcttctaagaagactagtgctcttcagaatcctgctgtgatggctgctgttagagggggtacttacgatagcacagtggcaaaaggcagtgtgtcagcactggtcactcctgaacagatcaataatttcctatcaagcattaatttgttggatcagattggcattgttgagttaaatcatatctttgcccatagccaaagattaaacagtgatgctattgttgcttttgtgaaggctctttgcaaggtctcaatgactgagctgcagtctccaacagatcctcgtatcttctgccttactaaaatagtagagattgcgcattacaatatgaatcgcatacgtctggtgtggtcacgtatttggaaggttttgtcagatttttttgtgtctgttgggttgttggaaaatctttctgtcgctatatttgtgatggactctctgaggcagctggccatgaagtttcttgaaagggaggaactggcaaactataactttcaaaatgagttccttagaccttttgtgatcgttatgcagaggagcaatgctccagaggtacgagagctgattgttaggtgcgtctcacagatggttctgagtcgggttaataatataaagtctggttggaagggtgtttttatggtttttacttttgctgcagctgatgatacaagaagtactgtcctattggcatttgagacggtggaaaaaattgttcgagattattttcatcacataactgaaacagagacaacggcatttactgattgtgtgacttgtcttattgcatttacaagtagtcaatttaacagcgatgccaatctcaatgctattgcgtttctgcgattctgtgctgttaaacttgctgaggaaggattttcttgtcaagatagggcttttgaacaacccaggaattcagccatggtgtgtggtggaaatgccactgtgcaaaaagatggtcatatttccctctggatgcctctccttgcaggtttagctaaactgacaagtgattcaagactgaatatcaagaaaggtgctgtaggagtactttttgacattttaaaggatcacggacacctgttctcgctgacgttttggaccgatatctttgaacatgttgtttatcctctatttagcaatgaaaggtcgacacccagtgaccagatttcaacatcaaattctgcagagtataatttacctgatcttgaaacacaaacgttggcagtgaaatgcttggtgggtttgtttgttaatttctttgatgtgatccggccagaacttggtagaacagcatcaattgttacatctttcatcagaagcccctacaaacattgtgctaccattggtgtatctgcaatcatgcgtttagcagatggggttggtaacaaactttccaaagaggaatggaaagagatattgatcttctttagagaatcagtgacgcataccttcatcacgttttctaaaattgtaaggatgatgcaagatattgatatcccagatagaattgattcttattccgaaaccgagcaatatttggatcatgagatgtatgttaacgatgaagaggaagcgaatatggagacagcttcttatgctattgtcaaactgaagaatcatatggctctactgctcatggtgattcagaacattatcaaactatacgaggagcacagcaaatatcttcatgccgagcatattagcattcttttggagatgatgtcagctattgcgatacattcaagtgaagtgagctctgagttatccttgcagtcgaaatttcataaagcatgttcccttttggaggtatctgagccagcaattgttcattttgagaacgattcctaccagagttacctcaaacttcttcaagctctgcaacatgattatccatccttgtcagaagagatgaacatagagtctcaagtgcttgatacctgtgagcaaatattgcaaacatatctgaagtgcgcaggacacaaaccatgtgatggggcgtcccaaagaaatccgcctttacattgtgcagtgccgctgagcgcttctaagaaagaggaattggctgctaggactcctctggtccttcaagtgatgaaattgttgggtgatctggagagagattcctttaggagaatattaccctgctttttcccattattggctgatctgatccgctgtgaacatagctctggagaagttcaacatgcactgtacaatatcttccaatcagccattctccccatgataagggtttaataacagattgtgacccaccaattgtacagtttttgttaccccactttggtgttgtaattcagttcattgtggcgtcattccattacgaggggttgtatacctatgaggatgacgtataaaaatgctgcagggtctgtcattcagcttaaggactatggagcatctttttaatattcattttaccaatgatgttcatcatatatgctgggatcaggaagaaagacacggatatggaatcatataagtcaggataataatgtacatgactcgctgacgacgacacagtgacactgaaatacctatgctctaatgagacatgggaacatgcactggaggtactgagaaggttggaggccggactccatttccggccatccactttggtccatgcacagaccaccagctatcagaatttctggcaggagatggggaatgtacacacacactgacagaagctgagcaagaggggcttcatcttcagacactcacattataagaagttcgggtaaccatggataacgacaacctgcaatatgataagagacagtacatcaatcagcccagatgcagcataaactgatgccgctgcagatactagataaat

SEQ ID NO: 83377 - DNA, 6259 bp, Zea Mays
gagcagagggcggacctcccgttgatatgttcaagcctccagtcgcctctacagctctactcccgttgatctgttccagcttccagtcaccggccatcagcaacgcgtcaccggccatcagatctctccccgccgcctagtcgcgccgccccagtcccccaccaccgcactccacaccaccgcccaatgtcgtcgtcggagcccgatgccgagggcgccctcggcggcgcctccccatccgcccgcgtgctcgcccgcgccctcgacaagatcatcaagcactcctcctggcgcaggcacgccgctctcgtcgccgcctcccaagtcagcgctcgatctcctctcctcctccccagctcctgatgacgagcccgagacctcctcgccctcccccgtccccggcctcccagcgcccgccgcggaagccgccctcaccgcacttctcctcgcgctcgacccggcgtccccgaaggtagccgagcccgcgctcgagtgcgtcgccggcctcctctccctgcgccttctcctcggcgacgtcgacgcggctgacccctccctgatctcgaaactcttcgccgcggtgctctcctgcgtctcgctgggtggcagcggggacgaagcgctcgagctgtccgtgctgcgcgttctcgtcgctttcgcgcggtgcccgggagtctccgtcagcggggagtgcctgggccaggtggtcaaggcgtgctacaacgtctacctcgggagccccagcggcggcaaccagctctgtgctaaactagctctcgcacaagtgctggtcatcgtgtttgcgcgcgtcgaggctgacgccatggacgtccgcgtgcgcactgtctccgctgccgacatgatggacctctctgaccgcagcctcaatgactccagcgttgtacaggcggcacaagtgttcataaacgaggccatggaggggagcgacgtgccggaggaggcaccacatgtagatgaggcgtcagttgaggcggaaggcgctggggaggatggtggaataagcaagataagggaggatggcctggctttgttcaagaacctatgcaagttgtcaatgaagtttggtacgcctgatagcccggatgatccaatgctattgagggggaaggtgttatcgctggagctggttaggatggtcattgacaatgcagggctattctggaagacaaatgaaaagtatcttgaagcagttaagcagtacctttgtttatccttgttgaagaatagtgctttgtccgcaatgagtgtcttccagttattgtgttccatatttatgagtctaatatcaaggtttagatctggtttgaaagaggaaattggaatgttttttcctatgcttatcttaagagttcttgaaaatgttctccagcctagttttttgcagaagatgacagttctaaacttcttggagaaaatgtctaaagaacctcaggttatcattgatatctttgtgaacttcgattgtgatgttgatgcaccgaatatttttgaaaggattgtcaatggacttttaaagactgctttaggtgtccctactggatctacaacaacattaactgttgcacaagaccaaacatttaggcttgagtctgtcaagtgccttgcaattgttgttaagtcgatgagtgcatggatggaccaacaactgagaattggtgaattttcaccaggcaattctgaaactctaagttcagctgataaccataatattcataatggagaagaatggagcggaatagattatgaactgcagtttgacactagtagttctgacataaccgactcttcctcacttgagcagcgacgtgcttacaagatggagcttcagaaaggaattaccttgttcaacaaaaaaccttccaaaggtattgattttctcattcggagcaagaaaataggcaattctccagaaggtgtggcatctttcttgagaagtactgctggattgaatgcaacaatgataggcgactatttgggtgagagggatgactttcccctcaaagtaatgcatgcttatgtggacgctttaaacttcgaaggcatggactttggtcaggcaattaggttcttcttgcaaggtttcaggttaccaggagaagctcaaaaaattgaccggatcatggaaaagtttgctcaaggctactgtaaatgcaatccaaatgcttttattagtgcagatacagcatatgttcttgcatattctgtgatcttgctaaacactgatgctcataatccaatggtgaagaacaagatgtctaaggcagattttatgcgcaacaatcgaggaatagatgatgggaaggatttgccagaagattatctgagtgcgctgtatgaccagattgtcaacaatgaaatcaagatgagtgctgattcttcagttgcacaaaccaagcaatccaatagtgtagggaggcttctaggcttggacaacattatcaactttgtcaattggagaccagcagaagacaaggcagtaggagcaaatgacttgctcattaagcacatacaggaaaaaatcaaagcaaaacgtgggaaatcagagtccacgttttatgttgttgctgatgcaaccattttaaggttcatgatggagtcctgttgggcacctatgatggctgcattcagtgtgcttcttgatcagtgtgatgataaggctgctacatcacagtgtttaaagggattaagattttctgtgcacatcacttctgttatgtgcatgcagacacagagggatgctttcttaacgtccatagccaaattcacatctctccattctgccgcagaaatgaagcaaaaaagtattgattctatgaaggctataatatctatcgcaatcgaagatggcaattacttgcaggaagcttgggagcatgtattaacatgtttatcacggtttgagcatttacatctgcttggagaaggggttcccactgatgcatcctttctgacagttcctctgattgagtcagaagaaaaaactaagaagtctacttctgttctatcttctaagaagactagtgctcttcagaatcctgctgtgatggctgctgttagagggggtacttacgatagcacagtggcaaaaggcagtgtgtcagcactggtcactcctgaacagatcaataatttcctatcaagcattaatttgttggatcagattggcattgttgagttaaatcatatctttgcccatagccaaagattaaacagtgatgctattgttgcttttgtgaaggctctttgcaaggtctcaatgactgagctgcagtctccaacagatcctcgtatcttctgccttactaaaatagtagagattgcgcattacaatatgaatcgcatacgtctggtgtggtcacgtatttggaaggttttgtcagatttttttgtgtctgttgggttgttggaaaatctttctgtcgctatatttgtgatggactctctgaggcagctggccatgaagtttcttgaaagggaggaactggcaaactataactttcaaaatgagttccttagaccttttgtgatcgttatgcagaggagcaatgctccagaggtacgagagctgattgttaggtgcgtctcacagatggttctgagtcgggttaataatataaagtctggttggaagggtgtttttatggtttttacttttgctgcagctgatgatacaagaagtactgtcctattggcatttgagacggtggaaaaaattgttcgagattattttcatcacataactgaaacagagacaacggcatttactgattgtgtgacttgtcttattgcatttacaagtagtcaatttaacagcgatgccaatctcaatgctattgcgtttctgcgattctgtgctgttaaacttgctgaggaaggattttcttgtcaagatagggcttttgaacaacccaggaattcagccatggtgtgtggtggaaatgccactgtgcaaaaagatggtcatatttccctctggatgcctctccttgcaggtttagctaaactgacaagtgattcaagactgaatatcaagaaaggtgctgtaggagtactttttgacattttaaaggatcacggacacctgttctcgctgacgttttggaccgatatctttgaacatgttgtttatcctctatttagcaatgaaaggtcgacacccagtgaccagatttcaacatcaaattctgcagagtataatttacctgatcttgaaacacaaacgttggcagtgaaatgcttggtgggtttgtttgttaatttctttgatgtgatccggccagaacttggtagaacagcatcaattgttacatctttcatcagaagcccctacaaacattgtgctaccattggtgtatctgcaatcatgcgtttagcagatggggttggtaacaaactttccaaagaggaatggaaagagatattgatcttctttagagaatcagtgacgcataccttcatcacgttttctaaaattgtaaggatgatgcaagatattgatatcccagatagaattgattcttattccgaaaccgagcaatatttggatcatgagatgtatgttaacgatgaagaggaagcgaatatggagacagcttcttatgctattgtcaaactgaagaatcatatggctctactgctcatggtgattcagaacattatcaaactatacgaggagcacagcaaatatcttcatgccgagcatattagcattcttttggagatgatgtcagctattgcgatacattcaagtgaagtgagctctgagttatccttgcagtcgaaatttcataaagcatgttcccttttggaggtatctgagccagcaattgttcattttgagaacgattcctaccagagttacctcaaacttcttcaagctctgcaacatgattatccatccttgtcagaagagatgaacatagagtctcaagtgcttgatacctgtgagcaaatattgcaaacatatctgaagtgcgcaggacacaaaccatgtgatggggcgtcccaaagaaatccgcctttacattgtgcagtgccgctgagcgcttctaagaaagaggaattggctgctaggactcctctggtccttcaagtgatgaaattgttgggtgatctggagagagattcctttaggagaatattaccctgctttttcccattattggctgatctgatccgctgtgaacatagctctggagaagttcaacatgcactgtacaatatcttccaatcagccattctccccatgataagggtttaataacagattgtgacccaccaattgtacagtttttgttaccccactttggtgttgtaattcagttcattgtggcgtcattccattacgaggggttgtatacctatgaggatgacgtataaaaatgctgcagggtctgtcattcagcttaaggactatggagcatctttttaatattcattttaccaatgatgttcatcatatatgctgggatcaggaagaaagacacggatatggaatcatataagtcaggtgacctcggcttctcagagccccatgttaccatttgcccattgccatccccaggatcgtgtttatatatatagcactagagctacgaaccgttttgatgttactactggctttgctacgtagattgtttttaattttatacaaaaccataaactagagttacatgccaacaaacacgattttcaattttgctcgttctgtagttatgtatgcagtatttcttatccatagaaacagacgaatagtatgatgaatatgccccgatgttttccccccatccgttgcaatttgcaacaaatcacattctttcccaaggtagggctgtcattatttgattacagttgacataggtgatatatagtttacagtttcaggataataatgtacatgactcgctgacgacgacacagtgacactgaaatacctatgctctaatgagacatgggaacatgcactggaggtactgagaaggttggaggccggactccatttccggccatccactttggtccatgcacagaccaccagctatcagaatttctggcaggagatggggaatgtacacacacactgacagaagctgagcaagaggggcttcatcttcagacactcacattataagaagttcgggtaaccatggataacgacaacctgcaatatgataagagacagtacatcaatcagcccagatgcagcataaactgatgccgctgcagatactagataaat

SEQ ID NO: 83378 - DNA, 5529 bp, Zea Mays
atgtcgtcgtcggagcccgatgccgagggcgccctcggcggcgcctccccatccgcccgcgtgctcgcccgcgccctcgacaagatcatcaagcactcctcctggcgcaggcacgccgctctcgtcgccgcctcccaagtcagcgctcgatctcctctcctcctccccagctcctgatgacgagcccgagacctcctcgccctcccccgtccccggcctcccagcgcccgccgcggaagccgccctcaccgcacttctcctcgcgctcgacccggcgtccccgaaggtagccgagcccgcgctcgagtgcgtcgccggcctcctctccctgcgccttctcctcggcgacgtcgacgcggctgacccctccctgatctcgaaactcttcgccgcggtgctctcctgcgtctcgctgggtggcagcggggacgaagcgctcgagctgtccgtgctgcgcgttctcgtcgctttcgcgcggtgcccgggagtctccgtcagcggggagtgcctgggccaggtggtcaaggcgtgctacaacgtctacctcgggagccccagcggcggcaaccagctctgtgctaaactagctctcgcacaagtgctggtcatcgtgtttgcgcgcgtcgaggctgacgccatggacgtccgcgtgcgcactgtctccgctgccgacatgatggacctctctgaccgcagcctcaatgactccagcgttgtacaggcggcacaagtgttcataaacgaggccatggaggggagcgacgtgccggaggaggcaccacatgtagatgaggcgtcagttgaggcggaaggcgctggggaggatggtggaataagcaagataagggaggatggcctggctttgttcaagaacctatgcaagttgtcaatgaagtttggtacgcctgatagcccggatgatccaatgctattgagggggaaggtgttatcgctggagctggttaggatggtcattgacaatgcagggctattctggaagacaaatgaaaagtatcttgaagcagttaagcagtacctttgtttatccttgttgaagaatagtgctttgtccgcaatgagtgtcttccagttattgtgttccatatttatgagtctaatatcaaggtttagatctggtttgaaagaggaaattggaatgttttttcctatgcttatcttaagagttcttgaaaatgttctccagcctagttttttgcagaagatgacagttctaaacttcttggagaaaatgtctaaagaacctcaggttatcattgatatctttgtgaacttcgattgtgatgttgatgcaccgaatatttttgaaaggattgtcaatggacttttaaagactgctttaggtgtccctactggatctacaacaacattaactgttgcacaagaccaaacatttaggcttgagtctgtcaagtgccttgcaattgttgttaagtcgatgagtgcatggatggaccaacaactgagaattggtgaattttcaccaggcaattctgaaactctaagttcagctgataaccataatattcataatggagaagaatggagcggaatagattatgaactgcagtttgacactagtagttctgacataaccgactcttcctcacttgagcagcgacgtgcttacaagatggagcttcagaaaggaattaccttgttcaacaaaaaaccttccaaaggtattgattttctcattcggagcaagaaaataggcaattctccagaaggtgtggcatctttcttgagaagtactgctggattgaatgcaacaatgataggcgactatttgggtgagagggatgactttcccctcaaagtaatgcatgcttatgtggacgctttaaacttcgaaggcatggactttggtcaggcaattaggttcttcttgcaaggtttcaggttaccaggagaagctcaaaaaattgaccggatcatggaaaagtttgctcaaggctactgtaaatgcaatccaaatgcttttattagtgcagatacagcatatgttcttgcatattctgtgatcttgctaaacactgatgctcataatccaatggtgaagaacaagatgtctaaggcagattttatgcgcaacaatcgaggaatagatgatgggaaggatttgccagaagattatctgagtgcgctgtatgaccagattgtcaacaatgaaatcaagatgagtgctgattcttcagttgcacaaaccaagcaatccaatagtgtagggaggcttctaggcttggacaacattatcaactttgtcaattggagaccagcagaagacaaggcagtaggagcaaatgacttgctcattaagcacatacaggaaaaaatcaaagcaaaacgtgggaaatcagagtccacgttttatgttgttgctgatgcaaccattttaaggttcatgatggagtcctgttgggcacctatgatggctgcattcagtgtgcttcttgatcagtgtgatgataaggctgctacatcacagtgtttaaagggattaagattttctgtgcacatcacttctgttatgtgcatgcagacacagagggatgctttcttaacgtccatagccaaattcacatctctccattctgccgcagaaatgaagcaaaaaagtattgattctatgaaggctataatatctatcgcaatcgaagatggcaattacttgcaggaagcttgggagcatgtattaacatgtttatcacggtttgagcatttacatctgcttggagaaggggttcccactgatgcatcctttctgacagttcctctgattgagtcagaagaaaaaactaagaagtctacttctgttctatcttctaagaagactagtgctcttcagaatcctgctgtgatggctgctgttagagggggtacttacgatagcacagtggcaaaaggcagtgtgtcagcactggtcactcctgaacagatcaataatttcctatcaagcattaatttgttggatcagattggcattgttgagttaaatcatatctttgcccatagccaaagattaaacagtgatgctattgttgcttttgtgaaggctctttgcaaggtctcaatgactgagctgcagtctccaacagatcctcgtatcttctgccttactaaaatagtagagattgcgcattacaatatgaatcgcatacgtctggtgtggtcacgtatttggaaggttttgtcagatttttttgtgtctgttgggttgttggaaaatctttctgtcgctatatttgtgatggactctctgaggcagctggccatgaagtttcttgaaagggaggaactggcaaactataactttcaaaatgagttccttagaccttttgtgatcgttatgcagaggagcaatgctccagaggtttttacttttgctgcagctgatgatacaagaagtactgtcctattggcatttgagacggtggaaaaaattgttcgagattattttcatcacataactgaaacagagacaacggcatttactgattgtgtgacttgtcttattgcatttacaagtagtcaatttaacagcgatgccaatctcaatgctattgcgtttctgcgattctgtgctgttaaacttgctgaggaaggattttcttgtcaagatagggcttttgaacaacccaggaattcagccatggtgtgtggtggaaatgccactgtgcaaaaagatggtcatatttccctctggatgcctctccttgcaggtttagctaaactgacaagtgattcaagactgaatatcaagaaaggtgctgtaggagtactttttgacattttaaaggatcacggacacctgttctcgctgacgttttggaccgatatctttgaacatgttgtttatcctctatttagcaatgaaaggtcgacacccagtgaccagatttcaacatcaaattctgcagagtataatttacctgatcttgaaacacaaacgttggcagtgaaatgcttggtgggtttgtttgttaatttctttgatgtgatccggccagaacttggtagaacagcatcaattgttacatctttcatcagaagcccctacaaacattgtgctaccattggtgtatctgcaatcatgcgtttagcagatggggttggtaacaaactttccaaagaggaatggaaagagatattgatcttctttagagaatcagtgacgcataccttcatcacgttttctaaaattgtaaggatgatgcaagatattgatatcccagatagaattgattcttattccgaaaccgagcaatatttggatcatgagatgtatgttaacgatgaagaggaagcgaatatggagacagcttcttatgctattgtcaaactgaagaatcatatggctctactgctcatggtgattcagaacattatcaaactatacgaggagcacagcaaatatcttcatgccgagcatattagcattcttttggagatgatgtcagctattgcgatacattcaagtgaagtgagctctgagttatccttgcagtcgaaatttcataaagcatgttcccttttggaggtatctgagccagcaattgttcattttgagaacgattcctaccagagttacctcaaacttcttcaagctctgcaacatgattatccatccttgtcagaagagatgaacatagagtctcaagtgcttgatacctgtgagcaaatattgcaaacatatctgaagtgcgcaggacacaaaccatgtgatggggcgtcccaaagaaatccgcctttacattgtgcagtgccgctgagcgcttctaagaaagaggaattggctgctaggactcctctggtccttcaagtgatgaaattgttgggtgatctggagagagattcctttaggagaatattaccctgctttttcccattattggctgatctgatccgctgtgaacatagctctggagaagttcaacatgcactgtacaatatcttccaatcagccattctccccatgataagggtttaataacagattgtgacccaccaattgtacagtttttgttaccccactttggtgttgtaattcagttcattgtggcgtcattccattacgaggggttgtatacctatgaggatgacgtataaaaatgctgcagggtctgtcattcagcttaaggactatggagcatctttttaatattcattttaccaatgatgttcatcatatatgctgggatcaggaagaaagacacggatatggaatcatataagtcaggtgacctcggcttctcagagccccatgttaccatttgcccattgccatccccaggatcgtgtttatatatatagcactagagctacgaaccgttttgatgttactactggctttgctacgtagattgtttttaattttatacaaaaccataaactagagttacatgccaacaaacacgattttcaattttgctcgttctgtagttatgtatgcagtatttcttatccatagaaacagacgaatagtatgatgaatatgccccgatgttttcc

SEQ ID NO: 83379 - DNA, 5611 bp, Zea Mays
cacaccaccgcccaatgtcgtcgtcggagcccgatgccgagggcgccctcggcggcgcctccccatccgcccgcgtgctcgcccgcgccctcgacaagatcatcaagcactcctcctggcgcaggcacgccgctctcgtcgccgcctcccaagtcagcgctcgatctcctctcctcctccccagctcctgatgacgagcccgagacctcctcgccctcccccgtccccggcctcccagcgcccgccgcggaagccgccctcaccgcacttctcctcgcgctcgacccggcgtccccgaaggtagccgagcccgcgctcgagtgcgtcgccggcctcctctccctgcgccttctcctcggcgacgtcgacgcggctgacccctccctgatctcgaaactcttcgccgcggtgctctcctgcgtctcgctgggtggcagcggggacgaagcgctcgagctgtccgtgctgcgcgttctcgtcgctttcgcgcggtgcccgggagtctccgtcagcggggagtgcctgggccaggtggtcaaggcgtgctacaacgtctacctcgggagccccagcggcggcaaccagctctgtgctaaactagctctcgcacaagtgctggtcatcgtgtttgcgcgcgtcgaggctgacgccatggacgtccgcgtgcgcactgtctccgctgccgacatgatggacctctctgaccgcagcctcaatgactccagcgttgtacaggcggcacaagtgttcataaacgaggccatggaggggagcgacgtgccggaggaggcaccacatgtagatgaggcgtcagttgaggcggaaggcgctggggaggatggtggaataagcaagataagggaggatggcctggctttgttcaagaacctatgcaagttgtcaatgaagtttggtacgcctgatagcccggatgatccaatgctattgagggggaaggtgttatcgctggagctggttaggatggtcattgacaatgcagggctattctggaagacaaatgaaaagtatcttgaagcagttaagcagtacctttgtttatccttgttgaagaatagtgctttgtccgcaatgagtgtcttccagttattgtgttccatatttatgagtctaatatcaaggtttagatctggtttgaaagaggaaattggaatgttttttcctatgcttatcttaagagttcttgaaaatgttctccagcctagttttttgcagaagatgacagttctaaacttcttggagaaaatgtctaaagaacctcaggttatcattgatatctttgtgaacttcgattgtgatgttgatgcaccgaatatttttgaaaggattgtcaatggacttttaaagactgctttaggtgtccctactggatctacaacaacattaactgttgcacaagaccaaacatttaggcttgagtctgtcaagtgccttgcaattgttgttaagtcgatgagtgcatggatggaccaacaactgagaattggtgaattttcaccaggcaattctgaaactctaagttcagctgataaccataatattcataatggagaagaatggagcggaatagattatgaactgcagtttgacactagtagttctgacataaccgactcttcctcacttgagcagcgacgtgcttacaagatggagcttcagaaaggaattaccttgttcaacaaaaaaccttccaaaggtattgattttctcattcggagcaagaaaataggcaattctccagaaggtgtggcatctttcttgagaagtactgctggattgaatgcaacaatgataggcgactatttgggtgagagggatgactttcccctcaaagtaatgcatgcttatgtggacgctttaaacttcgaaggcatggactttggtcaggcaattaggttcttcttgcaaggtttcaggttaccaggagaagctcaaaaaattgaccggatcatggaaaagtttgctcaaggctactgtaaatgcaatccaaatgcttttattagtgcagatacagcatatgttcttgcatattctgtgatcttgctaaacactgatgctcataatccaatggtgaagaacaagatgtctaaggcagattttatgcgcaacaatcgaggaatagatgatgggaaggatttgccagaagattatctgagtgcgctgtatgaccagattgtcaacaatgaaatcaagatgagtgctgattcttcagttgcacaaaccaagcaatccaatagtgtagggaggcttctaggcttggacaacattatcaactttgtcaattggagaccagcagaagacaaggcagtaggagcaaatgacttgctcattaagcacatacaggaaaaaatcaaagcaaaacgtgggaaatcagagtccacgttttatgttgttgctgatgcaaccattttaaggttcatgatggagtcctgttgggcacctatgatggctgcattcagtgtgcttcttgatcagtgtgatgataaggctgctacatcacagtgtttaaagggattaagattttctgtgcacatcacttctgttatgtgcatgcagacacagagggatgctttcttaacgtccatagccaaattcacatctctccattctgccgcagaaatgaagcaaaaaagtattgattctatgaaggctataatatctatcgcaatcgaagatggcaattacttgcaggaagcttgggagcatgtattaacatgtttatcacggtttgagcatttacatctgcttggagaaggggttcccactgatgcatcctttctgacagttcctctgattgagtcagaagaaaaaactaagaagtctacttctgttctatcttctaagaagactagtgctcttcagaatcctgctgtgatggctgctgttagagggggtacttacgatagcacagtggcaaaaggcagtgtgtcagcactggtcactcctgaacagatcaataatttcctatcaagcattaatttgttggatcagattggcattgttgagttaaatcatatctttgcccatagccaaagattaaacagtgatgctattgttgcttttgtgaaggctctttgcaaggtctcaatgactgagctgcagtctccaacagatcctcgtatcttctgccttactaaaatagtagagattgcgcattacaatatgaatcgcatacgtctggtgtggtcacgtatttggaaggttttgtcagatttttttgtgtctgttgggttgttggaaaatctttctgtcgctatatttgtgatggactctctgaggcagctggccatgaagtttcttgaaagggaggaactggcaaactataactttcaaaatgagttccttagaccttttgtgatcgttatgcagaggagcaatgctccagaggtacgagagctgattgttaggtgcgtctcacagatggttctgagtcgggttaataatataaagtctggttggaagggtgtttttatgctgatgatacaagaagtactgtcctattggcatttgagacggtggaaaaaattgttcgagattattttcatcacataactgaaacagagacaacggcatttactgattgtgtgacttgtcttattgcatttacaagtagtcaatttaacagcgatgccaatctcaatgctattgcgtttctgcgattctgtgctgttaaacttgctgaggaaggattttcttgtcaagatagggcttttgaacaacccaggaattcagccatggtgtgtggtggaaatgccactgtgcaaaaagatggtcatatttccctctggatgcctctccttgcaggtttagctaaactgacaagtgattcaagactgaatatcaagaaaggtgctgtaggagtactttttgacattttaaaggatcacggacacctgttctcgctgacgttttggaccgatatctttgaacatgttgtttatcctctatttagcaatgaaaggtcgacacccagtgaccagatttcaacatcaaattctgcagagtataatttacctgatcttgaaacacaaacgttggcagtgaaatgcttggtgggtttgtttgttaatttctttgatgtgatccggccagaacttggtagaacagcatcaattgttacatctttcatcagaagcccctacaaacattgtgctaccattggtgtatctgcaatcatgcgtttagcagatggggttggtaacaaactttccaaagaggaatggaaagagatattgatcttctttagagaatcagtgacgcataccttcatcacgttttctaaaattgtaaggatgatgcaagatattgatatcccagatagaattgattcttattccgaaaccgagcaatatttggatcatgagatgtatgttaacgatgaagaggaagcgaatatggagacagcttcttatgctattgtcaaactgaagaatcatatggctctactgctcatggtgattcagaacattatcaaactatacgaggagcacagcaaatatcttcatgccgagcatattagcattcttttggagatgatgtcagctattgcgatacattcaagtgaagtgagctctgagttatccttgcagtcgaaatttcataaagcatgttcccttttggaggtatctgagccagcaattgttcattttgagaacgattcctaccagagttacctcaaacttcttcaagctctgcaacatgattatccatccttgtcagaagagatgaacatagagtctcaagtgcttgatacctgtgagcaaatattgcaaacatatctgaagtgcgcaggacacaaaccatgtgatggggcgtcccaaagaaatccgcctttacattgtgcagtgccgctgagcgcttctaagaaagaggaattggctgctaggactcctctggtccttcaagtgatgaaattgttgggtgatctggagagagattcctttaggagaatattaccctgctttttcccattattggctgatctgatccgctgtgaacatagctctggagaagttcaacatgcactgtacaatatcttccaatcagccattctccccatgataagggtttaataacagattgtgacccaccaattgtacagtttttgttaccccactttggtgttgtaattcagttcattgtggcgtcattccattacgaggggttgtatacctatgaggatgacgtataaaaatgctgcagggtctgtcattcagcttaaggactatggagcatctttttaatattcattttaccaatgatgttcatcatatatgctgggatcaggaagaaagacacggatatggaatcatataagtcaggtgacctcggcttctcagagccccatgttaccatttgcccattgccatccccaggatcgtgtttatatatatagcactagagctacgaaccgttttgatgttactactggctttgctacgtagattgtttttaattttatacaaaaccataaactagagttacatgccaacaaacacgattttcaattttgctcgttctgtagttatgtatgcagtatttcttatccatagaaacagacgaatagtatgatgaatatgccccgatgttttcc

SEQ ID NO: 83380 - DNA, 835 bp, Zea Mays
gagctggcagaacccgcctctcctattggccaggccacggcaccacccactaaactgccactctgccaggaacgaggaagcttccttcctgtccttcctcgcgaagcaagacacagataagagagtccactataaagcaacacagctgcgatcatagcgacaaaatatctcgccgttcccatggacatcgacctcttccccgacatcgaccttgacgccctcctcgcctccttctccggcgaccccgctcggggaggtggcgctctcggagatcgagaggctcctgatgcaggagggggaggcggaactgggcggggaggtcgatgggatcagcgtggaccagttcttcgacgcgctgtacgacggcgaggaggcgaaaggtgagcgggaggcgggggcaagcgcggatgtggactccggcagggacgatgtgctggaagtcgtgacgccagaggcggggacggtggaggtggatggcgatgatcccatcagcaagaagaagatgaggtacgttgttagcgcagttgcgctggacatacgaaggttctttcctcttcgcttgagaaattgatcgaggggagttgtgtcctcatgcttgctagtgaaatttaggagctactacctggcagttagggatgggacagaccctaggtttgggtgggtttttggagatgggaatacttaaaactccttggtatttgtgttgttgtgaactctaccgaatggaagaaatatctgcgagtgaataactgctatatacatgcacaaatgcttactttggtttcaaactgctacgtcgaaatttggtcagcggacgggaggaatctgattcatg

SEQ ID NO: 83381 - DNA, 822 bp, Zea Mays
ggccgaggtcttgagttcgaatcccggtacatgttcagtctgaccctgctggtcgtttgatagttactggagagcccgagcaattggataacccatggggtgtcactccattcaagaaggtcattaggttgccttcccgcattgatcctcaccaaacctctgcagttgtcaccctccatgggcagctatttgtgcgtgcaccatttgaacaatcaaaataatgttgatgccacaatgaagcacaatactacaagtttgccttatgagtgggattataccgttatgacatgagcttagaagtgctcaccctgaccgtcctccaaaactagttccttgctgattttaatgcttcaagcctcctccatgctagatctctcatgtatcaagttaaactcattagttgacatagttctgtgtgtattcggttgtgcccgttggctgtgaattgtagctaaagcaaagttactaagcctagagtttaggatgttgatagtctgatgctcaacatgtccatggtttcttttcaatttagtcggcatagaatgtactgtttgtagcaatgtagtatgtagcttgttcccagtatttaagctccggaacatggagagcggtagagattcattgtatgtaactgttgctggtgcattgcaattgctattcaacttgtattgtcaaacaatctgaaactctatggcctccttgtaccctgccttcgtattgtgtgactttgtgtttccgtactagctgaaagaggaagataaatgactgccaaggacaccgtgtttagttgaagcctttttccatctcaaaaagagagaaaat

SEQ ID NO: 83382 - DNA, 1037 bp, Zea Mays
ctggattatgtttcatttgacttccattatgccattacttgctaattgttgttctgccaagaggaaaaggataccatcccttgaagatgacatggtgataccttataaatccgataagctacaaaatgactcaatggttattgacatgggccctcctgctgattgggtgaaaataaatgttaggaaaaccaaagattgctatgaagtctatgcattggttcctggccttctgcgtgaagaggtacatgttcagtctgaccctgctggtcgtttgatagttactggagagcccgagcaattggataacccatggggtgtcactccattcaagaaggtcattaggttgccttcccgcattgatcctcaccaaacctctgcagttgtcaccctccatgggcagctatttgtgcgtgcaccatttgaacaatcaaaataatgttgatgccacaatgaagcacaatactacaagtttgccttatgagtgggattataccgttatgacatgagcttagaagtgctcaccctgaccgtcctccaaaactagttccttgctgattttaatgcttcaagcctcctccatgctagatctctcatgtatcaagttaaactcattagttgacatagttctgtgtgtattcggttgtgcccgttggctgtgaattgtagctaaagcaaagttactaagcctagagtttaggatgttgatagtctgatgctcaacatgtccatggtttcttttcaatttagtcggcatagaatgtactgtttgtagcaatgtagtatgtagcttgttcccagtatttaagctccggaacatggagagcggtagagattcattgtatgtaactgttgctggtgcattgcaattgctattcaacttgtattgtcaaacaatctgaaactctatggcctccttgtaccctgccttcgtattgtgtgactttgtgtttccgtactagctgaaagaggaagataaatgactgccaaggacaccgtgtttagttgaagcctttttccatctcaaaaagagagaaaat

SEQ ID NO: 83383 - DNA, 2543 bp, Zea Mays
gttcaaaaccattctccactgttgctcctgtcctgttcctccgcttcctctgtctctgtctcgtcgtctcccccatctggccatctccggctagggtttgccctcccaccacgtccgaggtctagctcgtctccgccactgccggaccaaggatgtcgcaagagcaaggtatggaggagccgccgccgcaggcggtaggcgaggcacaatcggccgccgatgtccccatgagcgaggccgcagcggtggaggatgaggatgaggaacccgtcatgggggaggggcagggcggtgaaagcgggaccgccgatgccgttgattccgtcaaggcttcagtgaagcccgaagcagagggcgcggaggaaggggacagagaggagcttaatggtggcccgacggcggatttgactgacgaggttgtgaaattggagaacggggatggccccgtgccggtgggtggctccgcggatgagtgcggagctggagatggcggtgttgataagggcctggttggtcagaatgagcctgttgtgaaccagcttgtgctggtgcaggctgaggaggagctggcattgtctaagatctcaaacagttccttcatgttcgattacaccactgggggtgatgactcagggactgaggaggagcaggctgccttcatgaaggagctggagcgtttccacagggagaaaatgttggagttcaagccccctaagttttatggtgaaggattgaattgcctcaaattgtggagacaagttactggattgggtggctatgatcaggtgacatcatgcaagctgtggcgtcaagtgggagagtcattcaaacctccaaagacatgtacaactgtttcatggactttccgtaacttctatgagaaggcactccttgaatatgagaaacacaaaatcgaaacaggagagttccaagtagcttcatctgctctaccagatcgagttggttctgagagccaggtgggtggaagccacgtatctggttctggaagagccagaagagaatctgcaactcgtgcaatgcaaggctggcattctcaccgcctactaggcaatggtgaaaatgctgatcctataattaaggataaagggcctattgtcttaaagaaggataaaactcctaaaagcagtggttctgccaagaggaaaaggataccatcccttgaagatgacatggtgataccttataaatccgataagctacaaaatgactcaatggttattgacatgggccctcctgctgattgggtgaaaataaatgttaggaaaaccaaagattgctatgaagtctatgcattggttcctggccttctgcgtgaagaggtaagtaaatgcaaatcttttttaatggttgttttttgtccttcatgttgaagtgtataagtggattgactaccttctcccttcagcttaatcttttgagttgaactggttagtgcgtccactctaacatggtatcaaaggccgaggtcttgagttcgaatcccggtagatgctttatttgtgcctttatccatttattttcacgtttgcgcctttctctctggctgaacgtgagtgggggtgttgaagtgtataagtggataaactaccttctcccatcatcttaaacttttgggttgaattggtccgtgcgtccactctaacatttcaatcatgatgtcttatgtgctgcaaaagttggagtggctgatgcatgttttgatgcaggtacatgttcagtctgaccctgctggtcgtttgatagttactggagagcccgagcaattggataacccatggggtgtcactccattcaagaaggtcattaggttgccttcccgcattgatcctcaccaaacctctgcagttgtcaccctccatgggcagctatttgtgcgtgcaccatttgaacaatcaaaataatgttgatgccacaatgaagcacaatactacaagtacgccctagtttccaatggtttgccttatgagtgggattataccgttatgacatgagcttagaagtgctcaccctgaccgtcctccaaaactagttccttgctgattttaatgcttcaagcctcctccatgctagatctctcatgtatcaagttaaactcattagttgacatagttctgtgtgtattcggttgtgcccgttggctgtgaattgtagctaaagcaaagttactaagcctagagtttaggatgttgatagtctgatgctcaacatgtccatggtttcttttcaatttagtcggcatagaatgtactgtttgtagcaatgtagtatgtagcttgttcccagtatttaagctccggaacatggagagcggtagagattcattgtatgtaactgttgctggtgcattgcaattgctattcaacttgtattgtcaaacaatctgaaactctatggcctccttgtaccctgccttcgtattgtgtgactttgtgtttccgtactagctgaaagaggaagataaatgactgccaaggacaccgtgtttagttgaagcctttttccatctcaaaaagagagaaaat

SEQ ID NO: 83384 - DNA, 2069 bp, Zea Mays
gttcaaaaccattctccactgttgctcctgtcctgttcctccgcttcctctgtctctgtctcgtcgtctcccccatctggccatctccggctagggtttgccctcccaccacgtccgaggtctagctcgtctccgccactgccggaccaaggatgtcgcaagagcaaggtatggaggagccgccgccgcaggcggtaggcgaggcacaatcggccgccgatgtccccatgagcgaggccgcagcggtggaggatgaggatgaggaacccgtcatgggggaggggcagggcggtgaaagcgggaccgccgatgccgttgattccgtcaaggcttcagtgaagcccgaagcagagggcgcggaggaaggggacagagaggagcttaatggtggcccgacggcggatttgactgacgaggttgtgaaattggagaacggggatggccccgtgccggtgggtggctccgcggatgagtgcggagctggagatggcggtgttgataagggcctggttggtcagaatgagcctgttgtgaaccagcttgtgctggtgcaggctgaggaggagctggcattgtctaagatctcaaacagttccttcatgttcgattacaccactgggggtgatgactcagggactgaggaggagcaggctgccttcatgaaggagctggagcgtttccacagggagaaaatgttggagttcaagccccctaagttttatggtgaaggattgaattgcctcaaattgtggagacaagttactggattgggtggctatgatcaggtgacatcatgcaagctgtggcgtcaagtgggagagtcattcaaacctccaaagacatgtacaactgtttcatggactttccgtaacttctatgagaaggcactccttgaatatgagaaacacaaaatcgaaacaggagagttccaagtagcttcatctgctctaccagatcgagttggttctgagagccaggtgggtggaagccacgtatctggttctggaagagccagaagagaatctgcaactcgtgcaatgcaaggctggcattctcaccgcctactaggcaatggtgaaaatgctgatcctataattaaggataaagggcctattgtcttaaagaaggataaaactcctaaaagcagtggttctgccaagaggaaaaggataccatcccttgaagatgacatggtgataccttataaatccgataagctacaaaagattgctatgaagtctatgcattggttcctggccttctgcgtgaagaggtacatgttcagtctgaccctgctggtcgtttgatagttactggagagcccgagcaattggataacccatggggtgtcactccattcaagaaggtcattaggttgccttcccgcattgatcctcaccaaacctctgcagttgtcaccctccatgggcagctatttgtgcgtgcaccatttgaacaatcaaaataatgttgatgccacaatgaagcacaatactacaagtttgccttatgagtgggattataccgttatgacatgagcttagaagtgctcaccctgaccgtcctccaaaactagttccttgctgattttaatgcttcaagcctcctccatgctagatctctcatgtatcaagttaaactcattagttgacatagttctgtgtgtattcggttgtgcccgttggctgtgaattgtagctaaagcaaagttactaagcctagagtttaggatgttgatagtctgatgctcaacatgtccatggtttcttttcaatttagtcggcatagaatgtactgtttgtagcaatgtagtatgtagcttgttcccagtatttaagctccggaacatggagagcggtagagattcattgtatgtaactgttgctggtgcattgcaattgctattcaacttgtattgtcaaacaatctgaaactctatggcctccttgtaccctgccttcgtattgtgtgactttgtgtttccgtactagctgaaagaggaagataaatgactgccaaggacaccgtgtttagttgaagcctttttccatctcaaaaagagagaaaat

SEQ ID NO: 83385 - DNA, 2180 bp, Zea Mays
gttcaaaaccattctccactgttgctcctgtcctgttcctccgcttcctctgtctctgtctcgtcgtctcccccatctggccatctccggctagggtttgccctcccaccacgtccgaggtctagctcgtctccgccactgccggaccaaggatgtcgcaagagcaaggtatggaggagccgccgccgcaggcggtaggcgaggcacaatcggccgccgatgtccccatgagcgaggccgcagcggtggaggatgaggatgaggaacccgtcatgggggaggggcagggcggtgaaagcgggaccgccgatgccgttgattccgtcaaggcttcagtgaagcccgaagcagagggcgcggaggaaggggacagagaggagcttaatggtggcccgacggcggatttgactgacgaggttgtgaaattggagaacggggatggccccgtgccggtgggtggctccgcggatgagtgcggagctggagatggcggtgttgataagggcctggttggtcagaatgagcctgttgtgaaccagcttgtgctggtgcaggctgaggaggagctggcattgtctaagatctcaaacagttccttcatgttcgattacaccactgggggtgatgactcagggactgaggaggagcaggctgccttcatgaaggagctggagcgtttccacagggagaaaatgttggagttcaagccccctaagttttatggtgaaggattgaattgcctcaaattgtggagacaagttactggattgggtggctatgatcaggtgacatcatgcaagctgtggcgtcaagtgggagagtcattcaaacctccaaagacatgtacaactgtttcatggactttccgtaacttctatgagaaggcactccttgaatatgagaaacacaaaatcgaaacaggagagttccaagtagcttcatctgctctaccagatcgagttggttctgagagccagaagagaatctgcaactcgtgcaatgcaaggctggcattctcaccgcctactaggcaatggtgaaaatgctgatcctataattaaggataaagggcctattgtcttaaagaaggataaaactcctaaaagcagtggttctgccaagaggaaaaggataccatcccttgaagatgacatggtgataccttataaatccgataagctacaaaatgactcaatggttattgacatgggccctcctgctgattgggtgaaaataaatgttaggaaaaccttctcagttccgttaattcctgaagcaaaatttggagtgttgaatgccagtgaatgtgtgaactgctgattctttatgaaataaagattgctatgaagtctatgcattggttcctggccttctgcgtgaagaggtacatgttcagtctgaccctgctggtcgtttgatagttactggagagcccgagcaattggataacccatggggtgtcactccattcaagaaggtcattaggttgccttcccgcattgatcctcaccaaacctctgcagttgtcaccctccatgggcagctatttgtgcgtgcaccatttgaacaatcaaaataatgttgatgccacaatgaagcacaatactacaagtttgccttatgagtgggattataccgttatgacatgagcttagaagtgctcaccctgaccgtcctccaaaactagttccttgctgattttaatgcttcaagcctcctccatgctagatctctcatgtatcaagttaaactcattagttgacatagttctgtgtgtattcggttgtgcccgttggctgtgaattgtagctaaagcaaagttactaagcctagagtttaggatgttgatagtctgatgctcaacatgtccatggtttcttttcaatttagtcggcatagaatgtactgtttgtagcaatgtagtatgtagcttgttcccagtatttaagctccggaacatggagagcggtagagattcattgtatgtaactgttgctggtgcattgcaattgctattcaacttgtattgtcaaacaatctgaaactctatggcctccttgtaccctgccttcgtattgtgtgactttgtgtttccgtactagctgaaagaggaagataaatgactgccaaggacaccgtgtttagttgaagcctttttccatctcaaaaagagagaaaat

SEQ ID NO: 83386 - DNA, 2367 bp, Zea Mays
gttcaaaaccattctccactgttgctcctgtcctgttcctccgcttcctctgtctctgtctcgtcgtctcccccatctggccatctccggctagggtttgccctcccaccacgtccgaggtctagctcgtctccgccactgccggaccaaggatgtcgcaagagcaaggtatggaggagccgccgccgcaggcggtaggcgaggcacaatcggccgccgatgtccccatgagcgaggccgcagcggtggaggatgaggatgaggaacccgtcatgggggaggggcagggcggtgaaagcgggaccgccgatgccgttgattccgtcaaggcttcagtgaagcccgaagcagagggcgcggaggaaggggacagagaggagcttaatggtggcccgacggcggatttgactgacgaggttgtgaaattggagaacggggatggccccgtgccggtgggtggctccgcggatgagtgcggagctggagatggcggtgttgataagggcctggttggtcagaatgagcctgttgtgaaccagcttgtgctggtgcaggctgaggaggagctggcattgtctaagatctcaaacagttccttcatgttcgattacaccactgggggtgatgactcagggactgaggaggagcaggctgccttcatgaaggagctggagcgtttccacagggagaaaatgttggagttcaagccccctaagttttatggtgaaggattgaattgcctcaaattgtggagacaagttactggattgggtggctatgatcaggtgacatcatgcaagctgtggcgtcaagtgggagagtcattcaaacctccaaagacatgtacaactgtttcatggactttccgtaacttctatgagaaggcactccttgaatatgagaaacacaaaatcgaaacaggagagttccaagtagcttcatctgctctaccagatcgagttggttctgagagccaggtgggtggaagccacgtatctggttctggaagagccagaagagaatctgcaactcgtgcaatgcaaggctggcattctcaccgcctactaggcaatggtgaaaatgctgatcctataattaaggataaagggcctattgtcttaaagaaggataaaactcctaaaagcagtggttctgccaagaggaaaaggataccatcccttgaagatgacatggtgataccttataaatccgataagctacagtaaagccctgtccacttataatattcacgcaaaccctgcattccattttcctatctattgctgttaaaaaatcagtgagaatttcaacactgcttcacataattagcttcattctgttcttttgcatggatagtactagtccttgttcctccttcctccttggacttcgattgatttcatgaaatattgctatctgacagaaatgactcaatggttattgacatgggccctcctgctgattgggtgaaaataaatgttaggaaaaccgtgagtatataaagattgctatgaagtctatgcattggttcctggccttctgcgtgaagaggtacatgttcagtctgaccctgctggtcgtttgatagttactggagagcccgagcaattggataacccatggggtgtcactccattcaagaaggtcattaggttgccttcccgcattgatcctcaccaaacctctgcagttgtcaccctccatgggcagctatttgtgcgtgcaccatttgaacaatcaaaataatgttgatgccacaatgaagcacaatactacaagtacgccctagtttccaatggtttgccttatgagtgggattataccgttatgacatgagcttagaagtgctcaccctgaccgtcctccaaaactagttccttgctgattttaatgcttcaagcctcctccatgctagatctctcatgtatcaagttaaactcattagttgacatagttctgtgtgtattcggttgtgcccgttggctgtgaattgtagctaaagcaaagttactaagcctagagtttaggatgttgatagtctgatgctcaacatgtccatggtttcttttcaatttagtcggcatagaatgtactgtttgtagcaatgtagtatgtagcttgttcccagtatttaagctccggaacatggagagcggtagagattcattgtatgtaactgttgctggtgcattgcaattgctattcaacttgtattgtcaaacaatctgaaactctatggcctccttgtaccctgccttcgtattgtgtgactttgtgtttccgtactagctgaaagaggaagataaatgactgccaaggacaccgtgtttagttgaagcctttttccatctcaaaaagagagaaaat

SEQ ID NO: 83387 - DNA, 2228 bp, Zea Mays
cacggtttcagttcaaaaccattctccactgttgctcctgtcctgttcctccgcttcctctgtctctgtctcgtcgtctcccccatctggccatctccggctagggtttgccctcccaccacgtccgaggtctagctcgtctccgccactgccggaccaaggatgtcgcaagagcaaggtatggaggagccgccgccgcaggcggtaggcgaggcacaatcggccgccgatgtccccatgagcgaggccgcagcggtggaggatgaggatgaggaacccgtcatgggggaggggcagggcggtgaaagcgggaccgccgatgccgttgattccgtcaaggcttcagtgaagcccgaagcagagggcgcggaggaaggggacagagaggagcttaatggtggcccgacggcggatttgactgacgaggttgtgaaattggagaacggggatggccccgtgccggtgggtggctccgcggatgagtgcggagctggagatggcggtgttgataagggcctggttggtcagaatgagcctgttgtgaaccagcttgtgctggtgcaggctgaggaggagctggcattgtctaagatctcaaacagttccttcatgttcgattacaccactgggggtgatgactcagggactgaggaggagcaggctgccttcatgaaggagctggagcgtttccacagggagaaaatgttggagttcaagccccctaagttttatggtgaaggattgaattgcctcaaattgtggagacaagttactggattgggtggctatgatcaggtgacatcatgcaagctgtggcgtcaagtgggagagtcattcaaacctccaaagacatgtacaactgtttcatggactttccgtaacttctatgagaaggcactccttgaatatgagaaacacaaaatcgaaacaggagagttccaagtagcttcatctgctctaccagatcgagttggttctgagagccaggtgggtggaagccacgtatctggttctggaagagccagaagagaatctgcaactcgtgcaatgcaaggctggcattctcaccgcctactaggcaatggtgaaaatgctgatcctataattaaggataaagggcctattgtcttaaagaaggataaaactcctaaaagcagtggttctgccaagaggaaaaggataccatcccttgaagatgacatggtgataccttataaatccgataagctacaaaatgactcaatggttattgacatgggccctcctgctgattgggtgaaaataaatgttaggaaaaccttctcagttccgttaattcctgaagcaaaatttggagtgttgaatgccagtgaatgtgtgaactgctgattctttatgaaataaagattgctatgaagtctatgcattggttcctggccttctgcgtgaagaggtacatgttcagtctgaccctgctggtcgtttgatagttactggagagcccgagcaattggataacccatggggtgtcactccattcaagaaggtcattaggttgccttcccgcattgatcctcaccaaacctctgcagttgtcaccctccatgggcagctatttgtgcgtgcaccatttgaacaatcaaaataatgttgatgccacaatgaagcacaatactacaagtttgccttatgagtgggattataccgttatgacatgagcttagaagtgctcaccctgaccgtcctccaaaactagttccttgctgattttaatgcttcaagcctcctccatgctagatctctcatgtatcaagttaaactcattagttgacatagttctgtgtgtattcggttgtgcccgttggctgtgaattgtagctaaagcaaagttactaagcctagagtttaggatgttgatagtctgatgctcaacatgtccatggtttcttttcaatttagtcggcatagaatgtactgtttgtagcaatgtagtatgtagcttgttcccagtatttaagctccggaacatggagagcggtagagattcattgtatgtaactgttgctggtgcattgcaattgctattcaacttgtattgtcaaacaatctgaaactctatggcctccttgtaccctgccttcgtattgtgtgactttgtgtttccgtactagctgaaagaggaagataaatgactgccaaggacaccgtgtttagttgaagcctttttccatctcaaaaagagagaaaat

SEQ ID NO: 83388 - DNA, 2449 bp, Zea Mays
cacggtttcagttcaaaaccattctccactgttgctcctgtcctgttcctccgcttcctctgtctctgtctcgtcgtctcccccatctggccatctccggctagggtttgccctcccaccacgtccgaggtctagctcgtctccgccactgccggaccaaggatgtcgcaagagcaaggtatggaggagccgccgccgcaggcggtaggcgaggcacaatcggccgccgatgtccccatgagcgaggccgcagcggtggaggatgaggatgaggaacccgtcatgggggaggggcagggcggtgaaagcgggaccgccgatgccgttgattccgtcaaggcttcagtgaagcccgaagcagagggcgcggaggaaggggacagagaggagcttaatggtggcccgacggcggatttgactgacgaggttgtgaaattggagaacggggatggccccgtgccggtgggtggctccgcggatgagtgcggagctggagatggcggtgttgataagggcctggttggtcagaatgagcctgttgtgaaccagcttgtgctggtgcaggctgaggaggagctggcattgtctaagatctcaaacagttccttcatgttcgattacaccactgggggtgatgactcagggactgaggaggagcaggctgccttcatgaaggagctggagcgtttccacagggagaaaatgttggagttcaagccccctaagttttatggtgaaggattgaattgcctcaaattgtggagacaagttactggattgggtggctatgatcaggtgacatcatgcaagctgtggcgtcaagtgggagagtcattcaaacctccaaagacatgtacaactgtttcatggactttccgtaacttctatgagaaggcactccttgaatatgagaaacacaaaatcgaaacaggagagttccaagtagcttcatctgctctaccagatcgagttggttctgagagccaggtgggtggaagccacgtatctggttctggaagagccagaagagaatctgcaactcgtgcaatgcaaggctggcattctcaccgcctactaggcaatggtgaaaatgctgatcctataattaaggataaagggcctattgtcttaaagaaggataaaactcctaaaagcagtggttctgccaagaggaaaaggataccatcccttgaagatgacatggtgataccttataaatccgataagctacagtaaagccctgtccacttataatattcacgcaaaccctgcattccattttcctatctattgctgttaaaaaatcagtgagaatttcaacactgcttcacataattagcttcattctgttcttttgcatggatagtactagtccttgttcctccttcctccttggacttcgattgatttcatgaaatattgctatctgacagaaatgactcaatggttattgacatgggccctcctgctgattgggtgaaaataaatgttaggaaaaccttctcagttccgttaattcctgaagcaaaatttggagtgttgaatgccagtgaatgtgtgaactgctgattctttatgaaataaagattgctatgaagtctatgcattggttcctggccttctgcgtgaagaggtacatgttcagtctgaccctgctggtcgtttgatagttactggagagcccgagcaattggataacccatggggtgtcactccattcaagaaggtcattaggttgccttcccgcattgatcctcaccaaacctctgcagttgtcaccctccatgggcagctatttgtgcgtgcaccatttgaacaatcaaaataatgttgatgccacaatgaagcacaatactacaagtacgccctagtttccaatggtttgccttatgagtgggattataccgttatgacatgagcttagaagtgctcaccctgaccgtcctccaaaactagttccttgctgattttaatgcttcaagcctcctccatgctagatctctcatgtatcaagttaaactcattagttgacatagttctgtgtgtattcggttgtgcccgttggctgtgaattgtagctaaagcaaagttactaagcctagagtttaggatgttgatagtctgatgctcaacatgtccatggtttcttttcaatttagtcggcatagaatgtactgtttgtagcaatgtagtatgtagcttgttcccagtatttaagctccggaacatggagagcggtagagattcattgtatgtaactgttgctggtgcattgcaattgctattcaacttgtattgtcaaacaatctgaaactctatggcctccttgtaccctgccttcgtattgtgtgactttgtgtttccgtactagctgaaagaggaagataaatgactgccaaggacaccgtgtttagttgaagcctttttccatctcaaaaagagagaaaat

SEQ ID NO: 83389 - DNA, 2157 bp, Zea Mays
gcacggtttcagttcaaaaccattctccactgttgctcctgtcctgttcctccgcttcctctgtctctgtctcgtcgtctcccccatctggccatctccggctagggtttgccctcccaccacgtccgaggtctagctcgtctccgccactgccggaccaaggatgtcgcaagagcaaggtatggaggagccgccgccgcaggcggtaggcgaggcacaatcggccgccgatgtccccatgagcgaggccgcagcggtggaggatgaggatgaggaacccgtcatgggggaggggcagggcggtgaaagcgggaccgccgatgccgttgattccgtcaaggcttcagtgaagcccgaagcagagggcgcggaggaaggggacagagaggagcttaatggtggcccgacggcggatttgactgacgaggttgtgaaattggagaacggggatggccccgtgccggtgggtggctccgcggatgagtgcggagctggagatggcggtgttgataagggcctggttggtcagaatgagcctgttgtgaaccagcttgtgctggtgcaggctgaggaggagctggcattgtctaagatctcaaacagttccttcatgttcgattacaccactgggggtgatgactcagggactgaggaggagcaggctgccttcatgaaggagctggagcgtttccacagggagaaaatgttggagttcaagccccctaagttttatggtgaaggattgaattgcctcaaattgtggagacaagttactggattgggtggctatgatcaggtgacatcatgcaagctgtggcgtcaagtgggagagtcattcaaacctccaaagacatgtacaactgtttcatggactttccgtaacttctatgagaaggcactccttgaatatgagaaacacaaaatcgaaacaggagagttccaagtagcttcatctgctctaccagatcgagttggttctgagagccaggtgggtggaagccacgtatctggttctggaagagccagaagagaatctgcaactcgtgcaatgcaaggctggcattctcaccgcctactaggcaatggtgaaaatgctgatcctataattaaggataaagggcctattgtcttaaagaaggataaaactcctaaaagcagtggttctgccaagaggaaaaggataccatcccttgaagatgacatggtgataccttataaatccgataagctacaaaatgactcaatggttattgacatgggccctcctgctgattgggtgaaaataaatgttaggaaaaccgtgagtatataaagattgctatgaagtctatgcattggttcctggccttctgcgtgaagaggtacatgttcagtctgaccctgctggtcgtttgatagttactggagagcccgagcaattggataacccatggggtgtcactccattcaagaaggtcattaggttgccttcccgcattgatcctcaccaaacctctgcagttgtcaccctccatgggcagctatttgtgcgtgcaccatttgaacaatcaaaataatgttgatgccacaatgaagcacaatactacaagtttgccttatgagtgggattataccgttatgacatgagcttagaagtgctcaccctgaccgtcctccaaaactagttccttgctgattttaatgcttcaagcctcctccatgctagatctctcatgtatcaagttaaactcattagttgacatagttctgtgtgtattcggttgtgcccgttggctgtgaattgtagctaaagcaaagttactaagcctagagtttaggatgttgatagtctgatgctcaacatgtccatggtttcttttcaatttagtcggcatagaatgtactgtttgtagcaatgtagtatgtagcttgttcccagtatttaagctccggaacatggagagcggtagagattcattgtatgtaactgttgctggtgcattgcaattgctattcaacttgtattgtcaaacaatctgaaactctatggcctccttgtaccctgccttcgtattgtgtgactttgtgtttccgtactagctgaaagaggaagataaatgactgccaaggacaccgtgtttagttgaagcctttttccatctcaaaaagagagaaaat

SEQ ID NO: 83390 - DNA, 2453 bp, Zea Mays
ttctgacctgggtaattttttatgctgtcaagcagttggaacttgaaaaccttgaatatgaatatgacaaatggtgaaatgggagtagcccgctagcccacgtaagcacggtttcagttcaaaaccattctccactgttgctcctgtcctgttcctccgcttcctctgtctctgtctcgtcgtctcccccatctggccatctccggctagggtttgccctcccaccacgtccgaggtctagctcgtctccgccactgccggaccaaggatgtcgcaagagcaaggtatggaggagccgccgccgcaggcggtaggcgaggcacaatcggccgccgatgtccccatgagcgaggccgcagcggtggaggatgaggatgaggaacccgtcatgggggaggggcagggcggtgaaagcgggaccgccgatgccgttgattccgtcaaggcttcagtgaagcccgaagcagagggcgcggaggaaggggacagagaggagcttaatggtggcccgacggcggatttgactgacgaggttgtgaaattggagaacggggatggccccgtgccggtgggtggctccgcggatgagtgcggagctggagatggcggtgttgataagggcctggttggtcagaatgagcctgttgtgaaccagcttgtgctggtgcaggctgaggaggagctggcattgtctaagatctcaaacagttccttcatgttcgattacaccactgggggtgatgactcagggactgaggaggagcaggctgccttcatgaaggagctggagcgtttccacagggagaaaatgttggagttcaagccccctaagttttatggtgaaggattgaattgcctcaaattgtggagacaagttactggattgggtggctatgatcaggtgacatcatgcaagctgtggcgtcaagtgggagagtcattcaaacctccaaagacatgtacaactgtttcatggactttccgtaacttctatgagaaggcactccttgaatatgagaaacacaaaatcgaaacaggagagttccaagtagcttcatctgctctaccagatcgagttggttctgagagccaggtgggtggaagccacgtatctggttctggaagagccagaagagaatctgcaactcgtgcaatgcaaggctggcattctcaccgcctactaggcaatggtgaaaatgctgatcctataattaaggataaagggcctattgtcttaaagaaggataaaactcctaaaagcagtggttctgccaagaggaaaaggataccatcccttgaagatgacatggtgataccttataaatccgataagctacagtaaagccctgtccacttataatattcacgcaaaccctgcattccattttcctatctattgctgttaaaaaatcagtgagaatttcaacactgcttcacataattagcttcattctgttcttttgcatggatagtactagtccttgttcctccttcctccttggacttcgattgatttcatgaaatattgctatctgacagaaatgactcaatggttattgacatgggccctcctgctgattgggtgaaaataaatgttaggaaaaccaaagattgctatgaagtctatgcattggttcctggccttctgcgtgaagaggtacatgttcagtctgaccctgctggtcgtttgatagttactggagagcccgagcaattggataacccatggggtgtcactccattcaagaaggtcattaggttgccttcccgcattgatcctcaccaaacctctgcagttgtcaccctccatgggcagctatttgtgcgtgcaccatttgaacaatcaaaataatgttgatgccacaatgaagcacaatactacaagtttgccttatgagtgggattataccgttatgacatgagcttagaagtgctcaccctgaccgtcctccaaaactagttccttgctgattttaatgcttcaagcctcctccatgctagatctctcatgtatcaagttaaactcattagttgacatagttctgtgtgtattcggttgtgcccgttggctgtgaattgtagctaaagcaaagttactaagcctagagtttaggatgttgatagtctgatgctcaacatgtccatggtttcttttcaatttagtcggcatagaatgtactgtttgtagcaatgtagtatgtagcttgttcccagtatttaagctccggaacatggagagcggtagagattcattgtatgtaactgttgctggtgcattgcaattgctattcaacttgtattgtcaaacaatctgaaactctatggcctccttgtaccctgccttcgtattgtgtgactttgtgtttccgtactagctgaaagaggaagataaatgactgccaaggacaccgtgtttagttgaagcctttttccatctcaaaaagagagaaaat

SEQ ID NO: 83391 - DNA, 412 bp, Zea Mays
acgtagtgtgacgtcgaggcgaaagcaccaaacccccaccaccactgcggcacaaaaccccaccccaagcaggacaacgagcaggcaccggcgcaccgcaatcaggccacgcccaaatatcccagacgaagggtaaccgaacaccgttgcgcgccgccggaacccacgagccccagaggccaaagagaaaagcccgaaatcaacggcgcagtcgcgcggtcacttcagagttaagactggaacaaaacgtggagagtgggcaggattaccggcggcaaaggcggggcgagggagagtgggtttacaggcaggcaggaagacagaagaccacaatgcggaggaagccggaacggcggatggctggccccgaggatactgtggagcggcacgggtttgcccttgggtggtggta

SEQ ID NO: 83392 - DNA, 1181 bp, Zea Mays
ctcccctccatcccactccacgccacccccacaccccaccggccaagcaaacacgctgcacatttcagttcagacagtccaagaacagcaccaagaaagactccttgccgctcttcttgcttggctactgactaggagagctccctgccgctggttgatcaacagagaggcaggcggacggcatggtcagctccctgccgctgtcctcgttgctgctgctgctgctgctgctctccgcagccagcttcggcggcggcgtaaggctcggcgatggtggctacgaggactggaggctcggcaccgccacctacgtcaaggagttccagtcacaccctctcaatgacggcggtggcgcctgcgggtacggcgacctggacatcttcaggtacgggcgctacacggcggggctgagcgcggcgctgttcgggcgcggcggcgcctgcggcggctgctacgagctgcggtgcgtcaaccacatccagtggtgcctccggggcagccccacggtggtggtgacggcgacggacttctgcccggccaacatgggcctcgccgacgacgacgccggcggctggtgcaacttcccgcgggagcacctcgagctgtcggaggccgcgttcctccgcgtcgccaaggccaaggccggcatcgtgccggtgcagttccggagggtgagctgcgacagggcgggcggcatgcggttcaccatcaccggtagcgcccacttcctgcaggtgctcatcaccaacgtggcggcggacggcgaggtggcggccgtgaaggtgaagggctcgaggacggggtggatcccgatggggcggaactggggccagaactggcagtgcgacgccgacctccgcgcccagccgctgtcgttcgaggtcaccggcgggaggggcaggacggtcaccgcctacagcgtggcgccggcggactggatgttcgcgcagacgttcgagggcaagcagttcgccgagtagagatcgacgccgaaaaccaagtctccggcggtggtgatgcaatgggcagacccaagagggcgatgctgattattccacaccacaagttcatgatgtctttcagcctgaagtaatgtttgaataagctcagcataaactgtgaaatgtctcacggcattgttgttgaaagattctttcggcgggaagcataaaagacaaagt

SEQ ID NO: 83393 - DNA, 752 bp, Zea Mays
aaaataaagggaaatacccataaatggacaacaccaacgccttcccccacctctgtgccgccggctccgacgccttccaccgcaccgacgccgctggctccaccgcctacccctcctcgacgccactggtcctgttcacgccttgagccctctactggacgtcaagagaagtgctgccctgcgagttcgaatccagaggctctccatgacttcatctgtctctggctcttcaaaatcacctcgtaagcctccggtgtcgtaccggaaatggatggatgcagataatcctgtttgttgcaagtgctcaggtgttatgttggagctgacctcgtggaccgattccaacccaagcagaggattccttcgttgccaaaagggatcagaagggtgtaatcttttccaatgggaagctgagatcgccagactgagaatgcagctagagaagatcactagtgatcgccagactgaaaatgatttcagctgtagtgtttgttgtaatcttgtgtttgctcacgcgcttgtttcaacatggggctgtggtcgacagtagcaaatcttatgaactgatgtagttgttttggtcagcaatggatagccaagcagtggtgaactgatgtaggtattttggtcagcagtggttatgaattgatgtagttcttttggtcagcaatggatagccaagcagtggtgaactggtgtgtggaatgagctccaccggggcaagggtatttatagagggattagggatgaaa

SEQ ID NO: 83394 - DNA, 756 bp, Zea Mays
aaaataaagggaaatacccataaatggacaacaccaacgccttcccccacctctgtgccgccggctccgacgccttccaccgcaccgacgccgctggctccaccgcctacccctcctcgacgccactggtcctgttcacgccttgagccctctactggacgtcaagagaagtgctgccctgcgagttcgaatccaggcagaggctctccatgacttcatctgtctctggctcttcaaaatcacctcgtaagcctccggtgtcgtaccggaaatggatggatgcagataatcctgtttgttgcaagtgctcaggtgttatgttggagctgacctcgtggaccgattccaacccaagcagaggattccttcgttgccaaaagggatcagaagggtgtaatcttttccaatgggaagctgagatcgccagactgagaatgcagctagagaagatcactagtgatcgccagactgaaaatgatttcagctgtagtgtttgttgtaatcttgtgtttgctcacgcgcttgtttcaacatggggctgtggtcgacagtagcaaatcttatgaactgatgtagttgttttggtcagcaatggatagccaagcagtggtgaactgatgtaggtattttggtcagcagtggttatgaattgatgtagttcttttggtcagcaatggatagccaagcagtggtgaactggtgtgtggaatgagctccaccggggcaagggtatttatagagggattagggatgaaa

SEQ ID NO: 83395 - DNA, 745 bp, Zea Mays
aaaataaagggaaatacccataaatggacaacaccaacgccttcccccacctctgtgccgccggctccgacgccttccaccgcaccgacgccgctggctccaccgcctacccctcctcgacgccactggtcctgttcacgccttgagccctctactggacgtcaagagaagtgctgccctgcgagttcgaatccagaggctctccatgacttcatctgtctctggctcttcaaaatcacctcgtaagcctccggtgtcgtaccggaaatggatggatgcagataatcctgtttgttgcaagtgctcaggtgttatgttggagctgacctcgtggaccgattccaacccaagcagaggattccttcgttgccaaaagaagggtgtaatcttttccaatgggaagctgagatcgccagactgagaatgcagctagagaagatcactagtgatcgccagactgaaaatgatttcagctgtagtgtttgttgtaatcttgtgtttgctcacgcgcttgtttcaacatggggctgtggtcgacagtagcaaatcttatgaactgatgtagttgttttggtcagcaatggatagccaagcagtggtgaactgatgtaggtattttggtcagcagtggttatgaattgatgtagttcttttggtcagcaatggatagccaagcagtggtgaactggtgtgtggaatgagctccaccggggcaagggtatttatagagggattagggatgaaa

SEQ ID NO: 83396 - DNA, 2839 bp, Zea Mays
gttgagtgtgagtccggccgcaattcttaaaccatgggcgagtcgtgtgtggtttggctagttttccatccatcatgaaactgaagcgaaccacagcacacaagcgatgagcaaacccagcaaagctggtggtggaagcacaagataactgaaggcaggaattaatgggagggaaattccacattgcaaggatgaacaccttccatctttgcagccgcatgcattcggatccccgctcctccccaaatcccccttggccctgcaataaatctcacctccccctcgcactcgctgcattgctcttcgcccggaaatcgtctcgcttacttcgttccttctctgcctctgttgctccccagaggttcttggctggaaaacattgcagcaggagaagagatggacgcagacaccttcccagtggggctgcgcgtgctcgccgtcgacgatgaccgcgtctgcctcaagatcctagagaggcagctgaagtgttgcaactacaacacgacggtggtgacggatgcccagacggcgctggacatgctcagggagaggaaggacgggaaccagttcgacctggtgatcagcgacgtcgtcatgaccaaaatggacggcttcaagctcctcgagctcatcggcctggagatggatctcccagtcatcatgctatccgcaaacagcgagacacagactataatgaaaggtataaagcatggggcctgtgattatatggtaaagccagtgcgcctcgaacagcttaggggcatatggacacatgtggtgaagaacagtaagattgatccaaggaacaacatcggcagtgacagtgatgatgttgttcagaagttgccatctggggatggtgataaaggtgagaaggttggagaaacccgccaaaagaagtatccaaagaaaaacaaaaagactgtggatgttgctgatgaggataacgaaaaaacatcagcccagaagaagcaaagggtccaatggtgtggtgaactacatcagaagtttgtacaagctgtccgtcagattggcattgatagggctgttcctaagaaaatattagaaatcatggatgtggaaggccttactagagagaatgtcgccagtcatctgcagaagtaccgaatctaccttagaaagctcggtgatggcacactgaggagttctagtccatttgctgatgaaactgaagcatttcggagaaacatgaatgtcccatccttcattagctcttcgagctcaagcaaccattttgcaaagatgaattcctcatcactaattggaacggagacattgctacccacagagtcagtttatatcatgagcccccagaaaaacttgggcatttctcggtcaaacatggaaccagttagccatggtgttaacttacccaaagatgttattcctatgccagtgcaggatattagcagattcatttcttctggcaagtcctatgcacctgtatggagtgatgggctgctaggtagaagccagtgcttcccttctggtccttctggcagctcctttgcaaatatttcaaatagtgtggtgttgaacgcaagcaaacctttctctgttgatatttctgggagatcattagcaaatggctcaaatgacaggccaccattgacctcgaacatgtgcttttcttcgtctcattcttgcagctcctatgcgagcatattgggtggcaagattttgggatcaagcagacgtattcctttcgaagacatagcagatggtgagatgttggctcctggtaatttaccattgcagtctcctcagttggtgaaacagccttcttctgctggcctatttaacgaggttgccagagacgttcaccaatttgcaggacttagcaactcctggaaagttgctgtgccgccaaggttttctgatcttggtcataatgttggaacatctgaaggtcattcgcagggtaacattttcaagatcaaccggttgtcaagacttgcacgctcctctgcacagattccaacgttcagaaatgagtatcagaagaaaaccacaggaatcatggggaaagccgtaccagtggtgctgaatggcggtggtgcaaatgacaacctccatggagttagcaccgttaatcagcaagctgttaatgaccaagtgaataacgaattcttcatgggaacaaatgaggcacataatgcggagagtgatgatttggatgatttccttgcgtacttagttaatcaagatttcatcaacaatggtgattctttcattgacagggactgagaatctgccccttgactctggaagagagatgctgctgaccaattcatggttcttgcatgttgtatgaacaaatttgcactgtttgtagtaggctagctaggagcaggccatcttggatggaatccccatgtttctctagtgtagtcatgctggttctcttatgtatcagttgtagcttttaacctgtggtgttcagtttggtgggaggtgtgggtgccacccctgccaaactcagaactatgtgttcctctttggcttgaattttggtggtcacttttagttttatgtaaaacaacctactctctcatagtccttcggatgcatggggatcataaaggattgaggaggattaaatctcttcctattcaaaattaagtaggaaggaatttaatccactccaatccctctcaatccacccctaaccgaacaaggccttaggggtcttttgttaagtgtgatcatagacaaagttatgtcagttagatccagtggtatgattttcatgaactatttgaactgttgtatttcatcagttttgaatcaatgaaatgctgctatctcttgaaattat

SEQ ID NO: 83397 - DNA, 3690 bp, Zea Mays
gtaccaccgccctgcccgtagctcgccgcgtaccgcctgtcctcgcgcccgctgcgcttcctccgccgctgcctgcgcgtgcgcctgctcggccgccacgagatccggcgggacccgcgcgagctcgccctgcgcggccgcgtcccccacctcccgcctctacgcctgcctctcctgcgccgccgtcttctgcccctcccacgctaccacgcacgcctccgcctccgcgggcccggccaccagatcgccgtcgacgtcgaccgcatcgagctcttctgtgccgcctgcggggaccaggtctacgatcccgacttcgaccacgccgtcttcctcgcctagtcctcctcgcttctcccctccacctccacctccacctcctccgcctccccggccctccgcaagcgccggcgcgttgattaccgcgcgtggttgcggacctcgagcatcgcggacgcagaatagggaggggactggacgacagctgttgggggcgtggcggttgcagctttcgcaagggaagatggaggcgtgcgtgcagagggagaggcgaggcacaggagatggtctacactattgacttaattgttagtagagatttataattccacccaattccctaaaatctcagtaacggccctcgcgaagacggttgagtgtgagtccggccgcaattcttaaaccatgggcgagtcgtgtgtggtttggctagttttccatccatcatgaaactgaagcgaaccacagcacacaagcgatgagcaaacccagcaaagctggtggtggaagcacaagataactgaaggcaggaattaatgggagggaaattccacattgcaaggatgaacaccttccatctttgcagccgcatgcattcggatccccgctcctccccaaatcccccttggccctgcaataaatctcacctccccctcgcactcgctgcattgctcttcgcccggaaatcgtctcgcttacttcgttccttctctgcctctgttgctccccagaggttcttggctggaaaacattgcagcaggtaagaaaattcgagtcttctcgggttccttgcggggattatttttggccggcagttgtttccttggaactgatcgtgtacgttttcgatataggagaagagatggacgcagacaccttcccagtggggctgcgcgtgctcgccgtcgacgatgaccgcgtctgcctcaagatcctagagaggcagctgaagtgttgcaactacaacacgacggtggtgacggatgcccagacggcgctggacatgctcagggagaggaaggacgggaaccagttcgacctggtgatcagcgacgtcgtcatgaccaaaatggacggcttcaagctcctcgagctcatcggcctggagatggatctcccagtcatcatgctatccgcaaacagcgagacacagactataatgaaaggtataaagcatggggcctgtgattatatggtaaagccagtgcgcctcgaacagcttaggggcatatggacacatgtggtgaagaacagtaagattgatccaaggaacaacatcggcagtgacagtgatgatgttgttcagaagttgccatctggggatggtgataaaggtgagaaggttggagaaacccgccaaaagaagtatccaaagaaaaacaaaaagactgtggatgttgctgatgaggataacgaaaaaacatcagcccagaagaagcaaagggtccaatggtgtggtgaactacatcagaagtttgtacaagctgtccgtcagattggcattgatagggctgttcctaagaaaatattagaaatcatggatgtggaaggccttactagagagaatgtcgccagtcatctgcagaagtaccgaatctaccttagaaagctcggtgatggcacactgaggagttctagtccatttgctgatgaaactgaagcatttcggagaaacatgaatgtcccatccttcattagctcttcgagctcaagcaaccattttgcaaagatgaattcctcatcactaattggaacggagacattgctacccacagagtcagtttatatcatgagcccccagaaaaacttgggcatttctcggtcaaacatggaaccagttagccatggtgttaacttacccaaagatgttattcctatgccagtgcaggatattagcagattcatttcttctggcaagtcctatgcacctgtatggagtgatgggctgctaggtagaagccagtgcttcccttctggtccttctggcagctcctttgcaaatatttcaaatagtgtggtgttgaacgcaagcaaacctttctctgttgatatttctgggagatcattagcaaatggctcaaatgacaggccaccattgacctcgaacatgtgcttttcttcgtctcattcttgcagctcctatgcgagcatattgggtggcaagattttgggatcaagcagacgtattcctttcgaagacatagcagatggtgagatgttggctcctggtaatttaccattgcagtctcctcagttggtgaaacagccttcttctgctggcctatttaacgaggttgccagagacgttcaccaatttgcaggacttagcaactcctggaaagttgctgtgccgccaaggttttctgatcttggtcataatgttggaacatctgaaggtcattcgcagggtaacattttcaagatcaaccggttgtcaagacttgcacgctcctctgcacagattccaacgttcagaaatgagtatcagaagaaaaccacaggaatcatggggaaagccgtaccagtggtaggtttcagagagcaggtggcaccattcagctttgaaaacaacacacgctctacagtgacgctgataggcaattctgctttgtctagttcttcaagcaccagacctggccttaacatcaacaattctgccatgctgacccaggtgctgaatggcggtggtgcaaatgacaacctccatggagttagcaccgttaatcagcaagctgttaatgaccaagtgaataacgaattcttcatgggaacaaatgaggcacataatgcggagagtgatgatttggatgatttccttgcgtacttagttaatcaaggactgagaatctgccccttgactctggaagagagatgctgctgaccaattcatggttcttgcatgttgtatgaacaaatttgcactgtttgtagtaggctagctaggagcaggccatcttggatggaatccccatgtttctctagtgtagtcatgctggttctcttatgtatcagttgtagcttttaacctgtggtgttcagtttggtgggaggtgtgggtgccacccctgccaaactcagaactatgtgttcctctttggcttgaattttggtggtcacttttagttttatgtaaaacaacctactctctcatagtccttcggatgcatggggatcataaaggattgaggaggattaaatctcttcctattcaaaattaagtaggaaggaatttaatccactccaatccctctcaatccacccctaaccgaacaaggccttaggggtcttttgttaagtgtgatcatagacaaagttatgtcagttagatccagtggtatgattttcatgaactatttgaactgttgtatttcatcagttttgaatcaatgaaatgctgctatctcttgaaattat

SEQ ID NO: 83398 - DNA, 1416 bp, Zea Mays
aaaacttgtttctgcccaatttctatcttaatctcaatattgtgtttatgtcaatggaatttgtggtctgtcacttcaaccggaatgtctgtttgccacacacaaagctctagcggcgtacacacatgtattgagtttgaagtaccgaatctaccttagaaagctcggtgatggcacactgaggagttctagtccatttgctgatgaaactgaagcatttcggagaaacatgaatgtcccatccttcattagctcttcgagctcaagcaaccattttgcaaagatgaattcctcatcactaattggaacggagacattgctacccacagagtcagtttatatcatgagcccccagaaaaacttgggcatttctcggtcaaacatggaaccagttagccatggtgttaacttacccaaagatgttattcctatgccagtgcaggatattagcagattcatttcttctggcaagtcctatgcacctgtatggagtgatgggctgctaggtagaagccagtgcttcccttctggtccttctggcagctcctttgcaaatatttcaaatagtgtggtgttgaacgcaagcaaacctttctctgttgatatttctgggagatcattagcaaatggctcaaatgacaggccaccattgacctcgaacatgtgcttttcttcgtctcattcttgcagctcctatgcgagcatattgggtggcaagattttgggatcaagcagacgtattcctttcgaagacatagcagatggtgagatgttggctcctggtaatttaccattgcagtctcctcagttggtgaaacagccttcttctgctggcctatttaacgaggttgccagagacgttcaccaatttgcaggacttagcaactcctggaaagttgctgtgccgccaaggttttctgatcttggtcataatgttggaacatctgaaggtcattcgcagggtaacattttcaagatcaaccggttgtcaagacttgcacgctcctctgcacagattccaacgttcagaaatgagtatcagaagaaaaccacaggaatcatggggaaagccgtaccagtggtaggtttcagagagcaggtggcaccattcagctttgaaaacaacacacgctctacagtgacgctgataggcaattctgctttgtctagttcttcaagcaccagacctggccttaacatcaacaattctgccatgctgacccaggtgctgaatggcggtggtgcaaatgacaacctccatggagttagcaccgttaatcagcaagctgttaatgaccaagtgaataacgaattcttcatgggaacaaatgaggcacataatgcggagagtgatgatttggatgatttccttgcgtacttagttaatcaattgggatagactaaaattaaaaccgc

SEQ ID NO: 83399 - DNA, 2313 bp, Zea Mays
aagcgaaccacagcacacaagcgatgagcaaacccagcaaagctggtggtggaagcacaagataactgaaggcaggaattaatgggagggaaattccacattgcaaggatgaacaccttccatctttgcagccgcatgcattcggatccccgctcctccccaaatcccccttggccctgcaataaatctcacctccccctcgcactcgctgcattgctcttcgcccggaaatcgtctcgcttacttcgttccttctctgcctctgttgctccccagaggttcttggctggaaaacattgcagcaggagaagagatggacgcagacaccttcccagtggggctgcgcgtgctcgccgtcgacgatgaccgcgtctgcctcaagatcctagagaggcagctgaagtgttgcaactacaacacgacggtggtgacggatgcccagacggcgctggacatgctcagggagaggaaggacgggaaccagttcgacctggtgatcagcgacgtcgtcatgaccaaaatggacggcttcaagctcctcgagctcatcggcctggagatggatctcccagtcatcatgctatccgcaaacagcgagacacagactataatgaaaggtataaagcatggggcctgtgattatatggtaaagccagtgcgcctcgaacagcttaggggcatatggacacatgtggtgaagaacagtaagattgatccaaggaacaacatcggcagtgacagtgatgatgttgttcagaagttgccatctggggatggtgataaaggtgagaaggttggagaaacccgccaaaagaagtatccaaagaaaaacaaaaagactgtggatgttgctgatgaggataacgaaaaaacatcagcccagaagaagcaaagggtccaatggtgtggtgaactacatcagaagtttgtacaagctgtccgtcagattggcattgatagggctgttcctaagaaaatattagaaatcatggatgtggaaggccttactagagagaatgtcgccagtcatctgcagaagtaccgaatctaccttagaaagctcggtgatggcacactgaggagttctagtccatttgctgatgaaactgaagcatttcggagaaacatgaatgtcccatccttcattagctcttcgagctcaagcaaccattttgcaaagatgaattcctcatcactaattggaacggagacattgctacccacagagtcagtttatatcatgagcccccagaaaaacttgggcatttctcggtcaaacatggaaccagttagccatggtgttaacttacccaaagatgttattcctatgccagtgcaggatattagcagattcatttcttctggcaagtcctatgcacctgtatggagtgatgggctgctaggtagaagccagtgcttcccttctggtccttctggcagctcctttgcaaatatttcaaatagtgtggtgttgaacgcaagcaaacctttctctgttgatatttctgggagatcattagcaaatggctcaaatgacaggccaccattgacctcgaacatgtgcttttcttcgtctcattcttgcagctcctatgcgagcatattgggtggcaagattttgggatcaagcagacgtattcctttcgaagacatagcagatggtgagatgttggctcctggtaatttaccattgcagtctcctcagttggtgaaacagccttcttctgctggcctatttaacgaggttgccagagacgttcaccaatttgcaggacttagcaactcctggaaagttgctgtgccgccaaggttttctgatcttggtcataatgttggaacatctgaaggtcattcgcagggtaacattttcaagatcaaccggttgtcaagacttgcacgctcctctgcacagattccaacgttcagaaatgagtatcagaagaaaaccacaggaatcatggggaaagccgtaccagtggtaggtttcagagagcaggtggcaccattcagctttgaaaacaacacacgctctacagtgacgctgataggcaattctgctttgtctagttcttcaagcaccagacctggccttaacatcaacaattctgccatgctgacccaggtgctgaatggcggtggtgcaaatgacaacctccatggagttagcaccgttaatcagcaagctgttaatgaccaagtgaataacgaattcttcatgggaacaaatgaggcacataatgcggagagtgatgatttggatgatttccttgcgtacttagttaatcaattacaccaacaataacaaagtctttt

SEQ ID NO: 83400 - DNA, 2092 bp, Zea Mays
cttatcgatccggcatttcacgtgctttctcgatggaggggaaggcggtagccgtcggttgcggtggcgcccgcgtcgatccggcggatgatctcaagtacatctccgggctgagcaccattctcgtggccaccatccaggaagtgaaggaccaggtctcccagatggagttcatcttctgcagccagctcttcccgcacatccaggccaagtcgaagcttgtccaggcgcatctcgccgacacgatgaaggccagtgaggttgagtggaggaagacggaggctggcctggtgaagcagctggaggaggtcagccgtggtaagatgctcgcggaggagagattgctgcaactgggcacctctcttgaggagatgaagaggaagcttgtggattcggagcaattggctgcgaggcatgaggcggagaagaaacagcttctggggaggttggaggatgaaacgaggaaaggtgaggtggtacgtcagctccaaagggagattgaggagaaggacgctgaggtggtcagggagagagaggcacatcagcggctgctgcaggaatttgagcaattggctgcgaggcatgaatctgagaagaaacagcttctggggaggttggaggatgagatggggaatggtgaggtggtacgtcagctccagagggagattgaggagaaggccgctgaggtggtcagggagagagaggcacaccagcggctgcagcagcaggttgacctgaaggataagaatctgcttctggagcagagcaagcggagggacttgattgaggattacactcagctgaagacaaactacaagcatttgaagtctcagtacacctttcttcttgggaagattgaccagcatgaaggctccaagcctcctgaggacattcctgcagatagaagaaacactgaaagtcctccaagtaagaggaaattcaaagatttggagcacacaaacaaggagcgcatccaaatccttcccaacacaagggacctgaagaatgactctgctccaggtgccaaagcccaagctgcccaacatgctagttcagtcaggagtccaatcagaaactcacaccttgccgtgccatctcgcccaatgaatccattggcaaatcattctgccaacaattcaaaactacaagcttcaaccagtgtcgccagcccatgtctaaattggagggagacccgtgcacgcaaagaacaaggtgttgctgatccacacgatgatttccttgatacacctctggaagctgtcaagaataccatcaggaaccctgcaactcccgaagaagcactggcacttgccgcctctcctcaagttatggatttcgacaattcagatgatgaaacccaagatctgaatattgcaactcaagccctccggcacatccccaatatgccagttaccaagcagcaaaacacaatatcggtacatccaccaaagaaagacttcaaatatagagaatcagtgagaaagaaagctgaccgggagaacctgaaaggtgtcgagtgcaagcaatgcaagaagttttatgatgctgttcttcctggtggtcgtgcagatggcgatggtgcaggctctacaagcttacgatgtgagcaccacgatggtgtgtcaaggcatcggtacaggtacgcgccgcctctgacgccggaagggttttggaacattggtttcgaatcagaaatgtagcactacatcaagtagcaggaaaccttcagtgtcctcggtcaccccaagatattgtagcaatgactaagacaagttgcatgtcgctgctcaagttgcagaaatagtcattctgtgattaaggttgatggtaggcagtagctactgtgaatatgttggagatagaaagcactgtcagctatttacctttttgtggattacatcaagttgatcattttgtagcgaaccacctttaacataccattggaaagcaattcttttttatagaaaggagacatctgaataacagcttacaatcaacagcaaaacctctggccttgtactgttatacttattatgttcattctttcagctgttcgcaagttaattcaatatatttagggcttgtttcgtat

SEQ ID NO: 83401 - DNA, 2526 bp, Zea Mays
accggccaaagcgggcagtagcagagggaaacttttgaaaagccttttcaaaatttggagtaaggcactgaggcgagcgcgggtggcggccggcagcgaggaaggctactgttaggatcatctcgctacaaaatcgggttcccgagatggaggggaaggcggtagccgtcggttgcggtggcgcccgcgtcgatccggcggatgatctcaagtacatctccgggctgagcaccattctcgtggccaccatccaggaagtgaaggaccaggtctcccagatggagttcatcttctgcagccagctcttcccgcacatccaggccaagtcgaagcttgtccaggcgcatctcgccgacacgatgaaggccagtgaggttgagtggaggaagacggaggctggcctggtgaagcagctggaggaggtcagccgtggtaagatgctcgcggaggagagattgctgcaactgggcacctctcttgaggagatgaagaggaagcttgtggattcggagcaattggctgcgaggcatgaggcggagaagaaacagcttctggggaggttggaggatgaaacgaggaaaggtgaggtggtacgtcagctccaaagggagattgaggagaaggacgctgaggtggtcagggagagagaggcacatcagcggctgctgcaggaatttgagcaattggctgcgaggcatgaatctgagaagaaacagcttctggggaggttggaggatgagatggggaatggtgaggtggtacgtcagctccagagggagattgaggagaaggccgctgaggtggtcagggagagagaggcacaccagcggctgcagcagcaggttgacctgaaggataagaatctgcttctggagcagagcaagcggagggacttgattgaggattacactcagctgaagacaaactacaagcatttgaagtctcagtacacctttcttcttgggaagattgaccagcatgaaggctccaagcctcctgaggacattcctgcagatagaagaaacactgaaagtcctccaagtaagaggaaattcaaaggtacagctatccgaatttgtcaatcaaacaatttctttgagctacttcagtttttttccgaatgatcaatctttgttcgtgatttatgctacttgggtcctggaataactgtggggatttgtattcttgtcccatgcaaattatgcctgatattctgatcaatgatctcaaatgaaaatcctaagtaaatcattgttaattggctcttattgatctaacaatgctggacacttggactcctaaatgcatgtgccctaaatacgcttggaattactgattggaccaatgcctttacattttcttacctgcttggttttcagatttggagcacacaaacaaggagcgcatccaaatccttcccaacacaagggacctgaagaatgactctgctccaggtgccaaagcccaagctgcccaacatgctagttcagtcaggagtccaatcagaaactcacaccttgccgtgccatctcgcccaatgaatccattggcaaatcattctgccaacaattcaaaactacaagcttcaaccagtgtcgccagcccatgtctaaattggagggagacccgtgcacgcaaagaacaaggtgttgctgatccacacgatgatttccttgatacacctctggaagctgtcaagaataccatcaggaaccctgcaactcccgaagaagcactggcacttgccgcctctcctcaagttatggatttcgacaattcagatgatgaaacccaagatctgaatattgcaactcaagccctccggcacatccccaatatgccagttaccaagcagcaaaacacaatatcggtacatccaccaaagaaagacttcaaatatagagaatcagtgagaaagaaagctgaccgggagaacctgaaaggtgtcgagtgcaagcaatgcaagaagttttatgatgctgttcttcctggtggtcgtgcagatggcgatggtgcaggctctacaagcttacgatgtgagcaccacgatggtgtgtcaaggcatcggtacaggtacgcgccgcctctgacgccggaagggttttggaacattggtttcgaatcagaaatgtagcactacatcaagtagcaggaaaccttcagtgtcctcggtcaccccaagatattgtagcaatgactaagacaagttgcatgtcgctgctcaagttgcagaaatagtcattctgtgattaaggttgatggtaggcagtagctactgtgaatatgttggagatagaaagcactgtcagctatttacctttttgtggattacatcaagttgatcattttgtagcgaaccacctttaacataccattggaaagcaattcttttttatagaaaggagacatctgaataacagcttacaatcaacagcaaaacctctggccttgtactgttatacttattatgttcattctttcagctgttcgcaagttaattcaatatatttagggcttgtttcgtat

SEQ ID NO: 83402 - DNA, 2083 bp, Zea Mays
accggccaaagcgggcagtagcagagggaaacttttgaaaagccttttcaaaatttggagtaaggcactgaggcgagcgcgggtggcggccggcagcgaggaaggctactgttaggatcatctcgctacaaaatcgggttcccgagatggaggggaaggcggtagccgtcggttgcggtggcgcccgcgtcgatccggcggatgatctcaagtacatctccgggctgagcaccattctcgtggccaccatccaggaagtgaaggaccaggtctcccagatggagttcatcttctgcagccagctcttcccgcacatccaggccaagtcgaagcttgtccaggcgcatctcgccgacacgatgaaggccagtgaggttgagtggaggaagacggaggctggcctggtgaagcagctggaggaggtcagccgtggtaagatgctcgcggaggagagattgctgcaactgggcacctctcttgaggagatgaagaggaagcttgtggattcggagcaattggctgcgaggcatgaggcggagaagaaacagcttctggggaggttggaggatgaaacgaggaaaggtgaggtggtacgtcagctccaaagggagattgaggagaaggacgctgaggtggtacgtcagctccagagggagattgaggagaaggccgctgaggtggtcagggagagagaggcacaccagcggctgcagcagcaggttgacctgaaggataagaatctgcttctggagcagagcaagcggagggacttgattgaggattacactcagctgaagacaaactacaagcatttgaagtctcagtacacctttcttcttgggaagattgaccagcatgaaggctccaagcctcctgaggacattcctgcagatagaagaaacactgaaagtcctccaagtaagaggaaattcaaagatttggagcacacaaacaaggagcgcatccaaatccttcccaacacaagggacctgaagaatgactctgctccaggtgccaaagcccaagctgcccaacatgctagttcagtcaggagtccaatcagaaactcacaccttgccgtgccatctcgcccaatgaatccattggcaaatcattctgccaacaattcaaaactacaagcttcaaccagtgtcgccagcccatgtctaaattggagggagacccgtgcacgcaaagaacaaggtgttgctgatccacacgatgatttccttgatacacctctggaagctgtcaagaataccatcaggaaccctgcaactcccgaagaagcactggcacttgccgcctctcctcaagttatggatttcgacaattcagatgatgaaacccaagatctgaatattgcaactcaagccctccggcacatccccaatatgccagttaccaagcagcaaaacacaatatcggtacatccaccaaagaaagacttcaaatatagagaatcagtgagaaagaaagctgaccgggagaacctgaaaggtgtcgagtgcaagcaatgcaagaagttttatgatgctgttcttcctggtggtcgtgcagatggcgatggtgcaggctctacaagcttacgatgtgagcaccacgatggtgtgtcaaggcatcggtacaggtacgcgccgcctctgacgccggaagggttttggaacattggtttcgaatcagaaatgtagcactacatcaagtagcaggaaaccttcagtgtcctcggtcaccccaagatattgtagcaatgactaagacaagttgcatgtcgctgctcaagttgcagaaatagtcattctgtgattaaggttgatggtaggcagtagctactgtgaatatgttggagatagaaagcactgtcagctatttacctttttgtggattacatcaagttgatcattttgtagcgaaccacctttaacataccattggaaagcaattcttttttatagaaaggagacatctgaataacagcttacaatcaacagcaaaacctctggccttgtactgttatacttattatgttcattctttcagctgttcgcaagttaattcaatatatttagggcttgtttcgtat

SEQ ID NO: 83403 - DNA, 1079 bp, Zea Mays
cttgcctctgttacagttcggttccgccatgggggccagggcgaatcgtcatctagtgtgggacttataccagggaaaattggatcgagggagctcaattacttgctgaagacattcggcgctgtgaatctgccctccgacgagttcgggtgttcctgcgacattgactacggaatgtggcagatgttgttgcagatatgatgtactatgcttgaatcccggtgattaatcaagctatgttgagtagttaagggtgacgtccagacattaagagagatgtgtcgcagtatggactaaatatgaccgagcaacaatttcttcagtctgcatatggcgagctgatgtctagtcagcatgcgcggatcaaactatgacaagaggaccgcatctaatgatcctcaggctgtgtatgcaagtggaggaaaaccttatggaaggtactcgatgttcgataatgtcattgacacgagtcaggtgagggttcagaggagaggttcatcgaggtctactgctcgtagctcctatctctccacctcaaatccaactaaagttgagcgattacgagaggaacttaggaaccaacaggagtaacaaagggtccaggaggattccttgaggcaagttgtgcaacaataagcctactatgcttctcagtttcaacaacaacaagcattccttaacaactagcacaaggccaagggatatcgctcctagtgcccccacctccacctcccatacagtttccttggccttcacctggacattgggtatgtgaattcatcatcattcgaggaagaattacttgttatattacaatgtaacttgccaaatgtcatttgcacaaatatattagacccatccacctaaccttgccggtgtagcaacaagttgacgattatgactttgtcaatgcattctacgccaatggagataatgaacatcactcgccttagttccccgatgatcatttgatgtgttttgtgagacgtgagacgtttgtgtcttgtcaaagctgtgacttatgagattgaatttgacaattttgtgacttttgtgcaatgaaatgagttgttattgtg

SEQ ID NO: 83404 - DNA, 2235 bp, Zea Mays
gagagatatgctgtggcaggggccgggttaggttttggaagaacttgtcaaatcacagcatttgatgctagcagatccgggagcgtggtcgatatccatctcatgccaagttcggccccttctcctcatgctgcatactacaacaacgcatgccttgccttgaggcagtacgcataagagagcatgccgcggcagcaggctgcagaggggaagagagccgagccgagccgagcgtgaccggagtagattcctttggtgcgcacaagtcacacagtccacagaggggcgccagttgttgttgttgcagtctaggccttgttgttgatgttgcacacatatgcaaagatctcttccctctcgccacaagggataagagatctctctcctcctccctgtgtattagttggaagcaagggatgcagcatgatatatacctgctgctgcttgacacagaggcacatgcatgtcccttttagtgggcaatgatggtgtgcaggtggaggtgatgatagtttgcctcatctgggcggccgggggagggactgagacattccatccgaggccatgccgcctcacattcacagctacgcaccccctgccctgcaatattccgtttgtttgctaatgtgttgtatcgagatgctttcgatatgaggatgtcctgtcacggaagctgcagctgcgaggccagtcgtcccaaccccagccccagatgctgctgccggacgtcgtgcgcccctattaaacccgccaggagatgagatgcacgtccttccactcgcgctccaccccctcatgctcctcgcctgccatcaccgccgactccggccgccgccgccgctgaagaagaagaagctcggcctgcgccgtccaacgaccgacgaagctatgctcagctcactccaccaccactcctcgtcctcctccgacaccgacaacaacaatggcaacaacaagaacggcagcagcaacaacagcgacgtcctcgcggcggcggcggtgccgtccgcgcgggacctcgtgctcgcgtgcgccgacctgctgcagcgcggggacctccaggccgcgcgccgcgccgtgggggtcctcctgtccgcggcgtccccgcgcgcggacgccgccgatcggctcgcctaccacttcgcgcgcgcgctcgctctccgggcggacgccagggccgccgccacgggcttggtggccgccgccgccgcgcggccggcgtcgtccgccgcctacctcgcgttcaaccagatcgcgcccttcctgcgcttcgcgcacctgacggcgaaccaggccatcctcgacgccgtcgagggcgcgcgccggatccacatcctcgacctggacgccgcgcacggggtgcagtggccgccactgctgcaggcgatcgccgagcgcgccgacccggccgcgggaccgccggaggtgcgcatcaccggcgccggcgccgaccgcgacaccctcctccgcaccggcagccgcctccgcgccttcgcccgctccatccagctccccttccacttcacgccgctcctgctctcctgcgccgcgctgggtccctccggtgggaggtggtggcgcggactcgagcggtggggagccgcggcgcgcggcgccggatttgcggcgcggcctctcagcgctttcgccgtgtcgcaggcgcggctgctgctgcggctgcactacccgtcggagggctacctcgtgcaggaggcgcgcggcgcgtgctttctcgggtggcagacgcggccgctgctgtccgtgtcgtcgtggcagtagcccgccgccgccgccactgaggacgagccttctctacctgctgcgtgcatgcattcatgccggcggcgccgacggacggactagggtttgcctcgctcatcactagtcatcagtaccgcatatatagagctagcgtatatatgagcattgcattttgtagcaataatattggttgttacttgcgctacgtacgtacttagcaagatctcattgtgattttggaggatgggtttgttgggtcaattggaaggaggaaaccctaaccctagcttgctgtggtttaattgctgttgatcttggcagcttggatggatggatggttagttggttggttgattagcactcttgttaatttgaggagtttaagtccatatgtagccttgcatgcatggaatggcggcattggaacaagtgaagaggtcggccttcaggctttgttcggctagcaatttcttc

SEQ ID NO: 83405 - DNA, 1794 bp, Zea Mays
tcaacaatttcaaagtgatagttggaaggtaatggtgtccagaaaataggcagacaagttcaggagaaacttactcgtggaggaatatgtttatgttgagagaaaccagatcttgggttgcttaagctttgtcttcaaatcccaaaagctggttgactttatattcttagacaatgctactggaccgtgcaacgtggccacaacagggatcttctgtgaagtgcttccgtgaacactcctatggtgcaaggtatattgttgtgtgttactacaaggtcgagctgctgctattgctggttcatctctactccacagggcaagttacctccgactcttttcacaatttcttgtgatttctcattgtcgagacaatgagccaagtttctctagaaccttttagtccttgtgttgtgtaaaactaaagacctagctttttttacttatctttactagtcatgctcactgtttataagtcatcagattagtcatgattactcgagctaatcggttctcctacccatccaagactactgaccctaccacctcgaccaaaaacctggtcatttatttgattggtcatcgagtaaatgagattaatcgtttgattaggtggtggagcgaccactctaggattctcaagtgggcttaggagagaaaaattgggctgggtttctggcttctcagtctaatagggttatacacaacacacaaaataggatcaagggagaggcacaagcacaccattacaccaagccttatgctccctcattgcctctctagttttgagctcatcctccatcggtgagtgtacttcactacttcttaccttcacagtcctcgatcttctttctttgcctttgattgtcatgcttgatgttgccggaagcctagatctactacatgttgtatgctcttatcttattgatgtttcttagttgttgtctttatgtttgcgtgatgctattgttctaccctctgccccttggtgcttgttgttggcttgctactcctatgtacacatgtaccccttttttcttgttgttgctgctatgctctcttgcatgttattcatgtgtataactgaatacctcttcatgtgtagaagtggatatagaataatagcatgcaagggtggaaatgataatttctaatcctagagaactttgttgccacaactggtaattcctatgtagcctcaactgctctaggtcattcttccttagttgagaaagctatagcaaaactactagtagaacttcacgaccaatctattgatcctacgaggaaggctcgatctatagacccaatatcaaagtatgggtggtggccagatcctacaaagaaagactttgtttattctatacaaagttaatacatggaggaataatcaagttcaagtagaaccttgttggggattatgtgttgaatatatgtataaaaggcaatcatgacctatgagaatggtaatagtcatttagcgtaaaagcccattagaagaggtctacatatatgaaaggcataacatgctagagactcgctctagtcgtcatcgtcgtttctctccctagggttgtgggtgcccaaggtactcctgctatttctctcattgcatgtgtggtgctagctcacaagcgtcatggtgttttatccccgcatatgtggataccatggacacgttattattgttgatgtgatgttgaccagcaatgaacatgaggagcacatgtgaacatgttgttgaaggtggtacacgaggacaaatgactacttccattacatcatcatgttcttctt

SEQ ID NO: 83406 - DNA, 1881 bp, Zea Mays
gtcctcgtagcgagatgcgtcgccggcggcggtagttccgagtcgcgatccgacggcggatttggcatcattccagagaggcgctgcacacggaagatcgaggaagtatctccagcggctacgccatcgaaaataggcagacaagttcaggagaaacttactcgtggaggaatatgtttatgttgagagaaaccagatcttgggttgcttaagctttgtcttcaaatcccaaaagctggttgactttatattcttagacaatgctactggaccgtgcaacgtggccacaacagggatcttctgtgaagtgcttccgtgaacactcctatggtgcaaggtatattgttgtgtgttactacaaggtcgagctgctgctattgctggttcatctctactccacagggcaagttacctccgactcttttcacaatttcttgtgatttctcattgtcgagacaatgagccaagtttctctagaaccttttagtccttgtgttgtgtaaaactaaagacctagctttttttacttatctttactagtcatgctcactgtttataagtcatcagattagtcatgattactcgagctaatcggttctcctacccatccaagactactgaccctaccacctcgaccaaaaacctggtcatttatttgattggtcatcgagtaaatgagattaatcgtttgattaggtggtggagcgaccactctaggattctcaagtgggcttaggagagaaaaattgggctgggtttctggcttctcagtctaatagggttatacacaacacacaaaataggatcaagggagaggcacaagcacaccattacaccaagccttatgctccctcattgcctctctagttttgagctcatcctccatcggtgagtgtacttcactacttcttaccttcacagtcctcgatcttctttctttgcctttgattgtcatgcttgatgttgccggaagcctagatctactacatgttgtatgctcttatcttattgatgtttcttagttgttgtctttatgtttgcgtgatgctattgttctaccctctgccccttggtgcttgttgttggcttgctactcctatgtacacatgtaccccttttttcttgttgttgctgctatgctctcttgcatgttattcatgtgtataactgaatacctcttcatgtgtagaagtggatatagaataatagcatgcaagggtggaaatgataatttctaatcctagagaactttgttgccacaactggtaattcctatgtagcctcaactgctctaggtcattcttccttagttgagaaagctatagcaaaactactagtagaacttcacgaccaatctattgatcctacgaggaaggctcgatctatagacccaatatcaaagtatgggtggtggccagatcctacaaagaaagactttgtttattctatacaaagttaatacatggaggaataatcaagttcaagtagaaccttgttggggattatgtgttgaatatatgtataaaaggcaatcatgacctatgagaatggtaatagtcatttagcgtaaaagcccattagaagaggtctacatatatgaaaggcataacatgctagagactcgctctagtcgtcatcgtcgtttctctccctagggttgtgggtgcccaaggtactcctgctatttctctcattgcatgtgtggtgctagctcacaagcgtcatggtgttttatccccgcatatgtggataccatggacacgttattattgttgatgtgatgttgaccagcaatgaacatgaggagcacatgtgaacatgttgttgaaggtggtacacgaggacaaatgactacttccattacatcatcatgttcttctt

SEQ ID NO: 83407 - DNA, 2130 bp, Zea Mays
ctcaattctgctcggtgcactcgaagctactgctattgccaattccgtctctattattatctgataatactcgtctctctgctcacaagtcacaaggaggggagcgaggcggcggccaacacctagcagctccgaaccctagctccggccactggcggcgatggctgctgctacggcgttccggtcggggacgaggcggggcgacgctctcgcgcccgtagaggacgcgggctccgccactcgcgagcgccaggccgcgggccgcggcggaggcagcgtccgccggtcgaagagcctgagccggttcccgccgccgtcgccctccaccgaggacacggcgacgccgtcgtcgaggttcgtcaacaaggtgcggggcgggggaagcggcggcgtcttcccgccgcaggtcagcctcgacgacctcgccgacgagttcttccgggccagggccgagtccgaggacgacgacgacgaggagactgctgcgcgcggccggtcaaggcttccagcggccgcagagcgtgggggcggtggcgctggcggtcggcggagctccaccgcgcggtacgctaggcagacggagtcttcgcggcagcgcgggcgctccgtgtcgcggccgccagccgagcggcgaggcgtagcggccaatgcggtggatggcggccctgcagccaggaggcagcgttatgcgtcggtcgaccggcgcgctgccatggatcgacaacggtggtgcgattcggataatgatatggaagttcctcaccagtatgtttctagggggatgcataccaaaagtagcagtggcaatagcctgcagagttcattccataagccatctaaagcaaatcaagctttgaagaggtctacaagtcaaaaggatttctttcattctagagacagcagctccagccattcttcaattactgatgatgagtctaggagttcactctctttccatagcagaaatcagaaggctgtctgtgcagtttatggtcttgacaaggagcacggaattgatgatggggctggaaatgtattgtacgatgtaatgcgaaaagaagttaggcaagctgttgaggaaataaggaatcagcttgaagaggccatgacaaaatctgaaccttcagaaaaggcaataaacagtgatgcacaaccaacccaagttattactcagctccgaaggagctacactagtaaattggaagagagaagcggaagcaggaactgttagctcaattggcagcagaagaacaccatggtcatgagctcacaaaaatagttagagaattgctacctactcctaaaaagactgcaaacttacaaagacagccacactacagaagaaggagcaatgatagatcaaggatgtcaaaacgacttactgaagaggctgaacaatactttgaagatttcctgtcgaatgttgaagacactgacttttcttcttttgatggagagaaaagtgactcaagttcaaccaggaaagacctgttgttacttcatgctatgacagaaactccagttaagctcccagaagttgctttacctgcagaggcagatggcgttgtccttccctggctgcaatgggaaactaccaatgactttcagacctccccgtgcaaaaccaaggcccagggagaaagtaccagaggcagcactagcaatcagactgcgagcagccgtgggagttggagccctggagaccatgccacttcatcagttgcctctaaaaatagtttactgaccagatttggtgaggttgggatttgccgaagcagcttgtctgactatgctcgaaccttgtcgtttcacatcgacgactatttgcatttaaggcagagtgaggatctcctcttggagacgtggatgcagaaacaaaggatcgactctggcggcctagtcctgtgcagtaaatcgacgatattgtagagtgcagccaaataggtagttgatggggttgagttagactaataattgcttggatttttacctttagctgccatggctcctgccgcctagtgtgtatagatgcatgcattatagttaacagattggataagctttttttaacgcttcatcgtgattaagaaaatttattttttacaccatcattctgcaagtgcaaatgat

SEQ ID NO: 83408 - DNA, 2343 bp, Zea Mays
gtttgtctcacttgtcccgtgttcggtggtcacggtcgagccgagcggcgagaccgcgagaggagagaacaacgcaggctgcaggcagtggtccgtcacgctgccacggtgcaacgacacccaaccaactaccaggatcccgtgtgccaactgcctgcctgctgttgtagagcctcgtaaattccccttgaaacacggccgcaagtttgaaattcaaattcactcaccagcacctgcaaacccaggcattcattactcccaccgcccagcagccagcaccaatgaaatatgggtccagtcacaaggaggggagcgaggcggcggccaacacctagcagctccgaaccctagctccggccactggcggcgatggctgctgctacggcgttccggtcggggacgaggcggggcgacgctctcgcgcccgtagaggacgcgggctccgccactcgcgagcgccaggccgcgggccgcggcggaggcagcgtccgccggtcgaagagcctgagccggttcccgccgccgtcgccctccaccgaggacacggcgacgccgtcgtcgaggttcgtcaacaaggtgcggggcgggggaagcggcggcgtcttcccgccgcaggtcagcctcgacgacctcgccgacgagttcttccgggccagggccgagtccgaggacgacgacgacgaggagactgctgcgcgcggccggtcaaggcttccagcggccgcagagcgtgggggcggtggcgctggcggtcggcggagctccaccgcgcggtacgctaggcagacggagtcttcgcggcagcgcgggcgctccgtgtcgcggccgccagccgagcggcgaggcgtagcggccaatgcggtggatggcggccctgcagccaggaggcagcgttatgcgtcggtcgaccggcgcgctgccatggatcgacaacggtggtgcgattcggataatgatatggaagttcctcaccagtatgtttctagggggatgcataccaaaagtagcagtggcaatagcctgcagagttcattccataagccatctaaagcaaatcaagctttgaagaggtctacaagtcaaaaggatttctttcattctagagacagcagctccagccattcttcaattactgatgatgagtctaggagttcactctctttccatagcagaaatcagaaggctgtctgtgcagtttatggtcttgacaaggagcacggaattgatgatggggctggaaatgtattgtacgatgtaatgcgaaaagaagttaggcaagctgttgaggaaataaggaatcagcttgaagaggccatgacaaaatctgaaccttcagaaaaggcaataaacagtgatgcacaaccaacccaagttattactcagctccgaaggagctacactagtaaattggaagagtcagagaagcggaagcaggaactgttagctcaattggcagcagaagaacaccatggtcatgagctcacaaaaatagttagagaattgctacctactcctaaaaagactgcaaacttacaaagacagccacactacagaagaaggagcaatgatagatcaaggatgtcaaaacgacttactgaagaggctgaacaatactttgaagatttcctgtcgaatgttgaagacactgacttttcttcttttgatggagagaaaagtgactcaagttcaaccaggaaagacctgttgttacttcatgctatgacagaaactccagttaagctcccagaagttgctttacctgcagaggcagatggcgttgtccttccctggctgcaatgggaaactaccaatgactttcagacctccccgtgcaaaaccaaggcccagggagaaagtaccagaggcagcactagcaatcagactgcgagcagccgtgggagttggagccctggagaccatgccacttcatcagttgcctctaaaaatagtttactgaccagatttggtgaggttgggatttgccgaagcagcttgtctgactatgctcgaaccttgtcgtttcacatcgacgactatttgcatttaaggcagagtgaggatctcctcttggagacgtggatgcagaaacaaaggatcgactctggcggcctagtcctgtgcagtaaatcgacgatattgtagagtgcagccaaataggtagttgatggggttgagttagactaataattgcttggatttttacctttagctgccatggctcctgccgcctagtgtgtatagatgcatgcattatagttaacagattggataagctttttttaacgcttcatcgtgattaagaaaatttattttttacaccatcattctgcaagtgcaaatgat

SEQ ID NO: 83409 - DNA, 1085 bp, Zea Mays
ctcgcctcgcaatcttttccacctctcgtcgccgtacggttccttgttttggccttcagcagctccgtctccgtgtgtatctgatcgggggattctttgcttgagaaactgctagcatgggcgcggtgcttggacggcatgacacgcacaagcggagttcccatggttcgaagctggaggtaaagatggtcgacgctatgcagcagagagcatcgcatggaacctcactgaaatcgttcgatagcattatcatgaagttccccaaaatagacgagagtttcagaaaatgcaagactatcttcgaacagtttgatgaagattcaaatggcgaaatagataaagaggaactgaaacattgttttcaaaagctggaaatctcattcacagaggaggagatatgtgatctctttgaagcttgcgatataaatgaagatatgggcatgaagttcaacgagttcattgtctttctgtgccttgtctatcttctcaatgaagcagctgtcttggaagcaaagataaagatgggactaggaaatcttgaggcaaccttcgagaccttggttgatgcgtttgtcttcttggataagaataaagatgggtatgtgagcaaggatgagatgatccaagcaataaacgagaccacgacaggagagcgctcttctgggcctatagccatgaaaagatttgaggaaatggactgggacaagaacggaatggtgacattcaaggagttcctgtttgccttcactcgctgggtaggaattgatgaaaatgaggatgaagatgacgatgaataaggactgtgaaggctggttattcttcaagggttagggccagatcagccttggagaagctggaaatggatggcggataaaagcagttgacgtttattggttgcttgttgatcgtaatattcatgccattgctaatagaatgtctcgacattatactcctagtagggtgacttgcatgtctgaacactggtatcaatgttacagttgctgtctactttcttccatgccattcagccattgttctactctgcgctagcccgcgccgatccatttcaatcgtgtgcagcttct

SEQ ID NO: 83410 - DNA, 1854 bp, Zea Mays
gctggacccacctgccggcgtcccgaagagcggaacacctgaagccaacgccggccgtgctgcttccgctgcctcatcgcaccaagccaccagtccgcagcacgaaagcttccccccctctcttctcctgctggttggctcatcaggcctgcccgaataatcctcctgcggattcccctcacggcaggccaaaacccgcacctttcccccgtcgacagattctcaaacccggcgaactccgggcagggctcacgtcgccgatcccgctcccggattctctttgccgccgcgaggagacggcgtccagtccaggccttcagcagctccgtctccgtgtgtatctgatcgggggattctttgcttgagaaactgctagcatgggcgcggtgcttggacggcatgacacgcacaagcggagttcccatggttcgaagctggaggtaaagatggtcgacgctatgcagcagagagcatcgcatggaacctcactgaaatcgttcgatagcattatcatgaagttccccaaaatagacgagagtttcagaaaatgcaagactatcttcgaacagtttgattcaaatggcgaaatagataaagaggaactgaaacattgttttcaaaagctggaaatctcattcacagaggaggagatatgtgatctctttgaagcttgcgatataaatgaagatatgggcatgaagttcaacgagttcattgtctttctgtgccttgtctatcttctcaatgaagcagctgtcttggaagcagtatccttcataagtcatattaattcacatagtaacatcctgattgcattattagtgttattgtcacattgtgttgtgttgctacagaggtatgcaatgtaattttacttcacttacaaaaaggtaattttactttgataatttttcttaaatccattagcgaagtcttggtttctttatataattacacgtggttcttattggcaaatttattgtgttgatggagacaccaattttcatcctaacataagcttgccgcaattttgattggattatgaaggtttctagatttactgtgagaatttttttgcactcggtgttttagttctcttagatcgtctcagcagtctacccatagtttacccaaaagcattgttttgcactgttctgcattataaattacactgttcgcagagtggagtttgaatatgggtatggagatcggtaagctgctggagatagtcttatgccatttctgttaggagcgtccatgtttcctttacatacttcacagaagataaagatgggactaggaaatcttgaggcaaccttcgagaccttggttgatgcgtttgtcttcttggataagaataaagatgggtatgtgagcaaggatgagatgatccaagcaataaacgagaccacgacaggagagcgctcttctgggcctatagccatgaaaagatttgaggaaatggactgggacaagaacggaatggtgacattcaaggagttcctgtttgccttcactcgctgggtaggaattgatgaaaatgaggatgaagatgacgatgaataaggactgtgaaggctggttattcttcaagggttagggccagatcagccttggagaagctggaaatggatggcggataaaagcagttgacgtttattggttgcttgttgatcgtaatattcatgccattgctaatagaatgtctcgacattatactcctagtagggtgacttgcatgtctgaacactggtatcaatgttacagttgctgtctactttcttccatgccattcagccattgttctactctgcgctagcccgcgccgatccatttcaatcgtgtgcagcttct

SEQ ID NO: 83411 - DNA, 1379 bp, Zea Mays
gtgtcctcatagctgagagccatttccaccgcccagcacgctggacccacctgccggcgtcccgaagagcggaacacctgaagccaacgccggccgtgctgcttccgctgcctcatcgcaccaagccaccagtccgcagcacgaaagcttccccccctctcttctcctgctggttggctcatcaggcctgcccgaataatcctcctgcggattcccctcacggcaggccaaaacccgcacctttcccccgtcgacagattctcaaacccggcgaactccgggcagggctcacgtcgccgatcccgctcccggattctctttgccgccgcgaggagacggcgtccagtccaggccttcagcagctccgtctccgtgtgtatctgatcgggggattctttgcttgagaaactgctagcatgggcgcggtgcttggacggcatgacacgcacaagcggagttcccatggttcgaagctggaggtaaagatggtcgacgctatgcagcagagagcatcgcatggaacctcactgaaatcgttcgatagcattatcatgaagttccccaaaatagacgagagtttcagaaaatgcaagactatcttcgaacagtttgattcaaatggcgaaatagataaagaggaactgaaacattgttttcaaaagctggaaatctcattcacagaggaggagatatgtgatctctttgaagcttgcgatataaatgaagatatgggcatgaagttcaacgagttcattgtctttctgtgccttgtctatcttctcaatgaagcagctgtcttggaagcaaagataaagatgggactaggaaatcttgaggcaaccttcgagaccttggttgatgcgtttgtcttcttggataagaataaagatgggtatgtgagcaaggatgagatgatccaagcaataaacgagaccacgacaggagagcgctcttctgggcctatagccatgaaaagatttgaggaaatggactgggacaagaacggaatggtgacattcaaggagttcctgtttgccttcactcgctgggtaggaattgatgaaaatgaggatgaagatgacgatgaataaggactgtgaaggctggttattcttcaagggttagggccagatcagccttggagaagctggaaatggatggcggataaaagcagttgacgtttattggttgcttgttgatcgtaatattcatgccattgctaatagaatgtctcgacattatactcctagtagggtgacttgcatgtctgaacactggtatcaatgttacagttgctgtctactttcttccatgccattcagccattgttctactctgcgctagcccgcgccgatccatttcaatcgtgtgcagcttct

SEQ ID NO: 83412 - DNA, 2136 bp, Zea Mays
actgcacatgacaagaaaagtggtgctaaagagagcaagcgggactgaaggggagagagagactgagagagagggagctagcaacaatggcggcacctactgtgctcgccttccttccgcttccgcttctgcttctcgcagccttctcatcagcatcagcctcagcgcaccccaactctttccggccaatcgttcccctgcgtctccaggctcttctgcagcagcagcagcggcggcgagcgagctcggacgccaagctcgtctccgcggccgccgacggcaccaacagcacggcgcagccgttcacgacgcactactttccccaggagctggaccacttcacctttacgcccaacgcgtcgatgctcttccgccagaagtacctcgtcaacgacaccttctggcggaggccccgccgcggcggcggcggcggcgccgggccgctgttcgtgtacacgggcaacgagggcgacatcgagtggttcgccaccaacaccgggttcatgttcgacatcgcgcccaagttcggtgcccttctcgtctttatcgagcatcggttctacggcgagtcactgccgtttggggacgactcctacagctcagcggagacggagggttacttgacgtcgacgcaggcgctcgccgacttcgccatcctcatcaccggtcttaagcgaaacctctcggcggagaccgcgcctgtagtcgtcttcggcggctcctatggcggcatgctggcttcttggttcaggctcaagtacccccatgtcgccataggggccctggcatcctctgcgccaatcctacagttcgaccacataacgccatggaacagcttcagtgatgccgtctcacaggactacaagtccgagagcttgaactgcttcagtgtgatcaaggcagcctgggacgtgctcgatgagaggggatccactgacacagggctcctggagctcagtaaactgttcagagcctgcaagagcgtcaagcacgctgattcgattgcaggctggctacagacggcattcacctacactgccatggtggactatccaacaccggccaacttcctgatggatttgcctgcctaccccgtcaaggagcctatccagatgtgcaagatcatcgacgggttcccggcaggcgccgacatcctggaaaaggtgttcgcggcggcgaacctgtactacaactacacaggagaccaggcctgcaaccagatcgagtctgattctgacgacagctccagttctcttgggctcagtggctgggggtggcaggcttgcacagagatgatcatgccgatgtcgacctcaaacgccagcatgttcccgccatccagcttcagctacgaggacacgtccaatgcctgcttccagtcgaccggggtccggcccaggccgcactggatcaccactgaatacggcggatatagaatcgacaaggtgctcaagaggttcgggagcaacatcatcttctccaacggaatgcgagacccgtggagccgaggcggggtcctcaagaacatctcgtccagcatcgtcgcccttgtcacggagaaaggggcgcatcatctggacctcagattcgcgaccgatgaggatccggactgggttacagaacagaggaggcaagaagttgagatcatagagggatggatagaccagtatcatcgagacatggcgcaagtatcctaaaggagtaaaggtgctgtgttgcagatttacagttacagtcaagacaagttcacgtctggtctatgaaaaagaaaacataaaaaggaaaagttcctttatagcgcacaggacaatcacagggacattaagatgataaaaggtgaaaagccagtccaattgtttcacttatcaacataagctgtaaaacttgaacactcttggacgaatcatgaatgaattgttacacgatgctcagtgtttttccccccttcctagcccccaatttgttatttgttttttctattttcttccttagtatatatgtagcatatatgaaaaagggggaacaaggatcaggtgtttctaaagccttgagcacccaaattcatttcacaccttagttatagtaatccatactggttacggctgagttatgtacactagagttgtgttaattctt

SEQ ID NO: 83413 - DNA, 2258 bp, Zea Mays
gcaaccccaacaaggtcaaccagacaaatcagcagaagctacgaaactgcacggcagcctccttgctcgtgcgccttgtcattactgcacatgacaagaaaagtggtgctaaagagagcaagcgggactgaaggggagagagagactgagagagagggagctagcaacaatggcggcacctactgtgctcgccttccttccgcttccgcttctgcttctcgcagccttctcatcagcatcagcctcagcgcaccccaactctttccggccaatcgttcccctgcgtctccaggctcttctgcagcagcagcagcggcggcgagcgagctcggacgccaagctcgtctccgcggccgccgacggcaccaacagcacggcgcagccgttcacgacgcactactttccccaggagctggaccacttcacctttacgcccaacgcgtcgatgctcttccgccagaagtacctcgtcaacgacaccttctggcggaggccccgccgcggcggcggcggcggcgccgggccgctgttcgtgtacacgggcaacgagggcgacatcgagtggttcgccaccaacaccgggttcatgttcgacatcgcgcccaagttcggtgcccttctcgtctttatcgagcatcggttctacggcgagtcactgccgtttggggacgactcctacagctcagcggagacggagggttacttgacgtcgacgcaggcgctcgccgacttcgccatcctcatcaccggtcttaagcgaaacctctcggcggagaccgcgcctgtagtcgtcttcggcggctcctatggcggcatgctggcttcttggttcaggctcaagtacccccatgtcgccataggggccctggcatcctctgcgccaatcctacagttcgaccacataacgccatggaacagcttcagtgatgccgtctcacaggactacaagtccgagagcttgaactgcttcagtgtgatcaaggcagcctgggacgtgctcgatgagaggggatccactgacacagggctcctggagctcagtaaactgttcagagcctgcaagagcgtcaagcacgctgattcgattgcaggctggctacagacggcattcacctacactgccatggtggactatccaacaccggccaacttcctgatggatttgcctgcctaccccgtcaaggagatgtgcaagatcatcgacgggttcccggcaggcgccgacatcctggaaaaggtgttcgcggcggcgaacctgtactacaactacacaggagaccaggcctgcaaccagatcgagtctgattctgacgacagctccagttctcttgggctcagtggctgggggtggcaggcttgcacagagatgatcatgccgatgtcgacctcaaacgccagcatgttcccgccatccagcttcagctacgaggacacgtccaatgcctgcttccagtcgaccggggtccggcccaggccgcactggatcaccactgaatacggcggatatagaatcgacaaggtgctcaagaggttcgggagcaacatcatcttctccaacggaatgcgagacccgtggagccgaggcggggtcctcaagaacatctcgtccagcatcgtcgcccttgtcacggagaaaggtgagcatggaaacctcaggaggaagaagaagaagaagaaaaaaaaatgggcgcatcatctggacctcagattcgcgaccgatgaggatccggactgggttacagaacagaggaggcaagaagttgagatcatagagggatggatagaccagtatcatcgagacatggcgcaagtatcctaaaggagtaaaggtgctgtgttgcagatttacagttacagtcaagacaagttcacgtctggtctatgaaaaagaaaacataaaaaggaaaagttcctttatagcgcacaggacaatcacagggacattaagatgataaaaggtgaaaagccagtccaattgtttcacttatcaacataagctgtaaaacttgaacactcttggacgaatcatgaatgaattgttacacgatgctcagtgtttttccccccttcctagcccccaatttgttatttgttttttctattttcttccttagtatatatgtagcatatatgaaaaagggggaacaaggatcaggtgtttctaaagccttgagcacccaaattcatttcacaccttagttatagtaatccatactggttacggctgagttatgtacactagagttgtgttaattctt

SEQ ID NO: 83414 - DNA, 2302 bp, Zea Mays
ggcgcgagagctttgcccgatccaaccagcaactaacaagcatactgcgccaattcggaactttgcttgtgtcaccatgccagacacacaacgcaaccccaacaaggtcaaccagacaaatcagcagaagctacgaaactgcacggcagcctccttgctcgtgcgccttgtcattactgcacatgacaagaaaagtggtgctaaagagagcaagcgggactgaaggggagagagagactgagagagagggagctagcaacaatggcggcacctactgtgctcgccttccttccgcttccgcttctgcttctcgcagccttctcatcagcatcagcctcagcgcaccccaactctttccggccaatcgttcccctgcgtctccaggctcttctgcagcagcagcagcggcggcgagcgagctcggacgccaagctcgtctccgcggccgccgacggcaccaacagcacggcgcagccgttcacgacgcactactttccccaggagctggaccacttcacctttacgcccaacgcgtcgatgctcttccgccagaagtacctcgtcaacgacaccttctggcggaggccccgccgcggcggcggcggcggcgccgggccgctgttcgtgtacacgggcaacgagggcgacatcgagtggttcgccaccaacaccgggttcatgttcgacatcgcgcccaagttcggtgcccttctcgtctttatcgagcatcggttctacggcgagtcactgccgtttggggacgactcctacagctcagcggagacggagggttacttgacgtcgacgcaggcgctcgccgacttcgccatcctcatcaccggtcttaagcgaaacctctcggcggagaccgcgcctgtagtcgtcttcggcggctcctatggcggcatgctggcttcttggttcaggctcaagtacccccatgtcgccataggggccctggcatcctctgcgccaatcctacagttcgaccacataacgccatggaacagcttcagtgatgccgtctcacaggactacaagtccgagagcttgaactgcttcagtgtgatcaaggcagcctgggacgtgctcgatgagaggggatccactgacacagggctcctggagctcagtaaactgttcagagcctgcaagagcgtcaagcacgctgattcgattgcaggctggctacagacggcattcacctacactgccatggtggactatccaacaccggccaacttcctgatggatttgcctgcctaccccgtcaaggagatgtgcaagatcatcgacgggttcccggcaggcgccgacatcctggaaaaggtgttcgcggcggcgaacctgtactacaactacacaggagaccaggcctgcaaccagatcgagtctgattctgacgacagctccagttctcttgggctcagtggctgggggtggcaggcttgcacagagatgatcatgccgatgtcgacctcaaacgccagcatgttcccgccatccagcttcagctacgaggacacgtccaatgcctgcttccagtcgaccggggtccggcccaggccgcactggatcaccactgaatacggcggatatagaatcgacaaggtgctcaagaggttcgggagcaacatcatcttctccaacggaatgcgagacccgtggagccgaggcggggtcctcaagaacatctcgtccagcatcgtcgcccttgtcacggagaaaggggcgcatcatctggacctcagattcgcgaccgatgaggatccggactgggttacagaacagaggaggcaagaagttgagatcatagagggatggatagaccagtatcatcgagacatggcgcaagtatcctaaaggagtaaaggtgctgtgttgcagatttacagttacagtcaagacaagttcacgtctggtctatgaaaaagaaaacataaaaaggaaaagttcctttatagcgcacaggacaatcacagggacattaagatgataaaaggtgaaaagccagtccaattgtttcacttatcaacataagctgtaaaacttgaacactcttggacgaatcatgaatgaattgttacacgatgctcagtgtttttccccccttcctagcccccaatttgttatttgttttttctattttcttccttagtatatatgtagcatatatgaaaaagggggaacaaggatcaggtgtttctaaagccttgagcacccaaattcatttcacaccttagttatagtaatccatactggttacggctgagttatgtacactagagttgtgttaattctt

SEQ ID NO: 83415 - DNA, 2687 bp, Zea Mays
gataatattagagcgctgtataccgtcgcgaaagaacatgttatcccaacatgtattgaccttgaccatcttcctcttcttcctggtctgtttctgccactccctccatgatcgcctaacctcagtaacaccactctaccccggtgacaagctcgtctccgacaatggtggcatgtttgctctcggcttcttcaacctcaccaccgtcaactcaacgcgaagcctgtacctcggcatatggtacaacaacatccccgagcgcacctacgtctgggtagccaaccgcaacagcccaatcaccacgccttcagcaaagctagtcctcaccaacacttcccgcctggtgctgtccgactccgagggccgcgtagtctgggcgacagacaacagcgtcgtcgccggcggcagcggcaccggcaccggaggctccggagtgctgcggagcacggggagcttcgagctggagctgcagctgcccaacggcacagcaggcgtggtgtggaagagcctcgaccaccccaccgacaccatcctcccgaccttcaggctgtggaccaactacagggcccacacggcggtgcgcgtcgtcgcctggaagggccctcgggacccttccgccggcgagttctccctcagcggcgaccccggcagccggggcctccagatcgtcatctggcggggcacaggcacaggcacagcgggcggccgctcgtggcgcagcggcgtgtggaacggcgcgggcgccttctcctccatcaacaggttcgtgtactcccaggtcgtcgacgacgggggcacgatctacgcggcgtacaacgccgccggcggccccacgacgcactggaagctggactacacggggaacgtgagcctccgcgtctggaacgtcgagtcgtcgtcgtggagcgtcctcttcgagggccccggcaccggctgcctgggctacggcgcgtgcgggccgttcggctactgcgacgccacggggcgcgacggcggcgtccaggagtgcaagtgcctcgacgggttcgagccggaagacggcttcttccgcgacttctccagagggtgccggaggaaggaagcgctgcaggcgtgcggcggcggcggcgaaggtggcggcgggaggaggcattatttcctggccttgccggggatgaaggtgcccgacaagttcctgtacgtcaggaacagaagctttgaggagtgcgctgccgagtgcgaccgcaactgctcctgcaccgcgtacgcttatgccaacttgagcggcatcgtcaccatgagtgccaccagtgacgtgtcaaggtgcttgctttggatgggggagcttgtcgacaccggcaaggacagtgatttaggaaacaacaacaagaagaagatcggcagcatggctatggagattgtgctcccggtgatggcatgtctgttgatgctcacatcatgtgtatgtcttgtcactatatgcaagtcaagagctcgcacgcgacgatggaacaaggaagcacacgagaggagcgttcacggtttctgggatcaaaatccagaactatcgtgtacaagctttgcggagctcaaagcagcaacaaatagttttcacgaagccaacttgcttggacaaggcggctttggaaaagtatacaaggggacactggaagatggcagggaagttgctgtcaagaggctgagcaacggctctgagcaaggtaaagaacagctcagaaacgaactagtcctcattgcgagtctgcagcacaagaacctggtcaggcttctgggctgttgcatccacgaagacgagaagctgctcatatacgaatacctgcccaacaagagcttagacaaattcctcttcgatcctgcgctcaagtccatgctcgactggccaaaacggttcaacataatcaaaggggtagctcgtggaatcctttacctccaccaggactcaaggatggtgatcatccacagagatctcaaggcgagcaacatcctgctggacgcagagatggaccccaagatctccgacttcggcatcgccaggatcttcgggtgtagggagcagcaagcaacttgctttgcttgtgaaatggttcggacacacagcggttacatgtcgcctgagtacactatggagggcatcttctcggtcaagtccgacacctacagcttcggcatcttgctgctggagatagtcagtgggctgaagatcagtgcccctcctcatctactgacgggctatccaagccttattgcctacgcatggaacctatggaaagatgggacggcgagggagttcgtagacgccatggtcgtggagagccgctgctcgcttgacgaagccctgcagtgcatccacatcgggctgctgtgtgtgcaggacagcccgaacgacaggccgctcatgtcgttggtcgtgtccatgctcaacaacgaggccgcgccacgcccagtgcccagccagccgttgtttttcgcgcagaggtaccatgaagccctggcgacgagaggagactattcggaacactctgctaatgacgtcagcctgtcgatgctacaaggccgatagatgttatggcccgtcgtttggatcccttcgattttgaaggaattagaatctacttaacagatcaggctattttgtttcgaatttgacattttaccgttttccaaagtttagatataaagctatttca

SEQ ID NO: 83416 - DNA, 2657 bp, Zea Mays
caaagataatattagagcgctgtataccgtcgcgaaagaacatgttatcccaacatgtattgaccttgaccatcttcctcttcttcctggtctgtttctgccactccctccatgatcgcctaacctcagtaacaccactctaccccggtgacaagctcgtctccgacaatggtggcatgtttgctctcggcttcttcaacctcaccaccgtcaactcaacgcgaagcctgtacctcggcatatggtacaacaacatccccgagcgcacctacgtctgggtagccaaccgcaacagcccaatcaccacgccttcagcaaagctagtcctcaccaacacttcccgcctggtgctgtccgactccgagggccgcgtagtctgggcgacagacaacagcgtcgtcgccggcggcagcggcaccggcaccggaggctccggagtgctgcggagcacggggagcttcgagctggagctgcagctgcccaacggcacagcaggcgtggtgtggaagagcctcgaccaccccaccgacaccatcctcccgaccttcaggctgtggaccaactacagggcccacacggcggtgcgcgtcgtcgcctggaagggccctcgggacccttccgccggcgagttctccctcagcggcgaccccggcagccggggcctccagatcgtcatctggcggggcacaggcacaggcacagcgggcggccgctcgtggcgcagcggcgtgtggaacggcgcgggcgccttctcctccatcaacaggttcgtgtactcccaggtcgtcgacgacgggggcacgatctacgcggcgtacaacgccgccggcggccccacgacgcactggaagctggactacacggggaacgtgagcctccgcgtctggaacgtcgagtcgtcgtcgtggagcgtcctcttcgagggccccggcaccggctgcctgggctacggcgcgtgcgggccgttcggctactgcgacgccacggggcgcgacggcggcgtccaggagtgcaagtgcctcgacgggttcgagccggaagacggcttcttccgcgacttctccagagggtgccggaggaaggaagcgctgcaggcgtgcggcggcggcggcgaaggtggcggcgggaggaggcattatttcctggccttgccggggatgaaggtgcccgacaagttcctgtacgtcaggaacagaagctttgaggagtgcgctgccgagtgcgaccgcaactgctcctgcaccgcgtacgcttatgccaacttgagcggcatcgtcaccatgagtgccaccagtgacgtgtcaaggtgcttgctttggatgggggagcttgtcgacaccggcaaggacagtgatttaggaaacaacaacaagaagaagatcggcagcatggctatggagattgtgctcccggtgatggcatgtctgttgatgctcacatcatgtgtatgtcttgtcactatatgcaagtcaagagctcgcacgcgacgatggaacaaggaagcacacgagaggagcgttcacggtttctgggatcaaaatccagaactatcgtgtacaagctttgcggagctcaaagcagcaacaaatagttttcacgaagccaacttgcttggacaaggcggctttggaaaagtatacaaggggacactggaagatggcagggaagttgctgtcaagaggctgagcaacggctctgagcaaggtaaagaacagctcagaaacgaactagtcctcattgcgagtctgcagcacaagaacctggtcaggcttctgggctgttgcatccacgaagacgagaagctgctcatatacgaatacctgcccaacaagagcttagacaaattcctcttcgatcctgcgctcaagtccatgctcgactggccaaaacggttcaacataatcaaaggggtagctcgtggaatcctttacctccaccaggactcaaggatggtgatcatccacagagatctcaaggcgagcaacatcctgctggacgcagagatggaccccaagatctccgacttcggcatcgccaggatcttcgggtgtagggagcagcaagcaacggttacatgtcgcctgagtacactatggagggcatcttctcggtcaagtccgacacctacagcttcggcatcttgctgctggagatagtcagtgggctgaagatcagtgcccctcctcatctactgacgggctatccaagccttattgcctacgcatggaacctatggaaagatgggacggcgagggagttcgtagacgccatggtcgtggagagccgctgctcgcttgacgaagccctgcagtgcatccacatcgggctgctgtgtgtgcaggacagcccgaacgacaggccgctcatgtcgttggtcgtgtccatgctcaacaacgaggccgcgccacgcccagtgcccagccagccgttgtttttcgcgcagaggtaccatgaagccctggcgacgagaggagactattcggaacactctgctaatgacgtcagcctgtcgatgctacaaggccgatagatgttatggcccgtcgtttggatcccttcgattttgaaggaattagaatctacttaacagatcaggctattttgtttcgaatttgacattttaccgttttccaaagtttagatataaagctatttca

SEQ ID NO: 83417 - DNA, 1258 bp, Zea Mays
gaagaacatgcgatgcgatcaaacaaagaagtgtgccttgccagaatttatcacagagcgctctatttttccctccgaggaattagcagactttctggatgcgaatcatcagcggcgagcgacaagaggcatcccgacctcggcgtcgggctaagcctgctgttcctgctggccaagacgtccgacgagttcaacaagatggccaaggtgcgcgcggagatggaggcgctcctgagagagttaaaagacggggttaggaccaagagcggcggcaccgagggccacggcgcgccgaaagaccgcaaccgcgagtccaccacgtcgagctgcgtcaccgacggcaacgaccagaccgcaagcgctcgcctggagtaccagctcgcctcgtcttgcgtggagccggcgggctacgagaggtcgtccgaggatgacggaggctgctgtgcgaggatggagttggacgtgcttgaggaggagttccacgccgagctggagctgcttcagggtaactatgagtcagggacaccatcgtttctgcctgaagaagaagaagaggaacactattccgagccctacgacgagatggccgactaccgggatggagttgatgaagattcaaggggaggtgttgaggatgaagacgacgacgacgaccatgacgctgagtacaacggagtttctgccgtacagttggagagaaggctccacgagcttctccacgaaagaaaccgggaccggattgaggagctggaagccgcgttgaggcgtgcggagaagaagcttgttgagaaagaaatggaggtgtccctgtggaaggacacggctaagtttgcgttgagacaggacaaggagttgcaatgagcatcgaatttctcctgttctctttcaatcgtacaactcttgcgcacgatttcatcggctgtccatgatcaccgaccgccgaaggaggattttggtcaaacaaggtttgccatggcgaactgcggtttgtggaagatatagtcaacctgttcataccaaagtttagtgctagcatattagatctccagtgaacgttttgggctccggtaaaaatcagtagaatgctgtgtaacagtgtaagttagcctactggtgtacggatcaatatgagatttgatacttcatgtttctgtatgcgcattacatggatggattatgtgtgaaatcagacttctcatgtgcgtcttttccctttaaaatttgtccacaagtgtgaacatttctagcaaggtttaac

SEQ ID NO: 83418 - DNA, 2951 bp, Zea Mays
aacacgcacccggcgtaccgcgaggggttccgggtccacctgtcagcgtcccgcctaaaccccgtcgccgcgccgcccagggccggcaggctggtagacccgtcaaatccaagcaaaggccaccccggccggcgacgacttccccttccaacacccacctcgcccgtccctccctccccgcaccctgatcccccggcatccatccatggcgacgaacagcgcggtgattgtgctcctcctcgtcgctgctgccgtactcgcctgcgcgggcggtgcgcgcgggttctacctcccgggcgtcgcccccgccggtttcctcaagaaggacccgctcgccgtgaaggtgaatcagctgagctccatcaagacgcagctgccctactcctactactccctccccttctgcaggccgggcacaatcgtcgatagcgccgagaaccttggcgaggtgctccgcggcgaccgcatcgagaattcactctacgtgttcgagatgatggagcctaggctgtgccagatcgtgtgcaagattgctccaacccaagatgaagcgaaggatctgaaggagaaaattgaggatgagtaccgcataaacatgatccttgacaaccttcctttggtcgtcccaattaagagattggatcaagaggcacctactgtataccagcaaggcgtgcatatcggcatcaagggacagtactcagggagcaaggaagagaagcatttcattcacaaccacttcacatttctggtgaagtatcacaaggatgacacaggtcttgccaggattgttgcctttgaggttaaaccatacagtattaagcacgaatttgatggcgactggaaggggaatgctacactccttaaaacctgtgacccacactcaagacgccttgtcgtagactctgattcacctcaagaagtagatgccaacaaagagatcattttcacctatgatattaactttgaggaaagtcctatcaagtgggcatcacgctgggacacctaccttctgatggcagacgaccaaatccattggttttctattgtcaattcactgatgatagtcctcttcctctctgggatggttgccatgatcatgctccgaactctttaccgcgacatctccaagtacaaccagttagaggaccaggaggacgcccaggaggagacaggatggaagcttgtccatggagatgtgttcaggcctcctgtcaatgctgacctgctgtgcgtatatgtcggtacaggcgtacagttcttaggaatgctgcttgtcaccttgctgtttgccatcctcggcctcctttcacctgcgaatcgcggagggctcatgacagcaatgctcctcctctgggtcttcatggggctgtttgcagggtacgcctcctcgcggctttacaggatgttcaagggctcgcagtggaagaatgtcaccatcaagaccgcgctgatgttccctggcatcgtgtttgcaattttcttggtcctgaatgcactcatctggggcgagaaatcctcaggcgccgtgccattcaccaccatgtttgctctggtactcctctggttcggcatctccgtgccattggtctttatcggcagctacctcggcttcaagaaacctgccatggaggacccagtgaggacaaacaagatagcacggccaataccggagcagccatgagatcgccatcgtgctctgctacttccagctctgcggcgaggactaccagtggtggtggagatcctacctgacgtctggctcgtcagcgctgtacctcttcctctacgccacgttctacttcttcaccaagctggaaataacgaagaccgtctccggcgtcctatactttggctacatgctcattgcctcctacgccttctttgtgctcaccggcaccattggcttctacgcctgcttctggttcaccaggctcatctactcttcggttaagatcgactagagagtaacagctgcaacactgctccgtgggttttcgaaatcagagatcaagagagaatactaggtaacgaaccatcagaatttgagagggtagtgtgcgttatttttataaggtggaacttcaaacgtagggtgcttattcagtgctttagggtttttacagtttgattctggaacactaagtcagtttacttcgaagtcagtattttcagtgtgtatcccttacagaagaggtgtctgatggtataattcaactacttaacaatttaaccatatgttatgtttggtgaaattatgatggtattagcagtttgattcagcaacattaaatgtataaattagtgtactggccacaccccacacaacaagtttcggttacagatgctacaatgaaacgagcttaacatttgaaccacatatcttccgtggttctaataattaaatcacaagggaggctacttattcagtaagaaaattggcatgttatacatacatggataacaagatagtagcactcgaggtttttgcacatatggaacacatacataacacccgccaaagagcctaatcctatcttattttcggaacatctcggtaagctagctaatcgacgatctccacgggccttttctaagctcggctggcctgctggtcgcgcccgttcttcttgctcccgaacatgacgtagctgaggccgccaacgacgatgaggccgccgaccgccagcgtcgttgggctgtagcgccgtagagggctcgacggatgcgccgatgccgaccccgcgcgcttgagcgggtcttctgccatggacgcccacgcgtacatcttctccggccacatcacgcacacacggtgctcctttctggattctgatgatggctacctccactacacggactaggaagctctgtgtcctgtcctgctccgtgccgaagcagctttatggtggtagcaggttaagcggcaagaggacacgcatggagttcgc

SEQ ID NO: 83419 - DNA, 2648 bp, Zea Mays
aacacgcacccggcgtaccgcgaggggttccgggtccacctgtcagcgtcccgcctaaaccccgtcgccgcgccgcccagggccggcaggctggtagacccgtcaaatccaagcaaaggccaccccggccggcgacgacttccccttccaacacccacctcgcccgtccctccctccccgcaccctgatcccccggcatccatccatggcgacgaacagcgcggtgattgtgctcctcctcgtcgctgctgccgtactcgcctgcgcgggcggtgcgcgcgggttctacctcccgggcgtcgcccccgccggtttcctcaagaaggacccgctcgccgtgaaggtgaatcagctgagctccatcaagacgcagctgccctactcctactactccctccccttctgcaggccgggcacaatcgtcgatagcgccgagaaccttggcgaggtgctccgcggcgaccgcatcgagaattcactctacgtgttcgagatgatggagcctaggctgtgccagatcgtgtgcaagattgctccaacccaagatgaagcgaaggatctgaaggagaaaattgaggatgagtaccgcataaacatgatccttgacaaccttcctttggtcgtcccaattaagagattggatcaagaggcacctactgtataccagcaaggcgtgcatatcggcatcaagggacagtactcagggagcaaggaagagaagcatttcattcacaaccacttcacatttctggtgaagtatcacaaggatgacacaggtcttgccaggattgttgcctttgaggttaaaccatacagtattaagcacgaatttgatggcgactggaaggggaatgctacactccttaaaacctgtgacccacactcaagacgccttgtcgtagactctgattcacctcaagaagtagatgccaacaaagagatcattttcacctatgatattaactttgaggaaagtcctatcaagtgggcatcacgctgggacacctaccttctgatggcagacgaccaaatccattggttttctattgtcaattcactgatgatagtcctcttcctctctgggatggttgccatgatcatgctccgaactctttaccgcgacatctccaagtacaaccagttagaggaccaggaggacgcccaggaggagacaggatggaagcttgtccatggagatgtgttcaggcctcctgtcaatgctgacctgctgtgcgtatatgtcggtacaggcgtacagttcttaggaatgctgcttgtcaccttgctgtttgccatcctcggcctcctttcacctgcgaatcgcggagggctcatgacagcaatgctcctcctctgggtcttcatggggctgtttgcaggagatcgccatcgtgctctgctacttccagctctgcggcgaggactaccagtggtggtggagatcctacctgacgtctggctcgtcagcgctgtacctcttcctctacgccacgttctacttcttcaccaagctggaaataacgaagaccgtctccggcgtcctatactttggctacatgctcattgcctcctacgccttctttgtgctcaccggcaccattggcttctacgcctgcttctggttcaccaggctcatctactcttcggttaagatcgactagagagtaacagctgcaacactgctccgtgggttttcgaaatcagagatcaagagagaatactaggtaacgaaccatcagaatttgagagggtagtgtgcgttatttttataaggtggaacttcaaacgtagggtgcttattcagtgctttagggtttttacagtttgattctggaacactaagtcagtttacttcgaagtcagtattttcagtgtgtatcccttacagaagaggtgtctgatggtataattcaactacttaacaatttaaccatatgttatgtttggtgaaattatgatggtattagcagtttgattcagcaacattaaatgtataaattagtgtactggccacaccccacacaacaagtttcggttacagatgctacaatgaaacgagcttaacatttgaaccacatatcttccgtggttctaataattaaatcacaagggaggctacttattcagtaagaaaattggcatgttatacatacatggataacaagatagtagcactcgaggtttttgcacatatggaacacatacataacacccgccaaagagcctaatcctatcttattttcggaacatctcggtaagctagctaatcgacgatctccacgggccttttctaagctcggctggcctgctggtcgcgcccgttcttcttgctcccgaacatgacgtagctgaggccgccaacgacgatgaggccgccgaccgccagcgtcgttgggctgtagcgccgtagagggctcgacggatgcgccgatgccgaccccgcgcgcttgagcgggtcttctgccatggacgcccacgcgtacatcttctccggccacatcacgcacacacggtgctcctttctggattctgatgatggctacctccactacacggactaggaagctctgtgtcctgtcctgctccgtgccgaagcagctttatggtggtagcaggttaagcggcaagaggacacgcatggagttcgc

SEQ ID NO: 83420 - DNA, 1342 bp, Zea Mays
cctgcgctgcttcctttgtcaggttcagtcgctcaccaatctgccgttcacacctctctcgctgcctttatttcctgttggcgacgctctcgccaggtcttcggcggcccgttcgtcggcgactagcgcctccgtttgccaggtcttcgtcgtccgttcgccgtcgactggtgcccagcaggtacatctggaagaatggtgatttaccttagcacaccaaaaaccgacaaggtatccgaagatggggaaaacgataaacttaaattcggactttcatctatgcaagggtggcgtgcaactatggaagacgctcactcggctttgctagatcttgacaatgacactgcatcctttggtgtttttgatggacatggaggaaaagtagttgccaaattctgtgcaaaatatctacacatagaagttctccataccgaagcctatgctgctggtgacctgggtgctgctgtccacagagcttacttaagaatggatgaaatgatgcggggtcaaagaggatggcaggaactccaagcacttggagataagataaatcagttcactggcataacagaaggcttgatttggtcccctaaagcaagtgattcaaatgatagacatgatgattgggctttcgaggagggaccacactctgactttactgggccaaattgtgggagtacagcatgtgtagcattagtgagaaataggcaactcgttgtggcaaatgctggtgactcccgctgcgtcatctcaaggaatggccaggcatacaatttgtcaagagaccataaaccagagcttgaggcagagagagaaaggatacaaagtgctgggggttacattaaaatggggcatgtaaatggaagtttaaacttgtcaagagctattggagacatggagcttaaacaaaacaagttcttgtcccctgataagcaaattttgaccgcaaaccctgacataaacattgtcgagctatgtgacgacgacgaattcattgttttagcatgtgatggcatttgggactgcatgtcaagccagcagttggttgatttcatccgtgaacatataaacacagaggaaagcctttctgcagtatgtgaaggagtgcttgatagatgcctggctccatcgaccatgggtggcgagggatgcgataacatgacgatgatcttggtgcagttcaagaagccatttgctcaggtaaaggatgccagtgatgcggaacaactaactggagatgcgggatgctctgagacccagtgagtcacctgtgattgtgtggggccgaggagaatgactctgacaagcagatatagcgaagacaggactcttttggagtctt

SEQ ID NO: 83421 - DNA, 1871 bp, Zea Mays
cctgcgctgcttcctttgtcaggttcagtcgctcaccaatctgccgttcacacctctctcgctgcctttatttcctgttggcgacgctctcgccaggtcttcggcggcccgttcgtcggcgactagcgcctccgtttgccaggtcttcgtcgtccgttcgccgtcgactggtgcccagcaggtacatctggaagaatggtgatttaccttagcacaccaaaaaccgacaaggtatccgaagatggggaaaacgataaacttaaattcggactttcatctatgcaagggtggcgtgcaactatggaagacgctcactcggctttgctagatcttgacaatgacactgcatcctttggtgtttttgatggacatggaggaaaagtagttgccaaattctgtgcaaaatatctacacatagaagttctccataccgaagcctatgctgctggtgacctgggtgctgctgtccacagagcttacttaagaatggatgaaatgatgcggggtcaaagaggatggcaggaactccaagcacttggagataagataaatcagttcactggcataacagaaggcttgatttggtcccctaaagcaagtgattcaaatgatagacatgatgattgggctttcgaggaggtacttgtggaactggcatggttccataattctatactcatcttcctatgtctaggagagcatgccatctgccttttatttattaatttggcagtcattggatttcattctgaaagtgtcacaggattatcattaataagggaccacactctgactttactgggccaaattgtgggagtacagcatgtgtagcattagtgagaaataggcaactcgttgtggcaaatgctggtgactcccgctgcgtcatctcaaggaatggccaggcatacaatttgtcaagagaccataaaccagagcttgaggcagagagagaaaggatacaaagtgctgggggttacattaaaatggggcatgtaaatggaagtttaaacttgtcaagagctattggtatcatttttttacttgcttctttttgttcatacctctcaccttaactgatgtcttgcatatgcaaaatacctttctaggagacatggagcttaaacaaaacaagttcttgtcccctgataagcaaattttgaccgcaaaccctgacataaacattgtcgagctatgtgacgacgacgaattcattgttttagcatgtgatggcatttgggactgcatgtcaagccagcagttggttgatttcatccgtgaacatataaacacagaggaaagcctttctgcagtatgtgaaggagtgcttgatagatgcctggctccatcgaccatgggtggcgagggatgcgataacatgacgatgatcttggtgcagttcaagaagccatttgctcaggtaaaggatgccagtgatgcggaacaactaactggagatgcgggatgctctgagacccagtgagtcacctgtgattgtgtggggccgaggagaatgactctgacaagcagatatagcgaagacaggactcttttggagtcttggtacatggcctgacgctgaacctgggtaaaacaggagtacgatgttgcaatgtacataccaaccatgcgctgagttggcgtgaaggatatattcattgttccactgttgtctttaaccaaacgtgctgttttcttccggttgtgatttttggtgacctgatcatctgacaatatctaattatacatttgggaggaaatgatgttacaatagttattgtgggtgtttgtttgggattataatttgttcagattatataatctaacttattttaaattaaactgttagttcaaaataagttagattatat

SEQ ID NO: 83422 - DNA, 2196 bp, Zea Mays
cctgcgctgcttcctttgtcaggttcagtcgctcaccaatctgccgttcacacctctctcgctgcctttatttcctgttggcgacgctctcgccaggtcttcggcggcccgttcgtcggcgactagcgcctccgtttgccaggtcttcgtcgtccgttcgccgtcgactggtgcccagcaggtacatctggaagaatggtgatttaccttagcacaccaaaaaccgacaaggtatccgaagatggggaaaacgataaacttaaattcggactttcatctatgcaagggtggcgtgcaactatggaagacgctcactcggctttgctagatcttgacaatgacactgcatcctttggtgtttttgatggacatggaggaaaagtagttgccaaattctgtgcaaaatatctacacatagaagttctccataccgaagcctatgctgctggtgacctgggtgctgctgtccacagagcttacttaagaatggatgaaatgatgcggggtcaaagaggatggcaggaactccaagcacttggagataagataaatcagttcactggcataacagaaggcttgatttggtcccctaaagcaagtgattcaaatgatagacatgatgattgggctttcgaggaggtacttgtggaactggcatggttccataattctatactcatcttcctatgtctaggagagcatgccatctgccttttatttattaatttggcagtcattggatttcattctgaaagtgtcacaggattatcattaataaggtttctttcttctcatttattttttcgctaaaatcattcaatgcagaaacttgtaacagtagacttatggttcttgagtacacgtgcaagtgcaacgctgatgttttaagacctaaaagggtatgcctacaaaggaaatttgttcttttaacatttaaaattgatacctatgttgcctagggatgctacctcttgaaaaggatatctatgcataagaaggaagtttattcttgtaacacctaaaattgatggatgtgttgcctaacaatgctaactcttgaagaatgacctccaatttcctgaactggagcctcttcttgttttgctggaaggcaaatcttggcatttctctttgttgccagttcttttgttggaaatgaacattccatccacctaggtagtcttatagaaatttcttttatcagggaccacactctgactttactgggccaaattgtgggagtacagcatgtgtagcattagtgagaaataggcaactcgttgtggcaaatgctggtgactcccgctgcgtcatctcaaggaatggccaggcatacaatttgtcaagagaccataaaccagagcttgaggcagagagagaaaggatacaaagtgctgggggttacattaaaatggggcatgtaaatggaagtttaaacttgtcaagagctattggagacatggagcttaaacaaaacaagttcttgtcccctgataagcaaattttgaccgcaaaccctgacataaacattgtcgagctatgtgacgacgacgaattcattgttttagcatgtgatggcatttgggactgcatgtcaagccagcagttggttgatttcatccgtgaacatataaacacagaggaaagcctttctgcagtatgtgaaggagtgcttgatagatgcctggctccatcgaccatgggtggcgagggatgcgataacatgacgatgatcttggtgcagttcaagaagccatttgctcaggtaaaggatgccagtgatgcggaacaactaactggagatgcgggatgctctgagacccatggggccgaggagaatgactctgacaagcagatatagcgaagacaggactcttttggagtcttggtacatggcctgacgctgaacctgggtaaaacaggagtacgatgttgcaatgtacataccaaccatgcgctgagttggcgtgaaggatatattcattgttccactgttgtctttaaccaaacgtgctgttttcttccggttgtgatttttggtgacctgatcatctgacaatatctaattatacatttgggaggaaatgatgttacaatagttattgtgggtgtttgtttgggattataatttgttcagattatataatctaacttattttaaattaaactgttagttcaaaataagttagattatat

SEQ ID NO: 83423 - DNA, 1585 bp, Zea Mays
cctgcgctgcttcctttgtcaggttcagtcgctcaccaatctgccgttcacacctctctcgctgcctttatttcctgttggcgacgctctcgccaggtcttcgtcgtccgttcgccgtcgactggtgcccagcaggtacatctggaagaatggtgatttaccttagcacaccaaaaaccgacaaggtatccgaagatggggaaaacgataaacttaaattcggactttcatctatgcaagggtggcgtgcaactatggaagacgctcactcggctttgctagatcttgacaatgacactgcatcctttggtgtttttgatggacatggaggaaaagtagttgccaaattctgtgcaaaatatctacacatagaagttctccataccgaagcctatgctgctggtgacctgggtgctgctgtccacagagcttacttaagaatggatgaaatgatgcggggtcaaagaggatggcaggaactccaagcacttggagataagataaatcagttcactggcataacagaaggcttgatttggtcccctaaagcaagtgattcaaatgatagacatgatgattgggctttcgaggagggaccacactctgactttactgggccaaattgtgggagtacagcatgtgtagcattagtgagaaataggcaactcgttgtggcaaatgctggtgactcccgctgcgtcatctcaaggaatggccaggcatacaatttgtcaagagaccataaaccagagcttgaggcagagagagaaaggatacaaagtgctgggggttacattaaaatggggcatgtaaatggaagtttaaacttgtcaagagctattggagacatggagcttaaacaaaacaagttcttgtcccctgataagcaaattttgaccgcaaaccctgacataaacattgtcgagctatgtgacgacgacgaattcattgttttagcatgtgatggcatttgggactgcatgtcaagccagcagttggttgatttcatccgtgaacatataaacacagaggaaagcctttctgcagtatgtgaaggagtgcttgatagatgcctggctccatcgaccatgggtggcgagggatgcgataacatgacgatgatcttggtgcagttcaagaagccatttgctcaggtaaaggatgccagtgatgcggaacaactaactggagatgcgggatgctctgagacccatggggccgaggagaatgactctgacaagcagatatagcgaagacaggactcttttggagtcttggtacatggcctgacgctgaacctgggtaaaacaggagtacgatgttgcaatgtacataccaaccatgcgctgagttggcgtgaaggatatattcattgttccactgttgtctttaaccaaacgtgctgttttcttccggttgtgatttttggtgacctgatcatctgacaatatctaattatacatttgggaggaaatgatgttacaatagttattgtgggtgtttgtttgggattataatttgttcagattatataatctaacttattttaaattaaactgttagttcaaaataagttagattatat

SEQ ID NO: 83424 - DNA, 1227 bp, Zea Mays
cctgcgctgcttcctttgtcaggttcagtcgctcaccaatctgccgttcacacctctctcgctgcctttatttcctgttggcgacgctctcgccaggtcttcggcggcccgttcgtcggcgactagcgcctccgtttgccaggtcttcgtcgtccgttcgccgtcgactggtgcccagcaggtacatctggaagaatggtgatttaccttagcacaccaaaaaccgacaaggtatccgaagatggggaaaacgataaacttaaattcggactttcatctatgcaagggtggcgtgcaactatggaagacgctggaccacactctgactttactgggccaaattgtgggagtacagcatgtgtagcattagtgagaaataggcaactcgttgtggcaaatgctggtgactcccgctgcgtcatctcaaggaatggccaggcatacaatttgtcaagagaccataaaccagagcttgaggcagagagagaaaggatacaaagtgctgggggttacattaaaatggggcatgtaaatggaagtttaaacttgtcaagagctattggtcgagctatgtgacgacgacgaattcattgttttagcatgtgatggcatttgggactgcatgtcaagccagcagttggttgatttcatccgtgaacatataaacacagaggaaagcctttctgcagtatgtgaaggagtgcttgatagatgcctggctccatcgaccatgggtggcgagggatgcgataacatgacgatgatcttggtgcagttcaagaagccatttgctcaggtaaaggatgccagtgatgcggaacaactaactggagatgcgggatgctctgagacccatggggccgaggagaatgactctgacaagcagatatagcgaagacaggactcttttggagtcttggtacatggcctgacgctgaacctgggtaaaacaggagtacgatgttgcaatgtacataccaaccatgcgctgagttggcgtgaaggatatattcattgttccactgttgtctttaaccaaacgtgctgttttcttccggttgtgatttttggtgacctgatcatctgacaatatctaattatacatttgggaggaaatgatgttacaatagttattgtgggtgtttgtttgggattataatttgttcagattatataatctaacttattttaaattaaactgttagttcaaaataagttagattatat

SEQ ID NO: 83425 - DNA, 1244 bp, Zea Mays
gcaaaattttccacccatggcgcccgccgcgaactgcagcgtcatcgtcctcgctaaactgatattccgcgcgtgtgtgcttgcaggcactggcagccaggaggtatcggcgacgagatactgcagcgcgcgtccatcgcctcgtcccctccacgctccgatcccttcgcctcctccgcgcctccctccccgtccccctccttacccccaaaccctcggcgcaagtctcgcttccgcgacgcccctacccccgattctccactcggtcgcgccacatacacctccacctcgcccatctccgccacgcattctcgccaccgccgccacgcctccgcttcctccgcccccgctttcgcggccgatggatccggtgacggtgtcgcccgcctcaactccttcctccgtcgacagcgtgccatggtcgctgacctagcggcaggggaccgccctgcgtcgaggtccaccaagctcgtgctctccgacccctccaaaagtctgagctcgattgtggcggcaatatgctacgcgtggatgcttcccagcaagggtgatggccaggcaacggtgccggtggtgaacatgagccggagcaggatggctaggtgcaggcaggcggcttggctcctgtatcacgtcggggtcgacgcctcagcgctgctcttcgccgacgaggttgacacggatgggctaataatggaccagcgagttaacttgcttgtggtggggcaagatattttgaaatcaaaagctgaggttggctcagtttgcacaaccctgacccatacctattgtgaggatgcttatagcctgcttcaaaacttggacataaagaaacttctggtatcctgttagatacgaacaacctttccaagaagtgctcaaatagagattcagatgcagtgcagttgcttttgtttggaacctctgagcatatgaggcatgaattgtttcagcaattgatgcttgatcacaatgatcactcctttgttgagtatctgaagaacacctacagatattcaaccataaatggtaatgaggacagtcctccagagcaaaaacattcaacctcagcatcagggtcatcccaagatgttaaaaaatctaattcaactaaccaaaggacatcacgtggaagtggtggaaaggcctcagatgaagcctctcgggggaagaataagttcttcttggcgaatggtttggttttggttcaaataatccttttatcatttgtattagtttggtaa

SEQ ID NO: 83426 - DNA, 1170 bp, Zea Mays
gcaaaattttccacccatggcgcccgccgcgaactgcagcgtcatcgtcctcgctaaactgatattccgcgcgtgtgtgcttgcaggcactggcagccaggaggtatcggcgacgagatactgcagcgcgcgtccatcgcctcgtcccctccacgctccgatcccttcgcctcctccgcgcctccctccccgtccccctccttacccccaaaccctcggcgcaagtctcgcttccgcgacgcccctacccccgattctccactcggtcgcgccacatacacctccacctcgcccatctccgccacgcattctcgccaccgccgccacgcctccgcttcctccgcccccgctttcgcggccgatggatccggtgacggtgtcgcccgcctcaactccttcctccgtcgacagcgtgccatggtcgctgacctagcggcaggggaccgccctgcgtcgaggtccaccaagctcgtgctctccgacccctccaaaagtctgagctcgattgtggcggcaatatgctacgcgtggatgcttcccagcaagggtgatggccaggcaacggtgccggtggtgaacatgagccggagcaggatggctaggtgcaggcaggcggcttggctcctgtatcacgtcggggtcgacgcctcagcgctgctcttcgccgacgaggttgacacggatgggctaataatggaccagcgagttaacttgcttgtggtggggcaagatattttgaaatcaaaagctgaggttggctcagtttgcacaaccctgacccatacctattgtgaggatgcttatagcctgcttcaaaacttggacataaagaaacttctgcttgcaggtatcctgttagatacgaacaacctttccaagaagtgctcaaatagagattcagatgcagtgcagttgcttttgtttggaacctctgagcatatgaggcatgaattgtttcagcaattgatgcttgatcacaatgatcactcctttgttgagtatctgaagaacacctacagatattcaaccataaatgctaaccaaaggacatcacgtggaagtggtggaaaggcctcagatgaagcctctcgggggaagaataagttcttcttggcgaatggtttggttttggttcaaataatccttttatcatttgtattagtttggtaa

SEQ ID NO: 83427 - DNA, 1291 bp, Zea Mays
gttttgtggcccaattgcaatctcacacacctcactctgtgcaaaattttccacccatggcgcccgccgcgaactgcagcgtcatcgtcctcgctaaactgatattccgcgcgtgtgtgcttgcaggcactggcagccaggaggtatcggcgacgagatactgcagcgcgcgtccatcgcctcgtcccctccacgctccgatcccttcgcctcctccgcgcctccctccccgtccccctccttacccccaaaccctcggcgcaagtctcgcttccgcgacgcccctacccccgattctccactcggtcgcgccacatacacctccacctcgcccatctccgccacgcattctcgccaccgccgccacgcctccgcttcctccgcccccgctttcgcggccgatggatccggtgacggtgtcgcccgcctcaactccttcctccgtcgacagcgtgccatggtcgctgacctagcggcaggggaccgccctgcgtcgaggtccaccaagctcgtgctctccgacccctccaaaagtctgagctcgattgtggcggcaatatgctacgcgtggatgcttcccagcaagggtgatggccaggcaacggtgccggtggtgaacatgagccggagcaggatggctaggtgcaggcaggcggcttggctcctgtatcacgtcggggtcgacgcctcagcgctgctcttcgccgacgaggttgacacggatgggctaataatggaccagcgagttaacttgcttgtggtggggcaagatattttgaaatcaaaagctgaggttggctcagtttgcacaaccctgacccatacctattgtgaggatgcttatagcctgcttcaaaacttggacataaagaaacttctgcttgcaggtatcctgttagatacgaacaacctttccaagaagtgctcaaatagagattcagatgcagtgcagttgcttttgtttggaacctctgagcatatgaggcatgaattgtttcagcaattgatgcttgatcacaatgatcactcctttgttgagtatctgaagaacacctacagatattcaaccataaatggtaatgaggacagtcctccagagcaaaaacattcaacctcagcatcagggtcatcccaagatgttaaaaaatctaattcaactaaccaaaggacatcacgtggaagtggtggaaaggcctcagatgaagcctctcgggggaagaataagttcttcttggcgaatggtttggttttggttcaaataatccttttatcatttgtattagtttggtaa

SEQ ID NO: 83428 - DNA, 268 bp, Zea Mays
acgaatacgaaccgtgaaagcgtggcctatcgatcctttagaccttcggagtttgaagctagaggtgtcagaaaagttaccacagggataactggcttgtggcagccaagcgttcatagcgacgttgctttttgatccttcgatgtcggctcttcctatcattgtgaagcagaattcaccaagtgttggattgttcacccaccaatagggaacgtgagctgggtttagaccgtcgtgagacaggttagttttaccctactgatgaccg

SEQ ID NO: 83429 - DNA, 258 bp, Zea Mays
tatgactctcttaaggtagccaaatgcctcgtcatctaattagtgacgcgcatgaatggattaacgagattcccactgtccctgtctactatccagcgaaaccacagccaagggaacgggcttggcggaatcagcggggaaagaagaccctgttgagcttgactctagtccgactttgtgaaatgacttgagaggtgtaggataagtgggagcctccgggcgcaagtgaaataccactacttttaacgttattttagt

SEQ ID NO: 83430 - DNA, 953 bp, Zea Mays
atgccttgcttccctccctccatttctcctttgcctcctcagctcaaaaagcggagccacccacgctccctggtccacatctccttccacacctgcaccggtgatgcccatgcacaggctgcacagcacaactgctgctgccgcgaggctaaaaacccatctgctctcctgccgcggcttcctccgcaagcacacccgggcatgggcaacattgctgcgtccggaggagtgcaggtccgtcggcggccgcctgcggtggacgagcgcctcacgcggccgcgccgcctcgtccgcgaactacccgaccttgacgccggccgccttcgtcgtctcatccgcactggcgacctcgcgccttgctttgaccccgccgaggacgccagcgccggcctcaccgaggagtgcccgatttgcttctttttctacctgagtctgaatagatccaggtgctgcggcaaagggatctgcactgaatgcttcttacagctgatgccatccggggcttctaaagttatccacactagctctcgccatcgccactaggtactgcccaactgtgagggaaggtggagatttcagacttgcagtcgcaggctcgcgcgatcgcgcacgtttctgccggcaggattcgttggtggttttgcggatcccgatgccggctcaactagcgtagctgcgaaggccggccggccggccctcggagaggtttgcggggaaggagggccgggtccaccgccggggatctaatctattccggggggtgccacggaaccagattggaaatggggcgctctgcttcatcccggggtcgctcgctgttcactgggaataattgggctcttccggatatcgctgtcatgctcgtttggtgctctctcagagagtacatgtatagaggataatcactaatgcagaggtctcgctgttctgggcgcgaggctaaggttcttaat

SEQ ID NO: 83431 - DNA, 3157 bp, Zea Mays
acgtattctctggtcttatccaaagccgtcgccgtggctcgttcccgaagaaactgcaccaaaattgctcacgtttctgggggcttatccttttccttcggtcaccatcgcatccattctcgatccctctacctctcgcatccggtgcctggctgccagccccagcgctcgccaacctcatcttccccggcgtttcctcccagctccctccaccatgccgctgccatggaactcactgctcggccgcgccctggccatgctccctgcgctcgccagccgtgcgcatctccctctgcgcgcgcgcgcctgcgtcctgcgccgcgaaccccgccgtggagcttccccgagctcgccccatggcgcccggccgagctcctccctgccgtgttcttgctcggcgtccgggttttcctgtgcgccacggtcttcctccccgagctcgccccagccccttgtattccccatggcccggagccttcttccagctccagctcggatccctctcccatggctctctgcgtgctagccgctgcgcgcccatctatctctcgcggatctccctccccagctcctctctgctcgtgccgtcgcccagcctgttggcgcgcgcatgctcctctcgccgcgcccccctgcttctcttcctccccttctctccttgctgcgtgcgccctgcgctctgctcgcagcgccgcagttctttctcccggctccctctgtccgttctcgaccgcgccttgcaccgccagccacgcctccctggccatcatggcgtcactatttcctgttgcgccgcgacatcgtcgtgctcgggtgcttagtgtcgaggtcgccgcgccattgtcgttctggcttcccttgtcctcgtgcgggttttggtcgtgtccacatctgagacatcaacatctgcatcccagcatcgtcatcgtttcagcagccttgttgcaccttgcgatcacgccgaaagacgaaagggaagcaccagtgccacgctcgtcaaatcggtgatatacgcaagccggacagcgtcgtcgatttaatggtttcaatccggatttagctttggtgagctaatttattatttttgttagctggtttgatgaatggcttggctaggtgtgttagtcgtgatgatcttgtgactatattagtgtggttctaacacatcgtttcatgcagtgaggtgattgtgaagtggtcgcgttaggtgttgaaatctagattttagatatagatttatgcgaagaatattagtagatttatatgcaatatgattatgctaactagtaatgcgaaaagtaagtttagcgtttgttgatagtactatcagtgttattagtgagagttcttattggtatggtgaaagtgatgcgttgccatagtagcggatgtattatctaggtttattaataaattaaatgtcataaataaataattgttgttacccaaaataattaggaagcgaataacatcgataagtccgttttggtaaaaacctaagaactatcaatggatagtgcgtataagcgctttaaatcttgggttgttacggaaatagttttgtaaaaccctatatcatataataatactctgcttgttagatcccgagtggtgtgatgcgttgtggtgaagtcttgaagtagctaacctaaagtgaacatgtgtcccatgtttaatgtgtttagttattgttacctaatgtttgggttaggtctgattacctcaaagttcatgattgtataaaatcagaagcatctagtgtttatgcatataagtgttttaaacctttaaattaagataaatactatactataaaattctatgcttcttaataatgagttgtttcttagtactaagagtggtgttaatcattcggtaggatattctagttcatgaggttggatttatgtgtagcctttttgatgcttgagttcatccgtttaaatgaaaaaaatgtaattgtgatacgtagtgatatgtcaacatatagtaattgtttttaaatattgcggtacatcaggatttgaatattgctaatgctacttgatgattggattaggtccaattgactagaacgtcatgtctgatgtagagttaaatatatctagttgttacacataagaattgtgatgtcttgctttaagtctgtatcctccttagtataacttatctatcttgcgctatttatgctcctattcactcatatgcagtatgcatatcatctaggtacgttaattaatcacgtgatgtgaaggacaagagctggattaatcacaagacgatgctgatggatgaagctaaagtggatgaatcaaccaagtgccaggatgggagatactcaccaagtgatcgtcatttaacaacactaacatagtgttatcccaggcaagccccggtgcatttgccacctccttctgttttaaaaacttttatcacttacctgctgcattaggtgataggagttgtgtgaataaacaattgatgcattaccattccttggaatttgattatcctccttgctacctgttttataaagagaaccaatgaggcttagccctgcctagagaactaaaacttgattctttttaaaagaatgctgtgtaacactggtatgggtttgttttatgaaaaaggacttgtaatggtgagagcatcatctgcagtgatgaattcatcattcaagtatggtacctctgtcaggtacatgatttgggtgttaaataataagatgagaccagacgttgagcaggaaaggtcgcccgtctgtgtcgattaaggaccgtaccgaaagtaggcttgctgatctaggaccctttaactggccacatgcctcgtcatgggtaagcttagcctcggtcggaccaataccagaacagctcgcacgcactgggagtggagagatggcgagagtagcttgtaccctccgtggcaagagactggaaggtggggtgctgtactctcggaaacatggcgggcaccatggcgagagtaacgtgtaccaaccaggccaatggctggacggtggagtgctgtgctctcgggtcgcgtgaacccgttctggtcttgagaaaaccggtggcgagttgacatatgcaagggttaagtgctacatatgtcgtgtggttggagatcctcagctgagtattaatcgattcgg

SEQ ID NO: 83432 - DNA, 1996 bp, Zea Mays
acgtattctctggtcttatccaaagccgtcgccgtggctcgttcccgaagaaactgcaccaaaattgctcacgtttctgggggcttatccttttccttcggtcaccatcgcatccattctcgatccctctacctctcgcatccggtgcctggctgccagccccagcgctcgccaacctcatcttccccggcgtttcctcccagctccctccaccatgccgctgccatggaactcactgctcggccgcgccctggccatgctccctgcgctcgccagccgtgcgcatctccctctgcgcgcgcgcgcctgcgtcctgcgccgcgaaccccgccgtggagcttccccgagctcgccccatggcgcccggccgagctcctccctgccgtgttcttgctcggcgtccgggttttcctgtgcgccacggtcttcctccccgagctcgccccagccccttgtattccccatggcccggagccttcttccagctccagctcggatccctctcccatggctctctgcgtgctagccgctgcgcgcccatctatctctcgcggatctccctccccagctcctctctgctcgtgccgtcgcccagcctgttggcgcgcgcatgctcctctcgccgcgcccccctgcttctcttcctccccttctctccttgctgcgtgcgccctgcgctctgctcgcagcgccgcagttctttctcccggctccctctgtccgttctcgaccgcgccttgcaccgccagccacgcctccctggccatcatggcgtcactatttcctgttgcgccgcgacatcgtcgtgctcgggtgcttagtgtcgaggtcgccgcgccattgtcgttctggcttcccttgtcctcgtgcgggttttggtcgtgtccacatctgagacatcaacatctgcatcccagcatcgtcatcgtttcagcagccttgttgcaccttgcgatcacgccgaaagacgaaagggaagcaccagtgccacgctcgtcaaatcggtgatatacgcaagccggacagcgtcgtcgatttaatggtttcaatccggatttagctttggtacgttaattaatcacgtgatgtgaaggacaagagctggattaatcacaagacgatgctgatggatgaagctaaagtggatgaatcaaccaagtgccaggatgggagatactcaccaagtgatcgtcatttaacaacactaacatagtgttatcccaggcaagccccggtgcatttgccacctccttctgttttaaaaacttttatcacttacctgctgcattaggtgataggagttgtgtgaataaacaattgatgcattaccattccttggaatttgattatcctccttgctacctgttttataaagagaaccaatgaggcttagccctgcctagagaactaaaacttgattctttttaaaagaatgctgtgtaacactggtatgggtttgttttatgaaaaaggacttgtaatggtgagagcatcatctgcagtgatgaattcatcattcaagtatggtacctctgtcaggtacatgatttgggtgttaaataataagatgagaccagacgttgagcaggaaaggtcgcccgtctgtgtcgattaaggaccgtaccgaaagtaggcttgctgatctaggaccctttaactggccacatgcctcgtcatgggtaagcttagcctcggtcggaccaataccagaacagctcgcacgcactgggagtggagagatggcgagagtagcttgtaccctccgtggcaagagactggaaggtggggtgctgtactctcggaaacatggcgggcaccatggcgagagtaacgtgtaccaaccaggccaatggctggacggtggagtgctgtgctctcgggtcgcgtgaacccgttctggtcttgagaaaaccggtggcgagttgacatatgcaagggttaagtgctacatatgtcgtgtggttggagatcctcagctgagtattaatcgattcgg

SEQ ID NO: 83433 - DNA, 2012 bp, Zea Mays
acgtattctctggtcttatccaaagccgtcgccgtggctcgttcccgaagaaactgcaccaaaattgctcacgtttctgggggcttatccttttccttcggtcaccatcgcatccattctcgatccctctacctctcgcatccggtgcctggctgccagccccagcgctcgccaacctcatcttccccggcgtttcctcccagctccctccaccatgccgctgccatggaactcactgctcggccgcgccctggccatgctccctgcgctcgccagccgtgcgcatctccctctgcgcgcgcgcgcctgcgtcctgcgccgcgaaccccgccgtggagcttccccgagctcgccccatggcgcccggccgagctcctccctgccgtgttcttgctcggcgtccgggttttcctgtgcgccacggtcttcctccccgagctcgccccagccccttgtattccccatggcccggagccttcttccagctccagctcggatccctctcccatggctctctgcgtgctagccgctgcgcgcccatctatctctcgcggatctccctccccagctcctctctgctcgtgccgtcgcccagcctgttggcgcgcgcatgctcctctcgccgcgcccccctgcttctcttcctccccttctctccttgctgcgtgcgccctgcgctctgctcgcagcgccgcagttctttctcccggctccctctgtccgttctcgaccgcgccttgcaccgccagccacgcctccctggccatcatggcgtcactatttcctgttgcgccgcgacatcgtcgtgctcgggtgcttagtgtcgaggtcgccgcgccattgtcgttctggcttcccttgtcctcgtgcgggttttggtcgtgtccacatctgagacatcaacatctgcatcccagcatcgtcatcgtttcagcagccttgttgcaccttgcgatcacgccgaaagacgaaagggaagcaccagtgccacgctcgtcaaatcggtgatatacgcaagccggacagcgtcgtcgatttaatggtttcaatccggatttagctttgtatgcatatcatctaggtacgttaattaatcacgtgatgtgaaggacaagagctggattaatcacaagacgatgctgatggatgaagctaaagtggatgaatcaaccaagtgccaggatgggagatactcaccaagtgatcgtcatttaacaacactaacatagtgttatcccaggcaagccccggtgcatttgccacctccttctgttttaaaaacttttatcacttacctgctgcattaggtgataggagttgtgtgaataaacaattgatgcattaccattccttggaatttgattatcctccttgctacctgttttataaagagaaccaatgaggcttagccctgcctagagaactaaaacttgattctttttaaaagaatgctgtgtaacactggtatgggtttgttttatgaaaaaggacttgtaatggtgagagcatcatctgcagtgatgaattcatcattcaagtatggtacctctgtcaggtacatgatttgggtgttaaataataagatgagaccagacgttgagcaggaaaggtcgcccgtctgtgtcgattaaggaccgtaccgaaagtaggcttgctgatctaggaccctttaactggccacatgcctcgtcatgggtaagcttagcctcggtcggaccaataccagaacagctcgcacgcactgggagtggagagatggcgagagtagcttgtaccctccgtggcaagagactggaaggtggggtgctgtactctcggaaacatggcgggcaccatggcgagagtaacgtgtaccaaccaggccaatggctggacggtggagtgctgtgctctcgggtcgcgtgaacccgttctggtcttgagaaaaccggtggcgagttgacatatgcaagggttaagtgctacatatgtcgtgtggttggagatcctcagctgagtattaatcgattcgg

SEQ ID NO: 83434 - DNA, 672 bp, Zea Mays
caacagtctatcagcattcaggcaacattattactcgaatcacatcaccccctcctcatctgctcaggcaaagagacagcatgcgaggccctaacgctgctaccgcaacaagcaaaggcggcgccatggccggcttcaagcaagacctgctcaggaacctgctgctgggcatccgggcgtgccgccccttcgacgccacgagcctggaggaccggaagcgtgccgtcaagcgatccgccgacgtcgccatggcggcagcgcgcgccgcggccggcggcgggcgcgcgaggtggcccaaggccatcttggccgccgccgcggcgtccggacacagccccggcggcatacgcaaggcgaggaagagtgcgtgcaagagggtagtgaggagaccgaggcgcgccactgcgagctgcgacgtcgtcgcacggaggctggtgcggagcaggacgatggcgctccggaaggtgatacccggagcggacgccaccgccgccatggacgacgaggccgtgctgctccgcgaaaccatcgactacgccgtacacctgcgcgcccaggtcgacgtgctccgccgcgtctcggcggcggtgcagagatccaccttcctccgcaggggcgaagggcccattatggcctattatgacccaagccataccaaaaaaaagatccgac

SEQ ID NO: 83435 - DNA, 1183 bp, Zea Mays
aaaaaatcatgtaatatatgcaaataaggtctgtacaacggggatgatggaatggtgataataaatccactactccagcaactccttgtagctcactgtcaggtcggatgcgtgcattactgaactacgaagcacctgagttgcaggattctggggtcgtttcagaaaggggtgatgtatacagctttggtgtagtgatgctggaacttcttactgggcgtaaaccatatgacagttcacgcccgcgtcatgagcaacatcttgttagatgggccagttctcagcttcatgacatagaatccctgtccaagatggtggacccatctatacgtggacaatgttctgagaaagcattgtcacgtttcgctgacataatcagccgctgtatccagcagccagaattcaggccaccaatgtctgaaattgtacaagacctagctagacttgtaaatgccaccggtgaggaatcagagtaacccccaaaaaaagcatggagccatggaaggcatacaatacaaacgtcgcgaccaagttacgtgctgtacaatttttttgggaagataattgtcttgcttggtctggggagaatactgtgaagatgtattttcctcagagagcattgcacactaatgtcagattggaatttcatttagacctggctggggagtggaggtgcagccatctgtgcacctgattgttgatcaaatccatgtaatatttttgcagacatgatattatatatagcgacagtggcggagcctccgccaagcgccaaggcccggcctgatcgggcacgtgtccaggcttccgccgaggaacacttgggtgggctctcgatcggcctagcacacggatgtttggatgggtcaggcagtggtgtcgatttcaggccggctccgccactgtactgtatagcaaggtgtatatatagcaagaccccggattcttgtaataatagtcagggattcgttaaatttgttactctaaagctagtcatttacttgttcgcccgtttatcatgttggatggtatctactctcagcagtcgaagaaaaaaaaaactgctcagagtgcttgtagggaatagagatttggttgttgctgctctaaagctcaacggggcgttctccttccagttcatgcctgccgaaacttgagaaacgtttatctgtgggtctattcc

SEQ ID NO: 83436 - DNA, 3203 bp, Zea Mays
ccatctcctctgtctccgcctcgtcgcttccgcccactcttcctcgccgctgcctcacggccccattgctccgagcgcggcgccggtcgcgatccgaccgggggtgcgcggcgccgaatggtgtgatcgaccccgtcgggaattgggatcgaggtcatgcagcgggctccggagcgccgccgcggcgccgggccgctcctgctgctggcgctgctcgtcgcattggcggccgcgcccagactcgtgcgcgcggtcaccgacgctaccgacgtctctgccataaacggactgtacatgtcactgggatcaccacttctacctggatggactggaaatggtggagacccgtgcggtgagagctggcagggtgttgtgtgtaccggctcttccataactggaataaccatgaatgctgcaaacttgggaggacagttgggaagtttaggaaacttcactgccatcaccagcttagagcttaacaacaataatattggtggaaccataccggaggacctacctgttacattgcagagtcttttcctctctgctaatcaacttactggaagcatcccaagttcactgtcaaaactcgaaaacttaacagccatgtcagtcaacggcaaccatctaaatggagacctaccagacacttttgattcactcaatagacttgtaaatttggatatttcttcgaacaacttgagtggtgtgttaccatcttcaatgaaaaacctggcatctttgacttcattgcacatgcaagataatcaactgtctgggacccttaacgttttgcaggatctcccactgaaagacttgaacatagagaataatcttttttctggaccggtgcctgcgagtttgcttaacataccaaacttcaaaaaggacgggaatccattcaataccagcatcgtcccatctgcatctccgccttcaacaggaccagctccaacaccagcagcatcaaaaccagctccaacaccagcacccaccacttcaaattcaacgcccccagcaccagcaccctcatttccttcaagatctcctcccccgcctaaaacaacctcaaactcttctgaaggatcaactacccgagatagcacttcaccatctaagaaacacagtacatcaaccctcaagattgttggctttgttcttgccggagtagtgctgtttattatcatagtcctcctagtattattttgtctatccaagtaccaagagagacggtcgagatatgatcataacagaagtcagcaggcaagggtgcatcatagggttgaaccgcaaatcaagccacctccagtgcaacaaagcaatgatcttaaaaaaggttcaggtgaggtacttgatagaaggggccatgaactaagttcatcaacggcagctctcgcaaagaaatctcctgaaaaccaaaaggagcatgtaattaattttgatcgaacagattcagatctgtttcctgtttctctaccaccaccacctcctccacctccattacccccaattgaaagagttattgcaaatcccattgttccaccagaaaagcgatatagtcctccaccaaagacaagtagctctacttctgccacatcattctctattgcatctcttcagcaatatacaaatagcttcagagaggagaatgtgataagagagagtagattaggaaaggtttacctagcagagcttcctgatggcaagttattggaggttttgaagattgacaatgctaatggaagaatatcagtagatgacttcctagaagaggttgaatgtatcttagatatcaagcatcctaacattcttgagttagtcggatactgtgctgaatatgggcagaggttacttgtgtacaatcactttagcagaacgacactagatgacacacttcatgatggagaggatactgaaagtgcactgtcatggaatgcccgcctccaggttgctcttggttctggaaaagccttagagtatctccatgctagcttccaacctccaattgtgcaccagaattttgaaccagctaatgtgctccttgacaaaaagttctcagtgtgtgttgctgaatgtggactggcagaattgatgccaccaagttcagtcactcagctgtcaggtcggatgcgtgcattactgaactacgaagcacctgagttgcaggattctggggtcgtttcagaaaggggtgatgtatacagctttggtgtagtgatgctggaacttcttactgggcgtaaaccatatgacagttcacgcccgcgtcatgagcaacatcttgttagatgggccagttctcagcttcatgacatagaatccctgtccaagatggtggacccatctatacgtggacaatgttctgagaaagcattgtcacgtttcgctgacataatcagccgctgtatccagcagccagaattcaggccaccaatgtctgaaattgtacaagacctagctagacttgtaaatgccaccggtgaggaatcagagtaacccccaaaaaaagcatggagccatggaaggcatacaatacaaacgtcgcgaccaagttacgtgctgtacaatttttttgggaagataattgtcttgcttggtctggggagaatactgtgaagatgtattttcctcagagagcattgcacactaatgtcagattggaatttcatttagacctggctggggagtggaggtgcagccatctgtgcacctgattgttgatcaaatccatgtaatatttttgcagacatgatattatatatagcgacagtggcggagcctccgccaagcgccaaggcccggcctgatcgggcacgtgtccaggcttccgccgaggaacacttgggtgggctctcgatcggcctagcacacggatgtttggatgggtcaggcagtggtgtcgatttcaggccggctccgccactgtactgtatagcaaggtgtatatatagcaagaccccggattcttgtaataatagtcagggattcgttaaatttgttactctaaagctagtcatttacttgttcgcccgtttatcatgttggatggtatctactctcagcagtcgaagaaaaaaaaaactgctcagagtgcttgtagggaatagagatttggttgttgctgctctaaagctcaacggggcgttctccttccagttcatgcctgccgaaacttgagaaacgtttatctgtgggtctattcc

SEQ ID NO: 83437 - DNA, 3199 bp, Zea Mays
ccatctcctctgtctccgcctcgtcgcttccgcccactcttcctcgccgctgcctcacggccccattgctccgagcgcggcgccggtcgcgatccgaccgggggtgcgcggcgccgaatggtgtgatcgaccccgtcgggaattgggatcgaggtcatgcagcgggctccggagcgccgccgcggcgccgggccgctcctgctgctggcgctgctcgtcgcattggcggccgcgcccagactcgtgcgcgcggtcaccgacgctaccgacgtctctgccataaacggactgtacatgtcactgggatcaccacttctacctggatggactggaaatggtggagacccgtgcggtgagagctggcagggtgttgtgtgtaccggctcttccataactggaataaccatgaatgctgcaaacttgggaggacagttgggaagtttaggaaacttcactgccatcaccagcttagagcttaacaacaataatattggtggaaccataccggaggacctacctgttacattgcagatttcctctctgctaatcaacttactggaagcatcccaagttcactgtcaaaactcgaaaacttaacagccatgtcagtcaacggcaaccatctaaatggagacctaccagacacttttgattcactcaatagacttgtaaatttggatatttcttcgaacaacttgagtggtgtgttaccatcttcaatgaaaaacctggcatctttgacttcattgcacatgcaagataatcaactgtctgggacccttaacgttttgcaggatctcccactgaaagacttgaacatagagaataatcttttttctggaccggtgcctgcgagtttgcttaacataccaaacttcaaaaaggacgggaatccattcaataccagcatcgtcccatctgcatctccgccttcaacaggaccagctccaacaccagcagcatcaaaaccagctccaacaccagcacccaccacttcaaattcaacgcccccagcaccagcaccctcatttccttcaagatctcctcccccgcctaaaacaacctcaaactcttctgaaggatcaactacccgagatagcacttcaccatctaagaaacacagtacatcaaccctcaagattgttggctttgttcttgccggagtagtgctgtttattatcatagtcctcctagtattattttgtctatccaagtaccaagagagacggtcgagatatgatcataacagaagtcagcaggcaagggtgcatcatagggttgaaccgcaaatcaagccacctccagtgcaacaaagcaatgatcttaaaaaaggttcaggtgaggtacttgatagaaggggccatgaactaagttcatcaacggcagctctcgcaaagaaatctcctgaaaaccaaaaggagcatgtaattaattttgatcgaacagattcagatctgtttcctgtttctctaccaccaccacctcctccacctccattacccccaattgaaagagttattgcaaatcccattgttccaccagaaaagcgatatagtcctccaccaaagacaagtagctctacttctgccacatcattctctattgcatctcttcagcaatatacaaatagcttcagagaggagaatgtgataagagagagtagattaggaaaggtttacctagcagagcttcctgatggcaagttattggaggttttgaagattgacaatgctaatggaagaatatcagtagatgacttcctagaagaggttgaatgtatcttagatatcaagcatcctaacattcttgagttagtcggatactgtgctgaatatgggcagaggttacttgtgtacaatcactttagcagaacgacactagatgacacacttcatgatggagaggatactgaaagtgcactgtcatggaatgcccgcctccaggttgctcttggttctggaaaagccttagagtatctccatgctagcttccaacctccaattgtgcaccagaattttgaaccagctaatgtgctccttgacaaaaagttctcagtgtgtgttgctgaatgtggactggcagaattgatgccaccaagttcagtcactcagctgtcaggtcggatgcgtgcattactgaactacgaagcacctgagttgcaggattctggggtcgtttcagaaaggggtgatgtatacagctttggtgtagtgatgctggaacttcttactgggcgtaaaccatatgacagttcacgcccgcgtcatgagcaacatcttgttagatgggccagttctcagcttcatgacatagaatccctgtccaagatggtggacccatctatacgtggacaatgttctgagaaagcattgtcacgtttcgctgacataatcagccgctgtatccagcagccagaattcaggccaccaatgtctgaaattgtacaagacctagctagacttgtaaatgccaccggtgaggaatcagagtaacccccaaaaaaagcatggagccatggaaggcatacaatacaaacgtcgcgaccaagttacgtgctgtacaatttttttgggaagataattgtcttgcttggtctggggagaatactgtgaagatgtattttcctcagagagcattgcacactaatgtcagattggaatttcatttagacctggctggggagtggaggtgcagccatctgtgcacctgattgttgatcaaatccatgtaatatttttgcagacatgatattatatatagcgacagtggcggagcctccgccaagcgccaaggcccggcctgatcgggcacgtgtccaggcttccgccgaggaacacttgggtgggctctcgatcggcctagcacacggatgtttggatgggtcaggcagtggtgtcgatttcaggccggctccgccactgtactgtatagcaaggtgtatatatagcaagaccccggattcttgtaataatagtcagggattcgttaaatttgttactctaaagctagtcatttacttgttcgcccgtttatcatgttggatggtatctactctcagcagtcgaagaaaaaaaaaactgctcagagtgcttgtagggaatagagatttggttgttgctgctctaaagctcaacggggcgttctccttccagttcatgcctgccgaaacttgagaaacgtttatctgtgggtctattcc

SEQ ID NO: 83438 - DNA, 3199 bp, Zea Mays
ccatctcctctgtctccgcctcgtcgcttccgcccactcttcctcgccgctgcctcacggccccattgctccgagcgcggcgccggtcgcgatccgaccgggggtgcgcggcgccgaatggtgtgatcgaccccgtcgggaattgggatcgaggtcatgcagcgggctccggagcgccgccgcggcgccgggccgctcctgctgctggcgctgctcgtcgcattggcggccgcgcccagactcgtgcgcgcggtcaccgacgctaccgacgtctctgccataaacggactgtacatgtcactgggatcaccacttctacctggatggactggaaatggtggagacccgtgcggtgagagctggcagggtgttgtgtgtaccggctcttccataactggaataaccatgaatgctgcaaacttgggaggacagttgggaagtttaggaaacttcactgccatcaccagcttagagcttaacaacaataatattggtggaaccataccggaggacctacctgttacattgcagagtcttttcctctctgctaatcaacttactggaagcatcccaagttcactgtcaaaactcgaaaacttaacagccatgtcagtcaacggcaaccatctaaatggagacctaccagacacttttgattcactcaatagacttgtaaatttggatatttcttcgaacaacttgagtggtgtgttaccatcttcaatgaaaaacctggcatctttgacttcattgcacatgcaagataatcaactgtctgggacccttaacgttttgcaggatctcccactgaaagacttgaacatagagaataatcttttttctggaccggtgcctgcgagtttgcttaacataccaaacttcaagacgggaatccattcaataccagcatcgtcccatctgcatctccgccttcaacaggaccagctccaacaccagcagcatcaaaaccagctccaacaccagcacccaccacttcaaattcaacgcccccagcaccagcaccctcatttccttcaagatctcctcccccgcctaaaacaacctcaaactcttctgaaggatcaactacccgagatagcacttcaccatctaagaaacacagtacatcaaccctcaagattgttggctttgttcttgccggagtagtgctgtttattatcatagtcctcctagtattattttgtctatccaagtaccaagagagacggtcgagatatgatcataacagaagtcagcaggcaagggtgcatcatagggttgaaccgcaaatcaagccacctccagtgcaacaaagcaatgatcttaaaaaaggttcaggtgaggtacttgatagaaggggccatgaactaagttcatcaacggcagctctcgcaaagaaatctcctgaaaaccaaaaggagcatgtaattaattttgatcgaacagattcagatctgtttcctgtttctctaccaccaccacctcctccacctccattacccccaattgaaagagttattgcaaatcccattgttccaccagaaaagcgatatagtcctccaccaaagacaagtagctctacttctgccacatcattctctattgcatctcttcagcaatatacaaatagcttcagagaggagaatgtgataagagagagtagattaggaaaggtttacctagcagagcttcctgatggcaagttattggaggttttgaagattgacaatgctaatggaagaatatcagtagatgacttcctagaagaggttgaatgtatcttagatatcaagcatcctaacattcttgagttagtcggatactgtgctgaatatgggcagaggttacttgtgtacaatcactttagcagaacgacactagatgacacacttcatgatggagaggatactgaaagtgcactgtcatggaatgcccgcctccaggttgctcttggttctggaaaagccttagagtatctccatgctagcttccaacctccaattgtgcaccagaattttgaaccagctaatgtgctccttgacaaaaagttctcagtgtgtgttgctgaatgtggactggcagaattgatgccaccaagttcagtcactcagctgtcaggtcggatgcgtgcattactgaactacgaagcacctgagttgcaggattctggggtcgtttcagaaaggggtgatgtatacagctttggtgtagtgatgctggaacttcttactgggcgtaaaccatatgacagttcacgcccgcgtcatgagcaacatcttgttagatgggccagttctcagcttcatgacatagaatccctgtccaagatggtggacccatctatacgtggacaatgttctgagaaagcattgtcacgtttcgctgacataatcagccgctgtatccagcagccagaattcaggccaccaatgtctgaaattgtacaagacctagctagacttgtaaatgccaccggtgaggaatcagagtaacccccaaaaaaagcatggagccatggaaggcatacaatacaaacgtcgcgaccaagttacgtgctgtacaatttttttgggaagataattgtcttgcttggtctggggagaatactgtgaagatgtattttcctcagagagcattgcacactaatgtcagattggaatttcatttagacctggctggggagtggaggtgcagccatctgtgcacctgattgttgatcaaatccatgtaatatttttgcagacatgatattatatatagcgacagtggcggagcctccgccaagcgccaaggcccggcctgatcgggcacgtgtccaggcttccgccgaggaacacttgggtgggctctcgatcggcctagcacacggatgtttggatgggtcaggcagtggtgtcgatttcaggccggctccgccactgtactgtatagcaaggtgtatatatagcaagaccccggattcttgtaataatagtcagggattcgttaaatttgttactctaaagctagtcatttacttgttcgcccgtttatcatgttggatggtatctactctcagcagtcgaagaaaaaaaaaactgctcagagtgcttgtagggaatagagatttggttgttgctgctctaaagctcaacggggcgttctccttccagttcatgcctgccgaaacttgagaaacgtttatctgtgggtctattcc

SEQ ID NO: 83439 - DNA, 3202 bp, Zea Mays
ccatctcctctgtctccgcctcgtcgcttccgcccactcttcctcgccgctgcctcacggccccattgctccgagcgcggcgccggtcgcgatccgaccgggggtgcgcggcgccgaatggtgtgatcgaccccgtcgggaattgggatcgaggtcatgcagcgggctccggagcgccgccgcggcgccgggccgctcctgctgctggcgctgctcgtcgcattggcggccgcgcccagactcgtgcgcgcggtcaccgacgctaccgacgtctctgccataaacggactgtacatgtcactgggatcaccacttctacctggatggactggaaatggtggagacccgtgcggtgagagctggcagggtgttgtgtgtaccggctcttccataactggaataaccatgaatgctgcaaacttgggaggacagttgggaagtttaggaaacttcactgccatcaccagcttagagcttaacaacaataatattggtggaaccataccggaggacctacctgttacattgcagatttcctctctgctaatcaacttactggaagcatcccaagttcactgtcaaaactcgaaaacttaacagccatgtcagtcaacggcaaccatctaaatggagacctaccagacacttttgattcactcaatagacttgtaaatttggatatttcttcgaacaacttgagtggtgtgttaccatcttcaatgaaaaacctggcatctttgacttcattgcacatgcaagataatcaactgtctgggacccttaacgttttgcaggatctcccactgaaagacttgaacatagagaataatcttttttctggaccggtgcctgcgagtttgcttaacataccaaacttcaaaaaggacgggaatccattcaataccagcatcgtcccatctgcatctccgccttcaacaggaccagctccaacaccagcagcatcaaaaccagctccaacaccagcacccaccacttcaaattcaacgcccccagcaccagcaccctcatttccttcaagatctcctcccccgcctaaaacaacctcaaactcttctgaaggatcaactacccgagatagcacttcaccatctaagaaacacagtacatcaaccctcaagattgttggctttgttcttgccggagtagtgctgtttattatcatagtcctcctagtattattttgtctatccaagtaccaagagagacggtcgagatatgatcataacagaagtcagcaggcaagggtgcatcatagggttgaaccgcaaatcaagccacctccagtgcaacaaagcaatgatcttaaaaaaggttcaggtgaggtacttgatagaaggggccatgaactaagttcatcaacggcagctctcgcaaagaaatctcctgaaaaccaaaaggagcatgtaattaattttgatcgaacagattcagatctgtttcctgtttctctaccaccaccacctcctccacctccattacccccaattgaaagagttattgcaaatcccattgttccaccagaaaagcgatatagtcctccaccaaagacaagtagctctacttctgccacatcattctctattgcatctcttcagcaatatacaaatagcttcagagaggagaatgtgataagagagagtagattaggaaaggtttacctagcagagcttcctgatggcaagttattggaggttttgaagattgacaatgctaatggaagaatatcagtagatgacttcctagaagaggttgaatgtatcttagatatcaagcatcctaacattcttgagttagtcggatactgtgctgaatatgggcagaggttacttgtgtacaatcactttagcagaacgacactagatgacacacttcatgatggagaggatactgaaagtgcactgtcatggaatgcccgcctccaggttgctcttggttctggaaaagccttagagtatctccatgctagcttccaacctccaattgtgcaccagaattttgaaccagctaatgtgctccttgacaaaaagttctcagtgtgtgttgctgaatgtggactggcagaattgatgccaccaagttcagtcactcagctgtcaggtcggatgcgtgcattactgaactacgaagcacctgagttgcaggattctggggtcgtttcagaaaggggtgatgtatacagctttggtgtagtgatgctggaacttcttactgggcgtaaaccatatgacagttcacgcccgcgtcatgagcaacatcttgttagatgggccagttctcagcttcatgacatagaatccctgtccaagatggtggacccatctatacgtggacaatgttctgagaaagcattgtcacgtttcgctgacataatcagccgctgtatccagcagcagccagaattcaggccaccaatgtctgaaattgtacaagacctagctagacttgtaaatgccaccggtgaggaatcagagtaacccccaaaaaaagcatggagccatggaaggcatacaatacaaacgtcgcgaccaagttacgtgctgtacaatttttttgggaagataattgtcttgcttggtctggggagaatactgtgaagatgtattttcctcagagagcattgcacactaatgtcagattggaatttcatttagacctggctggggagtggaggtgcagccatctgtgcacctgattgttgatcaaatccatgtaatatttttgcagacatgatattatatatagcgacagtggcggagcctccgccaagcgccaaggcccggcctgatcgggcacgtgtccaggcttccgccgaggaacacttgggtgggctctcgatcggcctagcacacggatgtttggatgggtcaggcagtggtgtcgatttcaggccggctccgccactgtactgtatagcaaggtgtatatatagcaagaccccggattcttgtaataatagtcagggattcgttaaatttgttactctaaagctagtcatttacttgttcgcccgtttatcatgttggatggtatctactctcagcagtcgaagaaaaaaaaaactgctcagagtgcttgtagggaatagagatttggttgttgctgctctaaagctcaacggggcgttctccttccagttcatgcctgccgaaacttgagaaacgtttatctgtgggtctattcc

SEQ ID NO: 83440 - DNA, 3200 bp, Zea Mays
ccatctcctctgtctccgcctcgtcgcttccgcccactcttcctcgccgctgcctcacggccccattgctccgagcgcggcgccggtcgcgatccgaccgggggtgcgcggcgccgaatggtgtgatcgaccccgtcgggaattgggatcgaggtcatgcagcgggctccggagcgccgccgcggcgccgggccgctcctgctgctggcgctgctcgtcgcattggcggccgcgcccagactcgtgcgcgcggtcaccgacgctaccgacgtctctgccataaacggactgtacatgtcactgggatcaccacttctacctggatggactggaaatggtggagacccgtgcggtgagagctggcagggtgttgtgtgtaccggctcttccataactggaataaccatgaatgctgcaaacttgggaggacagttgggaagtttaggaaacttcactgccatcaccagcttagagcttaacaacaataatattggtggaaccataccggaggacctacctgttacattgcagagtcttttcctctctgctaatcaacttactggaagcatcccaagttcactgtcaaaactcgaaaacttaacagccatgtcagtcaacggcaaccatctaaatggagacctaccagacacttttgattcactcaatagacttgtaaatttggatatttcttcgaacaacttgagtggtgtgttaccatcttcaatgaaaaacctggcatctttgacttcattgcacatgcaagataatcaactgtctgggacccttaacgttttgcaggatctcccactgaaagacttgaacatagagaataatcttttttctggaccggtgcctgcgagtttgcttaacataccaaacttcaaaaaggacgggaatccattcaataccagcatcgtcccatctgcatctccgccttcaacaggaccagctccaacaccagcagcatcaaaaccagctccaacaccagcacccaccacttcaaattcaacgcccccagcaccagcaccctcatttccttcaagatctcctcccccgcctaaaacaacctcaaactcttctgaaggatcaactacccgagatagcacttcaccatctaagaaacacagtacatcaaccctcaagattgttggctttgttcttgccggagtagtgctgtttattatcatagtcctcctagtattattttgtctatccaagtaccaagagagacggtcgagatatgatcataacagaagtcagcaggcaagggtgcatcatagggttgaaccgcaaatcaagccacctccagtgcaacaaagcaatgatcttaaaaaaggtgaggtacttgatagaaggggccatgaactaagttcatcaacggcagctctcgcaaagaaatctcctgaaaaccaaaaggagcatgtaattaattttgatcgaacagattcagatctgtttcctgtttctctaccaccaccacctcctccacctccattacccccaattgaaagagttattgcaaatcccattgttccaccagaaaagcgatatagtcctccaccaaagacaagtagctctacttctgccacatcattctctattgcatctcttcagcaatatacaaatagcttcagagaggagaatgtgataagagagagtagattaggaaaggtttacctagcagagcttcctgatggcaagttattggaggttttgaagattgacaatgctaatggaagaatatcagtagatgacttcctagaagaggttgaatgtatcttagatatcaagcatcctaacattcttgagttagtcggatactgtgctgaatatgggcagaggttacttgtgtacaatcactttagcagaacgacactagatgacacacttcatgatggagaggatactgaaagtgcactgtcatggaatgcccgcctccaggttgctcttggttctggaaaagccttagagtatctccatgctagcttccaacctccaattgtgcaccagaattttgaaccagctaatgtgctccttgacaaaaagttctcagtgtgtgttgctgaatgtggactggcagaattgatgccaccaagttcagtcactcagctgtcaggtcggatgcgtgcattactgaactacgaagcacctgagttgcaggattctggggtcgtttcagaaaggggtgatgtatacagctttggtgtagtgatgctggaacttcttactgggcgtaaaccatatgacagttcacgcccgcgtcatgagcaacatcttgttagatgggccagttctcagcttcatgacatagaatccctgtccaagatggtggacccatctatacgtggacaatgttctgagaaagcattgtcacgtttcgctgacataatcagccgctgtatccagcagcagccagaattcaggccaccaatgtctgaaattgtacaagacctagctagacttgtaaatgccaccggtgaggaatcagagtaacccccaaaaaaagcatggagccatggaaggcatacaatacaaacgtcgcgaccaagttacgtgctgtacaatttttttgggaagataattgtcttgcttggtctggggagaatactgtgaagatgtattttcctcagagagcattgcacactaatgtcagattggaatttcatttagacctggctggggagtggaggtgcagccatctgtgcacctgattgttgatcaaatccatgtaatatttttgcagacatgatattatatatagcgacagtggcggagcctccgccaagcgccaaggcccggcctgatcgggcacgtgtccaggcttccgccgaggaacacttgggtgggctctcgatcggcctagcacacggatgtttggatgggtcaggcagtggtgtcgatttcaggccggctccgccactgtactgtatagcaaggtgtatatatagcaagaccccggattcttgtaataatagtcagggattcgttaaatttgttactctaaagctagtcatttacttgttcgcccgtttatcatgttggatggtatctactctcagcagtcgaagaaaaaaaaaactgctcagagtgcttgtagggaatagagatttggttgttgctgctctaaagctcaacggggcgttctccttccagttcatgcctgccgaaacttgagaaacgtttatctgtgggtctattcc

SEQ ID NO: 83441 - DNA, 3193 bp, Zea Mays
ccatctcctctgtctccgcctcgtcgcttccgcccactcttcctcgccgctgcctcacggccccattgctccgagcgcggcgccggtcgcgatccgaccgggggtgcgcggcgccgaatggtgtgatcgaccccgtcgggaattgggatcgaggtcatgcagcgggctccggagcgccgccgcggcgccgggccgctcctgctgctggcgctgctcgtcgcattggcggccgcgcccagactcgtgcgcgcggtcaccgacgctaccgacgtctctgccataaacggactgtacatgtcactgggatcaccacttctacctggatggactggaaatggtggagacccgtgcggtgagagctggcagggtgttgtgtgtaccggctcttccataactggaataaccatgaatgctgcaaacttgggaggacagttgggaagtttaggaaacttcactgccatcaccagcttagagcttaacaacaataatattggtggaaccataccggaggacctacctgttacattgcagatttcctctctgctaatcaacttactggaagcatcccaagttcactgtcaaaactcgaaaacttaacagccatgtcagtcaacggcaaccatctaaatggagacctaccagacacttttgattcactcaatagacttgtaaatttggatatttcttcgaacaacttgagtggtgtgttaccatcttcaatgaaaaacctggcatctttgacttcattgcacatgcaagataatcaactgtctgggacccttaacgttttgcaggatctcccactgaaagacttgaacatagagaataatcttttttctggaccggtgcctgcgagtttgcttaacataccaaacttcaaaaaggacgggaatccattcaataccagcatcgtcccatctgcatctccgccttcaacaggaccagctccaacaccagcagcatcaaaaccagctccaacaccagcacccaccacttcaaattcaacgcccccagcaccagcaccctcatttccttcaagatctcctcccccgcctaaaacaacctcaaactcttctgaaggatcaactacccgagatagcacttcaccatctaagaaacacagtacatcaaccctcaagattgttggctttgttcttgccggagtagtgctgtttattatcatagtcctcctagtattattttgtctatccaagtaccaagagagacggtcgagatatgatcataacagaagtcagcaggcaagggtgcatcatagggttgaaccgcaaatcaagccacctccagtgcaacaaagcaatgatcttaaaaaaggtgaggtacttgatagaaggggccatgaactaagttcatcaacggcagctctcgcaaagaaatctcctgaaaaccaaaaggagcatgtaattaattttgatcgaacagattcagatctgtttcctgtttctctaccaccaccacctcctccacctccattacccccaattgaaagagttattgcaaatcccattgttccaccagaaaagcgatatagtcctccaccaaagacaagtagctctacttctgccacatcattctctattgcatctcttcagcaatatacaaatagcttcagagaggagaatgtgataagagagagtagattaggaaaggtttacctagcagagcttcctgatggcaagttattggaggttttgaagattgacaatgctaatggaagaatatcagtagatgacttcctagaagaggttgaatgtatcttagatatcaagcatcctaacattcttgagttagtcggatactgtgctgaatatgggcagaggttacttgtgtacaatcactttagcagaacgacactagatgacacacttcatgatggagaggatactgaaagtgcactgtcatggaatgcccgcctccaggttgctcttggttctggaaaagccttagagtatctccatgctagcttccaacctccaattgtgcaccagaattttgaaccagctaatgtgctccttgacaaaaagttctcagtgtgtgttgctgaatgtggactggcagaattgatgccaccaagttcagtcactcagctgtcaggtcggatgcgtgcattactgaactacgaagcacctgagttgcaggattctggggtcgtttcagaaaggggtgatgtatacagctttggtgtagtgatgctggaacttcttactgggcgtaaaccatatgacagttcacgcccgcgtcatgagcaacatcttgttagatgggccagttctcagcttcatgacatagaatccctgtccaagatggtggacccatctatacgtggacaatgttctgagaaagcattgtcacgtttcgctgacataatcagccgctgtatccagcagccagaattcaggccaccaatgtctgaaattgtacaagacctagctagacttgtaaatgccaccggtgaggaatcagagtaacccccaaaaaaagcatggagccatggaaggcatacaatacaaacgtcgcgaccaagttacgtgctgtacaatttttttgggaagataattgtcttgcttggtctggggagaatactgtgaagatgtattttcctcagagagcattgcacactaatgtcagattggaatttcatttagacctggctggggagtggaggtgcagccatctgtgcacctgattgttgatcaaatccatgtaatatttttgcagacatgatattatatatagcgacagtggcggagcctccgccaagcgccaaggcccggcctgatcgggcacgtgtccaggcttccgccgaggaacacttgggtgggctctcgatcggcctagcacacggatgtttggatgggtcaggcagtggtgtcgatttcaggccggctccgccactgtactgtatagcaaggtgtatatatagcaagaccccggattcttgtaataatagtcagggattcgttaaatttgttactctaaagctagtcatttacttgttcgcccgtttatcatgttggatggtatctactctcagcagtcgaagaaaaaaaaaactgctcagagtgcttgtagggaatagagatttggttgttgctgctctaaagctcaacggggcgttctccttccagttcatgcctgccgaaacttgagaaacgtttatctgtgggtctattcc

SEQ ID NO: 83442 - DNA, 3109 bp, Zea Mays
tttaattccatgttgctttcaatatcaatatagatatatatatatatatatatgtttgtgtgtgtgtaaataaatatatctataattcagtattgtaggaacagcatgtgaagtttgaggaggtgaaggatgtacaataggaacagcaatttgaaattttgaaaaaaggcgggaaaacattttcactggcggttccttaagaaaaccgccagtgaaaatgcacttttcactggcggttccttaagaaaaccgccagtgaaaatgcccttttcactggtggttccaaaataaccgccagtggaaatgctgatttccactggcccctagcactggcggaactgagaaacgccagtataaatacgttttcaaccgccactacagagcttctgtgtactagtggaagatactttatttaattgcgtgaataacgacttgcacaaacgacgacacacacgattagcacgcgcgatcaacacacacacgacgcgtgacaacgcgtgcgaacagcaagcgcgacccgcgagaatgacgcacgacgacgcaggcgaacagcacgcgcgtatagcgcgtgacgatgcccacgaacagcgcgacgacacgagaatcactatatttatcggtttatactaaagcatggcccacaattaattaattataattaactaaagcatgaggtacgacaaaataatatttttaacgtgtacacgatattattgtgaaggtaaaacaattagaataaagtaaatcgaacgaccataaaagttaacgtgtatttactgaaccgttgatttaatattgtgcgcgcgacaagcgacaatgtgcaaaaacggcacgcggcaacgcatgcgaatagctcgcgcgacgacacgcgcgacaacacgcgaaacagcgcaacgcgcgaaaggcacgcgattcagcgcgtagcaacacgcgagaatcacaattagatatcgtgtttatactaaataagtattaattcaaaaacatttgtatagatataatcctattaacatatataaataaagcgtgactaaaacaataaatagtttaagtaaactactaatttaataactcagataaataaataatcaactaattaattaaaacgcgtatcgcgacaaaataatgttactaacatgagtgattataagtgaacgatttaatctcacgctcggataacgcgcgatacacgcgaacaacacgtggcaaggcgcgtgacacaagcgtaggaacagcactgcgacacgcgcgaatgatacacgaaaatcattaaatagatgccatgtttatactatacaattattaaaaaaatccaatttagtactgaccctatcagcatttatttaaaaggggcaagttaaaagctactaattagatttgattagagagctaatttaacaatgttaattcagctaacatttaattaattatataaaacatgcttaacggtgaaacattagtattaacacgtagactacgctaatacgaatatatcgtgaatagaacggaataaatcaggtttataactcaaaagtaatcaaatatttattaatctcggattaacgatgacgtggcatgattctatggctggaaaatggccacaatgaggaccacaaagagggtagtcataaagcatcctttccaaccaataactaatagaaatattggcacatggccatgcatacgggggaagatcattttctgacgcgcattttgcttttgggttgcatgcgacgtgcatgcggatggagtggatgtgagcctgctctccttttccgtggtgcaggaacgaaagcacggcctcacgcatgcaacaaaggaaaaacaaacaacgcgggattgtggcgtataggtggggccaacgcatggtttcacttttgacttcttctctgttgaacggcacgcacggcaagcggttctgccagccaggggaagggggcgcgggtcaggctgggcccgacgagcacgccggcggcgctagctgtggccgcgcgcaggggtttcggcctagggagtggagcgtggagggtgctggagatggccacgcctgctgcgacaagcacgccggaatggagagaaagagagatcgtcacgggaaaaggaggaggaggaaggggctcacctcgggacggtgcacgacgaggagggaggaatgggtgcgcagaagctttgacgtgaccgcgcaacgggaggctacgccagccatggctgctcggagcgtggtgatgcgaggatctgcagggggccatgggtggttggccgtgcgcaagggagctcggccgagcccaggactccaagccgcgagcgcactgccggggacttagtcgcacgccatggctgcacgacggggctgcgcacagaggagctcaccacggggacgaacgacgactccggcgaggcgagcttggacgccagcgaggacgggggcgctgggcggggtggtgcgcatggaggtggtggctgggagcgtgaggcacgcaacgcggctgggcgagcggttctgctcgcgcgccagggcgctggccgaacggcgaagtgggcgagatgggtgggggaaggcggtttggagaagatgaataggagatggggcgacctggtgagtggggcccacacgcaggcggcggcgctgggtggctccctggctagagcgtgcggtgctcagctcgagcactgggccgcacgaggccgaacgggccggcggggcaggcctgggtggggagcatgggagggggtattgggtttattttctctttttatttttctcccttttctctatttgaatattgttttaagttttgaattcaagttcaaccacgctctgcgagtttaaatagatgcacaccaaaacaaatcatcgtacaaaaatagatgtattctggcataatgcaataatcattattacctttagggttttgtttactaggcttacgcctatatacataacaaaataactctacaatatttaggaaaataaaaagaaaagcaaggacaagagagggtaatacctgaatttgatggatatcaaagaaaaaaatttataccctaaattcagggtgttacagacgcgcacgggagcaaacagcagaatcggctggggaaaatatatttg

SEQ ID NO: 83443 - DNA, 1262 bp, Zea Mays
gtttcagatccaaccgcacggtgtttcgctactgttcttacggtgccacggagttggcaactgcaaggagtgatattgtggtacaacactagttctaattgaagtaataaggcgggggtgaaactgtctgctaccattgcttccatggcaactaatgagaacctcccgccaaatgtcatcaagcaattggctaaagaactgaagaaccttgatgagtcacctccagaagggattaatgtgattgtcaatgatgatgacttcactactatttttgctgacattgaaggccctgctggaactccatatgagaacggagtattcaggatgaagctattattgtcacgcgatttccctcaatctcccccaaaagggttcttcttgactaaaattttccatcctaacatagctactagtggtgagatatgtgtaaacacactgaagaaggattggaatcctggccttggattaagacatgttcttctggttgtgagatgccttctgattgaaccatttcctgaatctgcacttaatgaacaagctgggaagatgttacttgaaaattatgaggaatatgcacgacatgcaaggttatacactggcatccatgcccttaaacctaagaatacgtccaagaccggagctatatctgagtcaaccacagctctgaatgtcgacaagtcaagtactgcctctagcaagaacacaccatcgatgccaccggcggagctgcggcggcacgaaagaaggatggcccaatggcttccaaagttcctgtggataagaaaaggctggatgcgcggaagaagagcttgaagagattataggcggaacgtcctgggaagaagagagagggtttagagttcagaatttttatcggaaactcagcagatgcttatttaagctgggagacaaacaattaggggaggagaggcatctgatgacctggctttcgggagaagggggtccggggcggggccaaaggtgaataatgtgaagcaactgagtccttcgggacaactgtatgtgcaatgcccaatcatttggaagaacacttgcctatttctttttgttgtctctccttgtctgcattcaatcagcatgcatgcctgccatttgcgagcaatccgctgccatcgttcttcatggagtacacaagctatgaattgaaaagatgtgaccttcaaaatttctttaacttgtggcgcagagatcaattaaactaacagggcatttggatctcttcattttagatgaattgaaat

SEQ ID NO: 83444 - DNA, 1321 bp, Zea Mays
agcgaatgtccagccggtttcagatccaaccgcacggtgtttcgctactgttcttacggtgccacggagttggcaactgcaaggagtgatattgtggtacaacactagttctaattgaagtaataaggcgggggtgaaactgtctgctaccattgcttccatggcaactaatgagaacctcccgccaaatgtcatcaagcaattggctaaagaactgaagaaccttgatgagtcacctccagaagggattaatgtgattgtcaatgatgatgacttcactactatttttgctgacattgaaggccctgctggaactccatatgagaacggagtattcaggatgaagctattattgtcacgcgatttccctcaatctcccccaaaagctactagtggtgagatatgtgtaaacacactgaagaaggattggaatcctggccttggattaagacatgttcttctggttgtgagatgccttctgattgaaccatttcctgaatctgcacttaatgaacaagctgggaagatgttacttgaaaattatgaggaatatgcacgacatgcaaggttatacactggcatccatgcccttaaacctaagaatacgtccaagaccggagctatatctgagtcaaccacagctctgaatgtcgacaagtcaagtactgcctctagcaagaacacaccatcgatgccaccggcggtatctacctccagtgcatccagagcatttggtacgagtttgcaggatcagaaccccactgtttctgatcctgctgtaggagctgcggcggcacgaaagaaggatggcccaatggcttccaaagttcctgtggataagaaaaggctggatgcgcggaagaagagcttgaagagattataggcggaacgtcctgggaagaagagagagggtttagagttcagaatttttatcggaaactcagcagatgcttatttaagctgggagacaaacaattaggggaggagaggcatctgatgacctggctttcgggagaagggggtccggggcggggccaaaggtgaataatgtgaagcaactgagtccttcgggacaactgtatgtgcaatgcccaatcatttggaagaacacttgcctatttctttttgttgtctctccttgtctgcattcaatcagcatgcatgcctgccatttgcgagcaatccgctgccatcgttcttcatggagtacacaagctatgaattgaaaagatgtgaccttcaaaatttctttaacttgtggcgcagagatcaattaaactaacagggcatttggatctcttcattttagatgaattgaaat

SEQ ID NO: 83445 - DNA, 1506 bp, Zea Mays
agttggttctcatcaaagctcgcaactacttcctcccctccccttccttcccttccggccgcctcttgtcctcctcacctcccaaattgaaatcctcctccctccccgcctagggttccgcttcctcccccgtccgagcaccactcaagcggcggcagcagcggtggcagcctggaagcagtcccatctcgtcgccctagacttccctgccgccgcacgtctcagtttcttgttcgcccgctctcctgccggtccgcccatcgcctgaggttcttacggtgccacggagttggcaactgcaaggagtgatattgtggtacaacactagttctaattgaagtaataaggcgggggtgaaactgtctgctaccattgcttccatggcaactaatgagaacctcccgccaaatgtcatcaagcaattggctaaagaactgaagaaccttgatgagtcacctccagaagggattaatgtgattgtcaatgatgatgacttcactactatttttgctgacattgaaggccctgctggaactccatatgagaacggagtattcaggatgaagctattattgtcacgcgatttccctcaatctcccccaaaagggttcttcttgactaaaattttccatcctaacatagctactagttgtgagatgccttctgattgaaccatttcctgaatctgcacttaatgaacaagctgggaagatgttacttgaaaattatgaggaatatgcacgacatgcaaggttatacactggcatccatgcccttaaacctaagaatacgtccaagaccggagctatatctgagtcaaccacagctctgaatgtcgacaagtcaagtactgcctctagcaagaacacaccatcgatgccaccggcggtatctacctccagtgcatccagagcatttggtacgagtttgcaggatcagaaccccactgtttctgatcctgctgtaggagctgcggcggcacgaaagaaggatggcccaatggcttccaaagttcctgtggataagaaaaggctggatgcgcggaagaagagcttgaagagattataggcggaacgtcctgggaagaagagagagggtttagagttcagaatttttatcggaaactcagcagatgcttatttaagctgggagacaaacaattaggggaggagaggcatctgatgacctggctttcgggagaagggggtccggggcggggccaaaggtgaataatgtgaagcaactgagtccttcgggacaactgtatgtgcaatgcccaatcatttggaagaacacttgcctatttctttttgttgtctctccttgtctgcattcaatcagcatgcatgcctgccatttgcgagcaatccgctgccatcgttcttcatggagtacacaagctatgaattgaaaagatgtgaccttcaaaatttctttaacttgtggcgcagagatcaattaaactaacagggcatttggatctcttcattttagatgaattgaaat

SEQ ID NO: 83446 - DNA, 1457 bp, Zea Mays
agttggttctcatcaaagctcgcaactacttcctcccctccccttccttcccttccggccgcctcttgtcctcctcacctcccaaattgaaatcctcctccctccccgcctagggttccgcttcctcccccgtccgagcaccactcaagcggcggcagcagcggtggcagcctggaagcagtcccatctcgtcgccctagacttccctgccgccgcacgtctcagtttcttgttcgcccgctctcctgccggtccgcccatcgcctgaggttcttacggtgccacggagttggcaactgcaaggagtgatattgtggtacaacactagttctaattgaagtaataaggcgggggtgaaactgtctgctaccattgcttccatggcaactaatgagaacctcccgccaaatgtcatcaagcaattggctaaagaactgaagaaccttgatgagtcacctccagaagggattaatgtgattgtcaatgatgatgacttcactactatttttgctgacattgaaggccctgctggaactccatatgagaacggagtattcaggatgaagctattattgtcacgcgatttccctcaatctcccccaaaagggttcttcttgactaaaattttccatcctaacatagctactagtggtgagatatgtgtaaacacactgaagaaggattggaatcctggccttggattaagacatgttcttctggttgtgagatgccttctgattgaaccatttcctgaatctgcacttaatgaacaagctgggaagatgttacttgaaaattatgaggaatatgcacgacatgcaaggttatacactggcatccatgcccttaaacctaagaatacgtccaagaccggagctatatctgagtcaaccacagctctgaatgtcgacaagtcaagagctgcggcggcacgaaagaaggatggcccaatggcttccaaagttcctgtggataagaaaaggctggatgcgcggaagaagagcttgaagagattataggcggaacgtcctgggaagaagagagagggtttagagttcagaatttttatcggaaactcagcagatgcttatttaagctgggagacaaacaattaggggaggagaggcatctgatgacctggctttcgggagaagggggtccggggcggggccaaaggtgaataatgtgaagcaactgagtccttcgggacaactgtatgtgcaatgcccaatcatttggaagaacacttgcctatttctttttgttgtctctccttgtctgcattcaatcagcatgcatgcctgccatttgcgagcaatccgctgccatcgttcttcatggagtacacaagctatgaattgaaaagatgtgaccttcaaaatttctttaacttgtggcgcagagatcaattaaactaacagggcatttggatctcttcattttagatgaattgaaat

SEQ ID NO: 83447 - DNA, 1318 bp, Zea Mays
agttggttctcatcaaagctcgcaactacttcctcccctccccttccttcccttccggccgcctcttgtcctcctcacctcccaaattgaaatcctcctccctccccgcctagggttccgcttcctcccccgtccgagcaccactcaagcggcggcagcagcggtggcagcctggaagcagtcccatctcgtcgccctagacttccctgccgccgcacgtctcagtttcttgttcgcccgctctcctgccggtccgcccatcgcctgagctggaactccatatgagaacggagtattcaggatgaagctattattgtcacgcgatttccctcaatctcccccaaaagggttcttcttgactaaaattttccatcctaacatagctactagtggtgagatatgtgtaaacacactgaagaaggattggaatcctggccttggattaagacatgttcttctggttgtgagatgccttctgattgaaccatttcctgaatctgcacttaatgaacaagctgggaagatgttacttgaaaattatgaggaatatgcacgacatgcaaggttatacactggcatccatgcccttaaacctaagaatacgtccaagaccggagctatatctgagtcaaccacagctctgaatgtcgacaagtcaagtactgcctctagcaagaacacaccatcgatgccaccggcggtatctacctccagtgcatccagagcatttggtacgagtttgcaggatcagaaccccactgtttctgatcctgctgtaggagctgcggcggcacgaaagaaggatggcccaatggcttccaaagttcctgtggataagaaaaggctggatgcgcggaagaagagcttgaagagattataggcggaacgtcctgggaagaagagagagggtttagagttcagaatttttatcggaaactcagcagatgcttatttaagctgggagacaaacaattaggggaggagaggcatctgatgacctggctttcgggagaagggggtccggggcggggccaaaggtgaataatgtgaagcaactgagtccttcgggacaactgtatgtgcaatgcccaatcatttggaagaacacttgcctatttctttttgttgtctctccttgtctgcattcaatcagcatgcatgcctgccatttgcgagcaatccgctgccatcgttcttcatggagtacacaagctatgaattgaaaagatgtgaccttcaaaatttctttaacttgtggcgcagagatcaattaaactaacagggcatttggatctcttcattttagatgaattgaaat

SEQ ID NO: 83448 - DNA, 1611 bp, Zea Mays
agttggttctcatcaaagctcgcaactacttcctcccctccccttccttcccttccggccgcctcttgtcctcctcacctcccaaattgaaatcctcctccctccccgcctagggttccgcttcctcccccgtccgagcaccactcaagcggcggcagcagcggtggcagcctggaagcagtcccatctcgtcgccctagacttccctgccgccgcacgtctcagtttcttgttcgcccgctctcctgccggtccgcccatcgcctgaggttcttacggtgccacggagttggcaactgcaaggagtgatattgtggtacaacactagttctaattgaagtaataaggcgggggtgaaactgtctgctaccattgcttccatggcaactaatgagaacctcccgccaaatgtcatcaagcaattggctaaagaactgaagaaccttgatgagtcacctccagaagggattaatgtgattgtcaatgatgatgacttcactactatttttgctgacattgaaggccctgtacgtcttaaaattttaatctggacatggtgcagctggaactccatatgagaacggagtattcaggatgaagctattattgtcacgcgatttccctcaatctcccccaaaagggttcttcttgactaaaattttccatcctaacatagctactagtggtgagatatgtgtaaacacactgaagaaggattggaatcctggccttggattaagacatgttcttctggttgtgagatgccttctgattgaaccatttcctgaatctgcacttaatgaacaagctgggaagatgttacttgaaaattatgaggaatatgcacgacatgcaaggttatacactggcatccatgcccttaaacctaagaatacgtccaagaccggagctatatctgagtcaaccacagctctgaatgtcgacaagtcaagtactgcctctagcaagaacacaccatcgatgccaccggcggtatctacctccagtgcatccagagcatttggtacgagtttgcaggatcagaaccccactgtttctgatcctgctgtaggagctgcggcggcacgaaagaaggatggcccaatggcttccaaagttcctgtggataagaaaaggctggatgcgcggaagaagagcttgaagagattataggcggaacgtcctgggaagaagagagagggtttagagttcagaatttttatcggaaactcagcagatgcttatttaagctgggagacaaacaattaggggaggagaggcatctgatgacctggctttcgggagaagggggtccggggcggggccaaaggtgaataatgtgaagcaactgagtccttcgggacaactgtatgtgcaatgcccaatcatttggaagaacacttgcctatttctttttgttgtctctccttgtctgcattcaatcagcatgcatgcctgccatttgcgagcaatccgctgccatcgttcttcatggagtacacaagctatgaattgaaaagatgtgaccttcaaaatttctttaacttgtggcgcagagatcaattaaactaacagggcatttggatctcttcattttagatgaattgaaat

SEQ ID NO: 83449 - DNA, 1541 bp, Zea Mays
agttggttctcatcaaagctcgcaactacttcctcccctccccttccttcccttccggccgcctcttgtcctcctcacctcccaaattgaaatcctcctccctccccgcctagggttccgcttcctcccccgtccgagcaccactcaagcggcggcagcagcggtggcagcctggaagcagtcccatctcgtcgccctagacttccctgccgccgcacgtctcagtttcttgttcgcccgctctcctgccggtccgcccatcgcctgaggttcttacggtgccacggagttggcaactgcaaggagtgatattgtggtacaacactagttctaattgaagtaataaggcgggggtgaaactgtctgctaccattgcttccatggcaactaatgagaacctcccgccaaatgtcatcaagcaattggctaaagaactgaagaaccttgatgagtcacctccagaagggattaatgtgattgtcaatgatgatgacttcactactatttttgctgacattgaaggccctgctggaactccatatgagaacggagtattcaggatgaagctattattgtcacgcgatttccctcaatctcccccaaaagctactagtggtgagatatgtgtaaacacactgaagaaggattggaatcctggccttggattaagacatgttcttctggttgtgagatgccttctgattgaaccatttcctgaatctgcacttaatgaacaagctgggaagatgttacttgaaaattatgaggaatatgcacgacatgcaaggttatacactggcatccatgcccttaaacctaagaatacgtccaagaccggagctatatctgagtcaaccacagctctgaatgtcgacaagtcaagtactgcctctagcaagaacacaccatcgatgccaccggcggtatctacctccagtgcatccagagcatttggtacgagtttgcaggatcagaaccccactgtttctgatcctgctgtaggagctgcggcggcacgaaagaaggatggcccaatggcttccaaagttcctgtggataagaaaaggctggatgcgcggaagaagagcttgaagagattataggcggaacgtcctgggaagaagagagagggtttagagttcagaatttttatcggaaactcagcagatgcttatttaagctgggagacaaacaattaggggaggagaggcatctgatgacctggctttcgggagaagggggtccggggcggggccaaaggtgaataatgtgaagcaactgagtccttcgggacaactgtatgtgcaatgcccaatcatttggaagaacacttgcctatttctttttgttgtctctccttgtctgcattcaatcagcatgcatgcctgccatttgcgagcaatccgctgccatcgttcttcatggagtacacaagctatgaattgaaaagatgtgaccttcaaaatttctttaacttgtggcgcagagatcaattaaactaacagggcatttggatctcttcattttagatgaattgaaat

SEQ ID NO: 83450 - DNA, 1642 bp, Zea Mays
gtccctatcatgcaccgctccgctttcagacagcagttggttctcatcaaagctcgcaactacttcctcccctccccttccttcccttccggccgcctcttgtcctcctcacctcccaaattgaaatcctcctccctccccgcctagggttccgcttcctcccccgtccgagcaccactcaagcggcggcagcagcggtggcagcctggaagcagtcccatctcgtcgccctagacttccctgccgccgcacgtctcagtttcttgttcgcccgctctcctgccggtccgcccatcgcctgaggttcttacggtgccacggagttggcaactgcaaggagtgatattgtggtacaacactagttctaattgaagtaataaggcgggggtgaaactgtctgctaccattgcttccatgtgtatgacatgaattgtctgtgacactgaaggcaactaatgagaacctcccgccaaatgtcatcaagcaattggctaaagaactgaagaaccttgatgagtcacctccagaagggattaatgtgattgtcaatgatgatgacttcactactatttttgctgacattgaaggccctgctggaactccatatgagaacggagtattcaggatgaagctattattgtcacgcgatttccctcaatctcccccaaaagggttcttcttgactaaaattttccatcctaacatagctactagtggtgagatatgtgtaaacacactgaagaaggattggaatcctggccttggattaagacatgttcttctggttgtgagatgccttctgattgaaccatttcctgaatctgcacttaatgaacaagctgggaagatgttacttgaaaattatgaggaatatgcacgacatgcaaggttatacactggcatccatgcccttaaacctaagaatacgtccaagaccggagctatatctgagtcaaccacagctctgaatgtcgacaagtcaagtactgcctctagcaagaacacaccatcgatgccaccggcggtatctacctccagtgcatccagagcatttggtacgagtttgcaggatcagaaccccactgtttctgatcctgctgtaggagctgcggcggcacgaaagaaggatggcccaatggcttccaaagttcctgtggataagaaaaggctggatgcgcggaagaagagcttgaagagattataggcggaacgtcctgggaagaagagagagggtttagagttcagaatttttatcggaaactcagcagatgcttatttaagctgggagacaaacaattaggggaggagaggcatctgatgacctggctttcgggagaagggggtccggggcggggccaaaggtgaataatgtgaagcaactgagtccttcgggacaactgtatgtgcaatgcccaatcatttggaagaacacttgcctatttctttttgttgtctctccttgtctgcattcaatcagcatgcatgcctgccatttgcgagcaatccgctgccatcgttcttcatggagtacacaagctatgaattgaaaagatgtgaccttcaaaatttctttaacttgtggcgcagagatcaattaaactaacagggcatttggatctcttcattttagatgaattgaaat

SEQ ID NO: 83451 - DNA, 980 bp, Zea Mays
aacactttccccattccccattccccacgacgtccctaggtaaatcggagctccaggctacaggtccctccccacgccggccactcccatcgatccgtctcctgctcgcacatcgatccactcccccatcgatccgtcttctgctcgatccactcccccatcgctcacgctcctgctcgcacatcggcgagtctgctggatccactcccccgtcggctcagctgctcgatctggagaccactatggcgcctgggcgtaaaactacagccaaatcaaccaaaccaacagaagtgccactaacagaatatgagaaattgagagctgagaatttgatgaggaataaccaaaagttgcaaagacttggtgtcactacactagcgtcaatacttaaccatacttctgcaaagagcaaggttgacactcgtgaaaaatctggatctttgtatgaggtcctggaaggtgaaggttctgaagatgaggaagtcaatcagtgtgcaacaaaccggagaaacagattaaagagggtcttggcacctgcgcaacaagatgaacctacaagatttactaggcagaatacaagggatttggctttaactttcagtccagaactgcaacaagtcgaaaccttaggcatctctactatcacatccacccctcaacaggaccagaacaactctagtgatcaaggtgcacttaaggcaaccatagatccaaatggaaaaaggaatagaagtatgggcagagaactggataggataagtagaggtttatgcactaacatccccatacacattgctgaaggaaagatacggccagaagcacctatgcaagctgccaaacttgcatcagagggcgggattatacttaggcaacaaatgcccatcctccggcattggaaagagtacaagaaggataagtcaattgttacaaactatatcgacaaagttgctgcccaattcaccatggacaccaacaataat

SEQ ID NO: 83452 - DNA, 517 bp, Zea Mays
ggattgaaaataaccgaacaagccctacctgggcataaagccgccggccgcaaccccctctgtttcctcgcttcatcaaaccagtgtcagggtcgtacgcctttgccatagcagggaaaggttgagagccggagagacccgccgtcgcaaattccatcgttaatcggtgcccggagatccactgagggcctgggtgcttcactgggttgtctggttttcatgcgtggccgaggagggaaggatcgaccacttgggcggtcagaattcgtcgccgggcacacaactccgccatcgcttcgccgccgccgtggacatctcaccggcgggtaccacactgaggagaagaataggtggcccaggaggagccgcacaacgaggagttcgacttgatctaggtggcgtctcctagacgactttatggcgccaaggatggactttagttcgctttatatttatcttttattttgtaagacttccgctatataataattacttttatgatattgtgacatttatc

SEQ ID NO: 83453 - DNA, 369 bp, Zea Mays
ggattgaaaataaccgaacaagccctacctgggcataaagccgccggccgcaaccccctctgtttcctcgcttcatcaaaccagtgtcagggtcgtacgcctttgccatagcagggaaaggttgagagccggagagacccgccgtcgcaaattccatcgttaatcggtgcccggagatccactgagggcctgggtgcttcactgggttgtctggttttcatgcgtggccgaggagggaaggatcgaccacttgggcggtcagaattcgtcgccgggcacacaactccgccatcgcttcgccgccgccgtggacatctcaccggcgggtaccacactgagaagagctagtggctgaggagtcaggtgttc

SEQ ID NO: 83454 - DNA, 1477 bp, Zea Mays
gacatttccctgctcccttatctccctcccccacacggtgcttgcccctgctccctcctttctgactgtaaggttgcaagcctcggtgccagcaatttcctcgttggtcgagcccctccctatcaccatcctcgtcatggcgccctggtggttgtccttgtcagtcgtgcctctcctgtgtgctcgactcgcctgtgccatgtctaactcctgtctcctctctagccctgatgtcgtcgctggtcctccccacgctagagaagaccaccgtcggtcctcatccatacatcgagttccctcctctcagtgctcgaacttcgcctccctctgatccccccccccccccccccccactcaccccttgcgctcatcgctgcaggatcatcatcgtgggcttggctttgccaagccatcatcgctcaccatctcgttgatgccctttctctgtcttcatattcgtcagcaccctagtcttctctctctacacaacaaataggttactggactcgccatgttctctggtcgagtttgaccctccttgctgacagatttgtcgtcattctaggagcaactcctgggatggttgggtggagaagaagaaaagaagctccagcgcatcgcacacctggtgctcgacgtaatggttgaatcgaaatcgtcgtcgtttccgtagtctgatttagttatggctgcatggacagacgcaaaataagttatgttagctgcatccacacgtacgtctaaaacggacgtacgcggttggccaggctcgcgcgagattgtacgtgtgggtacagtcatccaatcaggcgaacaattaatgatcttgtacacagtaaaactagagtacaacttcagttctggtctccggctcggcacttcccatccactagaagagaatgggaagaggtacatgtgcaagtggaagaggcgacttatatgggcctgtttggttttcggacggagacatcctggcttgtgtcttcgtgacctggctgatctagagcaggtttatgtgagccaggctccagagaaacgcaaataaatcctgtatcttatgagccaagctcacttatcagttttgcatcatctaagccaggtccagctataaatgcagtcatccaaacaagcataacttgtatcgctagagccaggctggagaaccaaacacgagaacgtataaagatgttgtacctccggagccgagttcggtctcatcagggtaaccaatcaggccctatatgtacgttgtgggctgaaaatttctgaaacggttgttgcgcatgatttgagtgggatataggtagatcatccttggatggagggagtatatacctatccagaataatggtcatgctgaatagagcaactataataaagtgtatatgcgggctctaagaaatgtaaaggcttctactgttctcttggctttaatccaaaacagcttctactgtagaagttgtttctacagtgtttt

SEQ ID NO: 83455 - DNA, 654 bp, Zea Mays
gacatttccctgctcccttatctccctcccccacacggtgcttgcccctgctccctcctttctgactgtaaggttgcaagcctcggtgccagcaatttcctcgttggtcgagcccctccctatcaccatcctcgtcatggcgccctggtggttgtccttgtcagtcgtgcctctcctgtgtgctcgactcgcctgtgccatgtctaactcctgtctcctctctagccctgatgtcgtcgctggtcctccccacgctagagaagaccaccgatcatcatcgtgggcttggctttgccaagccatcatcgctcaccatctcgttgatgccctttctctgtcttcatattcgtcagcaccctagtcttctctctctacacaacaaataggttactggactcgccatgttctctggtcgagtttgaccctccttgctgacagatttgtcgtcattctgtatgtcgtcgaggagcaactcctgggatggttgggtggagaagaagaaaagaagctccagcgcatcgcacacctggtgctcgacgtaatggttgaatcgaaatcgtcgtcgtttccgtagtctgatttagttatggtacactagttgatcacgtgatgtggaggacaagaaccgaattgatctcaaagtgatgctggtcg

SEQ ID NO: 83456 - DNA, 1672 bp, Zea Mays
gacatttccctgctcccttatctccctcccccacacggtgcttgcccctgctccctcctttctgactgtaaggttgcaagcctcggtgccagcaatttcctcgttggtcgagcccctccctatcaccatcctcgtcatggcgccctggtggttgtccttgtcagtcgtgcctctcctgtgtgctcgactcgcctgtgccatgtctaactcctgtctcctctctagccctgatgtcgtcgctggtcctccccacgctagagaagaccaccgtcggtcctcatccatacatcgagttccctcctctcagtgctcgaacttcgcctccctctgatccccccccccccccccccccactcaccccttgcgctcatcgctgcaggatcatcatcgtgggcttggctttgccaagccatcatcgctcaccatctcgttgatgccctttctctgtcttcatattcgtcagcaccctagtcttctctctctacacaacaaataggttactggactcgccatgttctctggtcgagtttgaccctccttgctgacagatttgtcgtcattctgtatgtcgtcgaggagcaactcctgggatggttgggtggagaagaagaaaagaagctccagcgcatcgcacacctggtgctcgacgtaatggttgaatcgaaatcgtcgtcgtttccgtagtctgatttagttatgattgtaagcagaaggtggcattatggatttgtggatctctaggccttctcataccattgcttgggtttttgtttggggagtgggttattcaagtagatgtgatcatgatacttgttacttggaattagctttacctatgttcttatgcgtatgtaagtaaacatttgatgaaatgccttgttgtttgagtacggtgtattgctttattgatacttgctctaggtcttgttggattaaatggttaattgcattgctttcatccttatcctaaattttttatatccaaagttagtaagtcaaagtattatacaagttagcctacagaaatattttagaaagttagtaaatgagttatatcaccattctaagttttgagtgttcaaaggtgacaagtctaagtaacctatcgatgttatgctctagctaatgaaattatggagcacttcctctattacatcttttatgctttagatctttagttgttgagaatgtagttccatggaactctatgttgtgcgatagtgctctacttgtttgattgaaagaaaagtgatgttgtgttagttggtgtcctatgcaagttaattcggaaagtggtatagaaagttagatagaatgttcctacccttattataacttttaggtgcctaggaataatgaccctaagttctactagtctattggtgtatgtctaagcaaggtagagtgcttatgcatggtttattgatacttgctttttgaatcggatccggttaagttagaataaagttgatattattcttagtgttatgtcaacatctagtatttgtttatgagtgttgtgttaccttgttagcaaatgtttatttttatattgtatagtcttggggaaattcgatcatatgtgatgatgcgatgcttgtttagttggtatgctatgcataatagtttagtggagtaattctaaagttacttgacatgctattgtttgtta

SEQ ID NO: 83457 - DNA, 2423 bp, Zea Mays
gacatttccctgctcccttatctccctcccccacacggtgcttgcccctgctccctcctttctgactgtaaggttgcaagcctcggtgccagcaatttcctcgttggtcgagcccctccctatcaccatcctcgtcatggcgccctggtggttgtccttgtcagtcgtgcctctcctgtgtgctcgactcgcctgtgccatgtctaactcctgtctcctctctagccctgatgtcgtcgctggtcctccccacgctagagaagaccaccgtcggtcctcatccatacatcgagatcatcatcgtgggcttggctttgccaagccatcatcgctcaccatctcgttgatgccctttctctgtcttcatattcgtcagcaccctagtcttctctctctacacaacaaataggttactggactcgccatgttctctggtcgagtttgaccctccttgctgacagatttgtcgtcattctgtatgtcgtcgaggagcaactcctgggatggttgggtggagaagaagaaaagaagctccagcgcatcgcacacctggtgctcgacgtaatggttgaatcgaaatcgtcgtcgtttccgtagtctgatttagttatggtgagctcctttgctatcctcgttagttagcatgaatggttgattggatagatgttctacctatgatgtttattttatttgtaaagcaggtgtgttgcggtattgatttctagactccttgctattgtctagatgatgtttcatagtgtcatgcaaggaacgacctttcctatcatttccttgtttttgtgatgatatgttgaatgtaatgagtttgggtagactaatagttatggttgagaagcctcatttcttgcattgatgtgatcgtgttaataaatatggagtagtcgcaacatgtaaaacttaggtttaaaatgactgttttttgaggagtatttaagtgaatatatcaatgaagcaagagtgaatagaccttatgtttgtataatataattcattagcaatatagtttaagctatttgtattgtcttcttagcccacttatgtttagcatgtaggcactttaggtcttttgcttctaaaagtgtagtcggtagagttatgcaatatttggtaatactctagttactaaatcaaagaatgtgacattcctatctagttagtacattgctagacttacaagaggtatggttaaattagtaatacaaagaatatgtatagtacttctagcactttgtcgataagaactattagtgttacttatgtaaatttctattgtatggtgacatgaatgctttttcttagaaaatatcatcttctatgttattcacttaagttaatcatggagggtggatatttacttatgattcatttgtcttttgtcattttgactttatcatgtccatgttatctacgtgttatctttttcaaacagattgtaagcagaaggtggcattatggatttgtggatctctaggccttctcataccattgcttgggtttttgtttggggagtgggttattcaagtagatgtgatcatgatacttgttacttggaattagctttacctatgttcttatgcgtatgtaagtaaacatttgatgaaatgccttgttgtttgagtacggtgtattgctttattgatacttgctctaggtcttgttggattaaatggttaattgcattgctttcatccttatcctaaattttttatatccaaagttagtaagtcaaagtattatacaagttagcctacagaaatattttagaaagttagtaaatgagttatatcaccattctaagttttgagtgttcaaaggtgacaagtctaagtaacctatcgatgttatgctctagctaatgaaattatggagcacttcctctattacatcttttatgctttagatctttagttgttgagaatgtagttccatggaactctatgttgtgcgatagtgctctacttgtttgattgaaagaaaagtgatgttgtgttagttggtgtcctatgcaagttaattcggaaagtggtatagaaagttagatagaatgttcctacccttattataacttttaggtgcctaggaataatgaccctaagttctactagtctattggtgtatgtctaagcaaggtagagtgcttatgcatggtttattgatacttgctttttgaatcggatccggttaagttagaataaagttgatattattcttagtgttatgtcaacatctagtatttgtttatgagtgttgtgttaccttgttagcaaatgtttatttttatattgtatagtcttggggaaattcgatcatatgtgatgatgcgatgcttgtttagttggtatgctatgcataatagtttagtggagtaattctaaagttacttgacatgctattgtttgtta

SEQ ID NO: 83458 - DNA, 2322 bp, Zea Mays
gacatttccctgctcccttatctccctcccccacacggtgcttgcccctgctccctcctttctgactgtaaggttgcaagcctcggtgccagcaatttcctcgttggtcgagcccctccctatcaccatcctcgtcatggcgccctgccctgatgtcgtcgctggtcctccccacgctagagaagaccaccgatcatcatcgtgggcttggctttgccaagccatcatcgctcaccatctcgttgatgccctttctctgtcttcatattcgtcagcaccctagtcttctctctctacacaacaaataggttactggactcgccatgttctctggtcgagtttgaccctccttgctgacagatttgtcgtcattctgtatgtcgtcgaggagcaactcctgggatggttgggtggagaagaagaaaagaagctccagcgcatcgcacacctggtgctcgacgtaatggttgaatcgaaatcgtcgtcgtttccgtagtctgatttagttatggtgagctcctttgctatcctcgttagttagcatgaatggttgattggatagatgttctacctatgatgtttattttatttgtaaagcaggtgtgttgcggtattgatttctagactccttgctattgtctagatgatgtttcatagtgtcatgcaaggaacgacctttcctatcatttccttgtttttgtgatgatatgttgaatgtaatgagtttgggtagactaatagttatggttgagaagcctcatttcttgcattgatgtgatcgtgttaataaatatggagtagtcgcaacatgtaaaacttaggtttaaaatgactgttttttgaggagtatttaagtgaatatatcaatgaagcaagagtgaatagaccttatgtttgtataatataattcattagcaatatagtttaagctatttgtattgtcttcttagcccacttatgtttagcatgtaggcactttaggtcttttgcttctaaaagtgtagtcggtagagttatgcaatatttggtaatactctagttactaaatcaaagaatgtgacattcctatctagttagtacattgctagacttacaagaggtatggttaaattagtaatacaaagaatatgtatagtacttctagcactttgtcgataagaactattagtgttacttatgtaaatttctattgtatggtgacatgaatgctttttcttagaaaatatcatcttctatgttattcacttaagttaatcatggagggtggatatttacttatgattcatttgtcttttgtcattttgactttatcatgtccatgttatctacgtgttatctttttcaaacagattgtaagcagaaggtggcattatggatttgtggatctctaggccttctcataccattgcttgggtttttgtttggggagtgggttattcaagtagatgtgatcatgatacttgttacttggaattagctttacctatgttcttatgcgtatgtaagtaaacatttgatgaaatgccttgttgtttgagtacggtgtattgctttattgatacttgctctaggtcttgttggattaaatggttaattgcattgctttcatccttatcctaaattttttatatccaaagttagtaagtcaaagtattatacaagttagcctacagaaatattttagaaagttagtaaatgagttatatcaccattctaagttttgagtgttcaaaggtgacaagtctaagtaacctatcgatgttatgctctagctaatgaaattatggagcacttcctctattacatcttttatgctttagatctttagttgttgagaatgtagttccatggaactctatgttgtgcgatagtgctctacttgtttgattgaaagaaaagtgatgttgtgttagttggtgtcctatgcaagttaattcggaaagtggtatagaaagttagatagaatgttcctacccttattataacttttaggtgcctaggaataatgaccctaagttctactagtctattggtgtatgtctaagcaaggtagagtgcttatgcatggtttattgatacttgctttttgaatcggatccggttaagttagaataaagttgatattattcttagtgttatgtcaacatctagtatttgtttatgagtgttgtgttaccttgttagcaaatgtttatttttatattgtatagtcttggggaaattcgatcatatgtgatgatgcgatgcttgtttagttggtatgctatgcataatagtttagtggagtaattctaaagttacttgacatgctattgtttgtta

SEQ ID NO: 83459 - DNA, 2184 bp, Zea Mays
ctccgcacctccccatccccgctcctcccgcaccggcatgggtgggtggcatggcggtgcgaccatgccagctagcccacggcggcagtgcgcgctcgcgtggctagcctacggcggcggcacctgctcgctcgtgctgctggcccgcatcggcgcctgcgcgcgctgctggcttgcggcggcgggtgcacagcttgcccgtgctcatggccgtgtgggccttggtctggcggcggtcctgcggatgccaatgacgagttcaaggtggcgcgactgctggtggtgggtcgtgggccagctggttctatgcactaggtcgtggggtgagaggtcctccggcgaaagccatgcccgcttgcgagaggacggcggtgacgcctacgggcgccactcctaccctattgagggtgccgtccttggacccctcgtgcttcatttgggagtccttgcctcggactttttggggtttctcgctggctgctcggtcgacgtcgagactctgaaggttggggcctactgggttggtgcgtcggtggatggcaaaaggtggcaacaagcggcggcttggcagggtgacatcggtgtggttgttcctgcaggtttctccttggttctggtgatctccattgctctactgggtcttcgaagaaaacttttcttagttggttctaggcgggtggcaacggcgtttcgacgtcatttctccttcttgaaggtgctgcccagaagaccttcagtttgcatggttgtcagtggtatggaggcttttcgtcgctccacttagctcggtggtgcttgggcctttgttgctcttggcgtctgcttgctcccggtgttcggcgatatggacccttgctcgtggtgaagaatcggagctgcctcgcgtggagcgtgtcgagtcttggcaatgatggcgcgccgcagtcttcctccttgtgtgtcattgctgagtgtaggcatcgtcgagttcctttggccgtgtgcaggccgtcttgggaagtcggagttgctcgtcccttgtgttgagctcagcaatgatgactctaaatggggtttgtgtgggggggggggctgtcgttgtctaggttgtttgtgggggccttcgcgaaaggacctctagcgtaatggttaaggcttccgagtagcacctccaggttctgggttcgatccccctcgagagcgaatttcgggcttggttaaaaaaaacctcgttgtgccccgctcgttcccgggttacgtcctgcgcgccaccctccggttgggccgttgctgtgacaccccaggtgtctatttcgcgttatgtcgggagattaatcctaatctcggatgctcagtaaaaatttctatttctcgatcgtgcctatctctgtttatcaggctttctcttggaagttcaccgaattcagagttaatcgatcgcgagaaacagccaattttggagcgtgttaaaacttttaattctcggaactaatgcagactcgaagatcattctcgaattataaatctcatctgaagctctttaaatcaaactctcaacgactgttatctgatctaagcccgaatctaattcctcgaaacttcgatctatgttcgactattttatctgggtccgtattctccaacgggatactcagtatgtcgccctctaattaattcttatccgactcgacttcatacctttgtgttcgatcccgatttaaaaatcaacatcggcgatgattttaaatgtcgcgatttgtctctttcaatcaaaaatccgaaagctggtcgtatcccgagacaatttattttcgaatcatgcgtaggaaattattgccgagcgaaatcaaatcaaactctcggccgagttaatcgcccgatcttccgaaaactatttcgctctgttctccgtagagacgaattccgcaggagcatttttattctgggaaagaattagcattccgataatccatgtttgatcaaaatgccacaaaataaaatggaaaataattagcgtgacccggtttagtgttttgggccaaacccattctagccaatttggcccactaaagaaccctaaccctagcccatgtctataaataggagccctctcccttgcaaattggaaaatttccatctaccccccctagccgccattttcttttctcccagccatctccacttcttctccccacgccatcctcc

SEQ ID NO: 83460 - DNA, 2217 bp, Zea Mays
ttccctgcctaaaactcccatttcgccgtccgtgacgcgagagacctcttcgcatcccgaggcggcgcttttggggtcggaagcgacacgggcgccgggcgggtccgcgggtggtggtgctactgctagcaagcagcagcaggcgacgctaggcgagagccccagtcggagcaggccaccatgtgcggcatcctcgctgtcctcggcgtcgctgaggtctccctcgccaagcgctcccgcatcattgagctctcgcgcaggttacggcaccgagggcctgattggagtggtttgcactgtcatgaggattgttaccttgcacaccagcggttggctattatcgatcctacatctggagaccagcctttgtacaatgaggataaaacagttgttgtaacggtgaacggagagatctataaccatgaagaattgaaagctaagttgaaaactcatgagttccaaactggcagtgattgtgaagttatagcccatctttacgaagaatatggcgaagaatttgtggatatgttggatggaatgttctcctttgttcttcttgatacacgtgataaaagcttcatcgcagctcgtgatgctattggcatctgccctttatacatgggatggggtcttgatggatcagtctggttttcttcagagatgaaggcattgagtgatgattgtgaacgcttcataacatttcccccagggcatctctactccagcaagacaggtggtctaaggagatggtacaacccaccatggttttcagagacggtcccttcaaccccttacaatgctctcttcctccgggagatgtttgagaaggctgttattaagaggctgatgactgatgtgccatttggtgtgcttttatctggtggactcgactcttctttggttgcatctgttgcttcgcggcacttaaacgaaacaaaggttgacaggcagtggggaaataaattgcatactttctgtataggcttgaagggttctcctgatcttaaagctgctagagaagttgctgattacctcagcactgagggcattgatgccttggaagaagtcatctaccatattgagacatatgatgttacaacaatcagagcaagtaccccaatgtttttgatgtcacgcaaaatcaaatctttgggtgtgaagatggttatttctggcgaaggttcagatgaaatttttggtggttacctttattttcacaaggcaccaaacaagaaagaattccatgaggaaacatgtcggaagataaaagcactacatctgtatgactgcttgagagctaacaaagcaacttctgcctggggtgttgaggctcgtgttccattccttgacaaaagtttcatcagtgtagcaatggacattgatcctgaatggaagatgataaaacgtgacctcggtcgaattgagaaatgggttatccgtaatgcatttgatgatgatgagaggccctatttacctaagcacattctctacaggcaaaaggaacagttcagtgatggtgttgggtatagttggatcgatggattgaaggaccatgccagccaacatgtctccgattccatgatgatgaatgctggctttgtttacccagagaacacacccacaacaaaagaagggtactactacagaatgatattcgagaaattctttcccaagcctgcagcaaggtcaactgttcctggaggtcctagtgtggcctgcagcactgccaaagctgttgaatgggacgcatcctggtccaagaaccttgatccttctggccgtgctgctttgggtgttcacgatgctgcgtatgaagacactgcagggaaaactcctgcctctgctgatcctgtctcagacaagggccttcgtccagctattggcgaaagcctagggacacccgttgcttcagccacagctgtctaaccttatgtttatcacccagcaatgcttgaaacagcaaaggttgtccattgcttgtttcagtttccttccgatcatgtttttagttccatcaatcaagcaatggagacatgcttgtgcttcatacttggcagcatcgtgtttgggttttcactgggcagtactgtttaatttttatggactgaaaagactcagttttgtaaatattcgtcactgtgaccaattcctgtggtggtttatgtgatttgcagattgcagtggttagtgtatcttcccaattttcactcctttaac

SEQ ID NO: 83461 - DNA, 2438 bp, Zea Mays
atccctgcatctcgtttcgttccaagaatggcatgtgccatcattttcctcatttcagttgtattattgtttcaaattagtagtccctgctgccatggtttttaaagcggtatggcgagacaagacattggaccactgcctggacgcctaggcgttggaccaccgcttggacgcctttaaaacagtgcctgctgccatatggattggaaatatggcggattgaaaagttacaggctgttcctgttcccaaggaatcatatgggaaatttttcacaggagattcctacatagtactgaagacaactgcccttaagaatggttcttttcgtcatgatatccattattggcttggcaaagataccagtcaggatgaagctggtacagctgcaattaagactgtggaactcgatgctgcccttggtggaagagctgtccaataccgtgaaatacagggaaatgagactgagaaatttctttcatactttaagccgtgtattataccagaggaaggtggtgttgcatctggtttcaggcatactgaagtaaatgagcgggagcataaaacacgattatttgtctgcagaggaaagcatactgttcatgttaaagaggttccttttgcacgagcatcactcaaccatgatgacatatttattttagatacaaaatctaagatattccaattcaatggatcaaattcaagtattcaggagagggctaaagcacttgaggttgtgcaacatcttaaagatacaaaccatgaaggaaaatgtgaagttgcggcagttgaggatggaaagttgatggcagatgctgatgctggtgaattctggggtctctttggcggatttgctcctttaccaagaaagacattttctgaactcaacgggaaagattctacttccacttcaaaattgctttgtgtaaacaagggccaatttgcccctattgattgcgaaattctaaaaagggagctattagattcaacaaaatgttacctactagactgtggttctgaaatttatgtctggatgggtagagaaacaactcttgaagaaaggaaacgaggcggctcagctgctgaggaattactacgtgaaggaaaccggcaaaaatctcatattattcggctcatggaaggatttgagactgtcacattcaaatcaaagtttgataaatggcccaagaaagctgatgcagttgtgtcggatgaaagcagaggaaaagtggcagctcttcttaagcgacaaggatttaatttcaaggatccagcaaaagctgctcctgtaaagcaagagcctcaacctcagattgattgcactggcaacttacaggtttggcgcgtaaatggcagtgataagactttcctttcgttttctgagcaatgcaagttttatagtggagactgctatatctttcaatacacctaccctggatatattggagatgaatgtcttattggtacctggtttgggaagaagagtgtccaggtaactgtttaatgcattttctatttgctgtattgcacatatgattgatacattgccatgaatcttactcaacgtctcattatttagtgcatgtttgtactttatcaacaatgtgctttgtgttgttagatgcctatgtatgtgtccttgttatattcggtctcatatatagagtacttttttctcgaatacgcaggagggttgcatatcattatattaaagtaattatattaaagtagagggaaaaaggcctgaggcctgggacaatcagaacacaacacaaaaaaaaacacacgagactcacaaaaaaaacacacacacacacaccaaacacacacaacacagacacataccagtcacacgacacaccaccaccccagcctaccaagaggctacaagactttcctttctctaaccagggtaaaaaaagggagcgcatgttcctgtctccaacagaaaaccacagtctcatctcatctttgaatccatcctctaaggtagaaaggcagggtcgagctccgtaaaaaacacacctatttctctgtttccaaagactccaagccccaagaattaccatactattaaacccctttcttttgcttttaggaatcctagttgaagcctttctccaccgttcaacaaaatctgaatctcttctcttaggacccacaaaagagagaccaattggagttaaaattgttagaatatgtggattaggcccatgaggcccatgtataaaccctatatagccaccccctagggttggcccaggtaatctaacagtcattcttccaacatggtatcaaattaggttttcgctcctccctcatccctcagccggctgcggctagggtttccttccctgccgccaggccgccgcccttctgctccctctaggcgtcgccaggccgccgcccctgcttggccgcgccaccaggaggacgcgac

SEQ ID NO: 83462 - DNA, 2397 bp, Zea Mays
gttttgttggacctaggatgtcatgtattctcaattcacaccttttcttctctcctgaagcaaaaaccaccaaagactagtcctacaaaatctaggggttctatggctgtttcaatgagggaggtggatcctgtttttcaaggtgcaggtcaaaaagatggattggaaatatggcggattgaaaagttacaggctgttcctgttcccaaggaatcatatgggaaatttttcacaggagattcctacatagtactgaagacaactgcccttaagaatggttcttttcgtcatgatatccattattggcttggcaaagataccagtcaggatgaagctggtacagctgcaattaagactgtggaactcgatgctgcccttggtggaagagctgtccaataccgtgaaatacagggaaatgagactgagaaatttctttcatactttaagccgtgtattataccagaggaaggtggtgttgcatctggtttcaggcatactgaagtaaatgagcgggagcataaaacacgattatttgtctgcagaggaaagcatactgttcatgttaaagaggttccttttgcacgagcatcactcaaccatgatgacatatttattttagatacaaaatctaagatattccaattcaatggatcaaattcaagtattcaggagagggctaaagcacttgaggttgtgcaacatcttaaagatacaaaccatgaaggaaaatgtgaagttgcggcagttgaggatggaaagttgatggcagatgctgatgctggtgaattctggggtctctttggcggatttgctcctttaccaagaaagacattttctgaactcaacgggaaagattctacttccacttcaaaattgctttgtgtaaacaagggccaatttgcccctattgattgcgaaattctaaaaagggagctattagattcaacaaaatgttacctactagactgtggttctgaaatttatgtctggatgggtagagaaacaactcttgaagaaaggaaacgaggcggctcagctgctgaggaattactacgtgaaggaaaccggcaaaaatctcatattattcggctcatggaaggatttgagactgtcacattcaaatcaaagtttgataaatggcccaagaaagctgatgcagttgtgtcggatgaaagcagaggaaaagtggcagctcttcttaagcgacaaggatttaatttcaaggatccagcaaaagctgctcctgtaaagcaagagcctcaacctcagattgattgcactggcaacttacaggtttggcgcgtaaatggcagtgataagactttcctttcgttttctgagcaatgcaagttttatagtggagactgctatatctttcaatacacctaccctggatatattggagatgaatgtcttattggtacctggtttgggaagaagagtgtccaggtaactgtttaatgcattttctatttgctgtattgcacatatgattgatacattgccatgaatcttactcaacgtctcattatttagtgcatgtttgtactttatcaacaatgtgctttgtgttgttagatgcctatgtatgtgtccttgttatattcggtctcatatatagagtacttttttctcgaatacgcaggagggttgcatatcattatattaaagtaattatattaaagtagagggaaaaaggcctgaggcctgggacaatcagaacacaacacaaaaaaaaacacacgagactcacaaaaaaaacacacacacacacaccaaacacacacaacacagacacataccagtcacacgacacaccaccaccccagcctaccaagaggctacaagactttcctttctctaaccagggtaaaaaaagggagcgcatgttcctgtctccaacagaaaaccacagtctcatctcatctttgaatccatcctctaaggtagaaaggcagggtcgagctccgtaaaaaacacacctatttctctgtttccaaagactccaagccccaagaattaccatactattaaacccctttcttttgcttttaggaatcctagttgaagcctttctccaccgttcaacaaaatctgaatctcttctcttaggacccacaaaagagagaccaattggagttaaaattgttagaatatgtggattaggcccatgaggcccatgtataaaccctatatagccaccccctagggttggcccaggtaatctaacagtcattcttccaacatggtatcaaattaggttttcgctcctccctcatccctcagccggctgcggctagggtttccttccctgccgccaggccgccgcccttctgctccctctaggcgtcgccaggccgccgcccctgcttggccgcgccaccaggaggacgcgac

SEQ ID NO: 83463 - DNA, 2442 bp, Zea Mays
gttaagttggtcctctgatcggggcttcggcttctggcgatctgaggtctgaccatggccgcgccggggtcagcgatcaagcacaccttttcttctctcctgaagcaaaaaccaccaaagactagtcctacaaaatctaggggttctatggctgtttcaatgagggaggtggatcctgtttttcaaggtgcaggtcaaaaagatggattggaaatatggcggattgaaaagttacaggctgttcctgttcccaaggaatcatatgggaaatttttcacaggagattcctacatagtactgaagacaactgcccttaagaatggttcttttcgtcatgatatccattattggcttggcaaagataccagtcaggatgaagctggtacagctgcaattaagactgtggaactcgatgctgcccttggtggaagagctgtccaataccgtgaaatacagggaaatgagactgagaaatttctttcatactttaagccgtgtattataccagaggaaggtggtgttgcatctggtttcaggcatactgaagtaaatgagcgggagcataaaacacgattatttgtctgcagaggaaagcatactgttcatgttaaagaggttccttttgcacgagcatcactcaaccatgatgacatatttattttagatacaaaatctaagatattccaattcaatggatcaaattcaagtattcaggagagggctaaagcacttgaggttgtgcaacatcttaaagatacaaaccatgaaggaaaatgtgaagttgcggcagttgaggatggaaagttgatggcagatgctgatgctggtgaattctggggtctctttggcggatttgctcctttaccaagaaagacattttctgaactcaacgggaaagattctacttccacttcaaaattgctttgtgtaaacaagggccaatttgcccctattgattgcgaaattctaaaaagggagctattagattcaacaaaatgttacctactagactgtggttctgaaatttatgtctggatgggtagagaaacaactcttgaagaaaggaaacgaggcggctcagctgctgaggaattactacgtgaaggaaaccggcaaaaatctcatattattcggctcatggaaggatttgagactgtcacattcaaatcaaagtttgataaatggcccaagaaagctgatgcagttgtgtcggatgaaagcagaggaaaagtggcagctcttcttaagcgacaaggatttaatttcaaggatccagcaaaagctgctcctgtaaagcaagagcctcaacctcagattgattgcactggcaacttacaggtttggcgcgtaaatggcagtgataagactttcctttcgttttctgagcaatgcaagttttatagtggagactgctatatctttcaatacacctaccctggatatattggagatgaatgtcttattggtacctggtttgggaagaagagtgtccaggtaactgtttaatgcattttctatttgctgtattgcacatatgattgatacattgccatgaatcttactcaacgtctcattatttagtgcatgtttgtactttatcaacaatgtgctttgtgttgttagatgcctatgtatgtgtccttgttatattcggtctcatatatagagtacttttttctcgaatacgcaggagggttgcatatcattatattaaagtaattatattaaagtagagggaaaaaggcctgaggcctgggacaatcagaacacaacacaaaaaaaaacacacgagactcacaaaaaaaacacacacacacacaccaaacacacacaacacagacacataccagtcacacgacacaccaccaccccagcctaccaagaggctacaagactttcctttctctaaccagggtaaaaaaagggagcgcatgttcctgtctccaacagaaaaccacagtctcatctcatctttgaatccatcctctaaggtagaaaggcagggtcgagctccgtaaaaaacacacctatttctctgtttccaaagactccaagccccaagaattaccatactattaaacccctttcttttgcttttaggaatcctagttgaagcctttctccaccgttcaacaaaatctgaatctcttctcttaggacccacaaaagagagaccaattggagttaaaattgttagaatatgtggattaggcccatgaggcccatgtataaaccctatatagccaccccctagggttggcccaggtaatctaacagtcattcttccaacatggtatcaaattaggttttcgctcctccctcatccctcagccggctgcggctagggtttccttccctgccgccaggccgccgcccttctgctccctctaggcgtcgccaggccgccgcccctgcttggccgcgccaccaggaggacgcgac

SEQ ID NO: 83464 - DNA, 2521 bp, Zea Mays
ctctgtcctgtcttcctctccttcctcctcgtcgtcctccgccatagtggcgagcacgacaacagccacgcctcacgccctcacctccaatcattggcctccccaacccaacctctccccgccccgtcctgttgagccgggtgattgacggattattagttaatccgggggcttcacctcgttttagcggcctcgttcgttcgcctccgcaaaaggctaacgccagcccgggcgcgcgctaacggcagcaacgacagcaacccgctggctagctagtcctccccacgattcgactccgccaccgtccccggcccaggctgttcctgttcccaaggaatcatatgggaaatttttcacaggagattcctacatagtactgaagacaactgcccttaagaatggttcttttcgtcatgatatccattattggcttggcaaagataccagtcaggatgaagctggtacagctgcaattaagactgtggaactcgatgctgcccttggtggaagagctgtccaataccgtgaaatacagggaaatgagactgagaaatttctttcatactttaagccgtgtattataccagaggaaggtggtgttgcatctggtttcaggcatactgaagtaaatgagcgggagcataaaacacgattatttgtctgcagaggaaagcatactgttcatgttaaagaggttccttttgcacgagcatcactcaaccatgatgacatatttattttagatacaaaatctaagatattccaattcaatggatcaaattcaagtattcaggagagggctaaagcacttgaggttgtgcaacatcttaaagatacaaaccatgaaggaaaatgtgaagttgcggcagttgaggatggaaagttgatggcagatgctgatgctggtgaattctggggtctctttggcggatttgctcctttaccaagaaagacattttctgaactcaacgggaaagattctacttccacttcaaaattgctttgtgtaaacaagggccaatttgcccctattgattgcgaaattctaaaaagggagctattagattcaacaaaatgttacctactagactgtggttctgaaatttatgtctggatgggtagagaaacaactcttgaagaaaggaaacgaggcggctcagctgctgaggaattactacgtgaaggaaaccggcaaaaatctcatattattcggctcatggaaggatttgagactgtcacattcaaatcaaagtttgataaatggcccaagaaagctgatgcagttgtgtcggatgaaagcagaggaaaagtggcagctcttcttaagcgacaaggatttaatttcaaggatccagcaaaagctgctcctgtaaagcaagagcctcaacctcagattgattgcactggcaacttacaggtttggcgcgtaaatggcagtgataagactttcctttcgttttctgagcaatgcaagttttatagtggagactgctatatctttcaatacacctaccctggatatattggagatgaatgtcttattggtacctggtttgggaagaagagtgtccaggtaactgtttaatgcattttctatttgctgtattgcacatatgattgatacattgccatgaatcttactcaacgtctcattatttagtgcatgtttgtactttatcaacaatgtgctttgtgttgttagatgcctatgtatgtgtccttgttatattcggtctcatatatagagtacttttttctcgaatacgcaggagggttgcatatcattatattaaagtaattatattaaagtagagggaaaaaggcctgaggcctgggacaatcagaacacaacacaaaaaaaaacacacgagactcacaaaaaaaacacacacacacacaccaaacacacacaacacagacacataccagtcacacgacacaccaccaccccagcctaccaagaggctacaagactttcctttctctaaccagggtaaaaaaagggagcgcatgttcctgtctccaacagaaaaccacagtctcatctcatctttgaatccatcctctaaggtagaaaggcagggtcgagctccgtaaaaaacacacctatttctctgtttccaaagactccaagccccaagaattaccatactattaaacccctttcttttgcttttaggaatcctagttgaagcctttctccaccgttcaacaaaatctgaatctcttctcttaggacccacaaaagagagaccaattggagttaaaattgttagaatatgtggattaggcccatgaggcccatgtataaaccctatatagccaccccctagggttggcccaggtaatctaacagtcattcttccaacatggtatcaaattaggttttcgctcctccctcatccctcagccggctgcggctagggtttccttccctgccgccaggccgccgcccttctgctccctctaggcgtcgccaggccgccgcccctgcttggccgcgccaccaggaggacgcgac

SEQ ID NO: 83465 - DNA, 2733 bp, Zea Mays
ctctgtcctgtcttcctctccttcctcctcgtcgtcctccgccatagtggcgagcacgacaacagccacgcctcacgccctcacctccaatcattggcctccccaacccaacctctccccgccccgtcctgttgagccgggtgattgacggattattagttaatccgggggcttcacctcgttttagcggcctcgttcgttcgcctccgcaaaaggctaacgccagcccgggcgcgcgctaacggcagcaacgacagcaacccgctggctagctagtcctccccacgattcgactccgccaccgtccccggcccaggctggctttgaggattcatcttttctcccccccccccccccccccccctgtttcagcacaccttttcttctctcctgaagcaaaaaccaccaaagactagtcctacaaaatctaggggttctatggctgtttcaatgagggaggtggatcctgtttttcaaggtgcaggtcaaaaagatggattggaaatatggcggattgaaaagttacaggctgttcctgttcccaaggaatcatatgggaaatttttcacaggagattcctacatagtactgaagacaactgcccttaagaatggttcttttcgtcatgatatccattattggcttggcaaagataccagtcaggatgaagctggtacagctgcaattaagactgtggaactcgatgctgcccttggtggaagagctgtccaataccgtgaaatacagggaaatgagactgagaaatttctttcatactttaagccgtgtattataccagaggaaggtggtgttgcatctggtttcaggcatactgaagtaaatgagcgggagcataaaacacgattatttgtctgcagaggaaagcatactgttcatgttaaagaggttccttttgcacgagcatcactcaaccatgatgacatatttattttagatacaaaatctaagatattccaattcaatggatcaaattcaagtattcaggagagggctaaagcacttgaggttgtgcaacatcttaaagatacaaaccatgaaggaaaatgtgaagttgcggcagttgaggatggaaagttgatggcagatgctgatgctggtgaattctggggtctctttggcggatttgctcctttaccaagaaagacattttctgaactcaacgggaaagattctacttccacttcaaaattgctttgtgtaaacaagggccaatttgcccctattgattgcgaaattctaaaaagggagctattagattcaacaaaatgttacctactagactgtggttctgaaatttatgtctggatgggtagagaaacaactcttgaagaaaggaaacgaggcggctcagctgctgaggaattactacgtgaaggaaaccggcaaaaatctcatattattcggctcatggaaggatttgagactgtcacattcaaatcaaagtttgataaatggcccaagaaagctgatgcagttgtgtcggatgaaagcagaggaaaagtggcagctcttcttaagcgacaaggatttaatttcaaggatccagcaaaagctgctcctgtaaagcaagagcctcaacctcagattgattgcactggcaacttacaggtttggcgcgtaaatggcagtgataagactttcctttcgttttctgagcaatgcaagttttatagtggagactgctatatctttcaatacacctaccctggatatattggagatgaatgtcttattggtacctggtttgggaagaagagtgtccaggtaactgtttaatgcattttctatttgctgtattgcacatatgattgatacattgccatgaatcttactcaacgtctcattatttagtgcatgtttgtactttatcaacaatgtgctttgtgttgttagatgcctatgtatgtgtccttgttatattcggtctcatatatagagtacttttttctcgaatacgcaggagggttgcatatcattatattaaagtaattatattaaagtagagggaaaaaggcctgaggcctgggacaatcagaacacaacacaaaaaaaaacacacgagactcacaaaaaaaacacacacacacacaccaaacacacacaacacagacacataccagtcacacgacacaccaccaccccagcctaccaagaggctacaagactttcctttctctaaccagggtaaaaaaagggagcgcatgttcctgtctccaacagaaaaccacagtctcatctcatctttgaatccatcctctaaggtagaaaggcagggtcgagctccgtaaaaaacacacctatttctctgtttccaaagactccaagccccaagaattaccatactattaaacccctttcttttgcttttaggaatcctagttgaagcctttctccaccgttcaacaaaatctgaatctcttctcttaggacccacaaaagagagaccaattggagttaaaattgttagaatatgtggattaggcccatgaggcccatgtataaaccctatatagccaccccctagggttggcccaggtaatctaacagtcattcttccaacatggtatcaaattaggttttcgctcctccctcatccctcagccggctgcggctagggtttccttccctgccgccaggccgccgcccttctgctccctctaggcgtcgccaggccgccgcccctgcttggccgcgccaccaggaggacgcgac

SEQ ID NO: 83466 - DNA, 2561 bp, Zea Mays
ctccccctctgtcctgtcttcctctccttcctcctcgtcgtcctccgccatagtggcgagcacgacaacagccacgcctcacgccctcacctccaatcattggcctccccaacccaacctctccccgccccgtcctgttgagccgggtgattgacggattattagttaatccgggggcttcacctcgttttagcggcctcgttcgttcgcctccgcaaaaggctaacgccagcccgggcgcgcgctaacggcagcaacgacagcaacccgctggctagctagtcctccccacgattcgactccgccaccgtccccggcccagtggattggaaatatggcggattgaaaagttacaggctgttcctgttcccaaggaatcatatgggaaatttttcacaggagattcctacatagtactgaagacaactgcccttaagaatggttcttttcgtcatgatatccattattggcttggcaaagataccagtcaggatgaagctggtacagctgcaattaagactgtggaactcgatgctgcccttggtggaagagctgtccaataccgtgaaatacagggaaatgagactgagaaatttctttcatactttaagccgtgtattataccagaggaaggtggtgttgcatctggtttcaggcatactgaagtaaatgagcgggagcataaaacacgattatttgtctgcagaggaaagcatactgttcatgttaaagaggttccttttgcacgagcatcactcaaccatgatgacatatttattttagatacaaaatctaagatattccaattcaatggatcaaattcaagtattcaggagagggctaaagcacttgaggttgtgcaacatcttaaagatacaaaccatgaaggaaaatgtgaagttgcggcagttgaggatggaaagttgatggcagatgctgatgctggtgaattctggggtctctttggcggatttgctcctttaccaagaaagacattttctgaactcaacgggaaagattctacttccacttcaaaattgctttgtgtaaacaagggccaatttgcccctattgattgcgaaattctaaaaagggagctattagattcaacaaaatgttacctactagactgtggttctgaaatttatgtctggatgggtagagaaacaactcttgaagaaaggaaacgaggcggctcagctgctgaggaattactacgtgaaggaaaccggcaaaaatctcatattattcggctcatggaaggatttgagactgtcacattcaaatcaaagtttgataaatggcccaagaaagctgatgcagttgtgtcggatgaaagcagaggaaaagtggcagctcttcttaagcgacaaggatttaatttcaaggatccagcaaaagctgctcctgtaaagcaagagcctcaacctcagattgattgcactggcaacttacaggtttggcgcgtaaatggcagtgataagactttcctttcgttttctgagcaatgcaagttttatagtggagactgctatatctttcaatacacctaccctggatatattggagatgaatgtcttattggtacctggtttgggaagaagagtgtccaggtaactgtttaatgcattttctatttgctgtattgcacatatgattgatacattgccatgaatcttactcaacgtctcattatttagtgcatgtttgtactttatcaacaatgtgctttgtgttgttagatgcctatgtatgtgtccttgttatattcggtctcatatatagagtacttttttctcgaatacgcaggagggttgcatatcattatattaaagtaattatattaaagtagagggaaaaaggcctgaggcctgggacaatcagaacacaacacaaaaaaaaacacacgagactcacaaaaaaaacacacacacacacaccaaacacacacaacacagacacataccagtcacacgacacaccaccaccccagcctaccaagaggctacaagactttcctttctctaaccagggtaaaaaaagggagcgcatgttcctgtctccaacagaaaaccacagtctcatctcatctttgaatccatcctctaaggtagaaaggcagggtcgagctccgtaaaaaacacacctatttctctgtttccaaagactccaagccccaagaattaccatactattaaacccctttcttttgcttttaggaatcctagttgaagcctttctccaccgttcaacaaaatctgaatctcttctcttaggacccacaaaagagagaccaattggagttaaaattgttagaatatgtggattaggcccatgaggcccatgtataaaccctatatagccaccccctagggttggcccaggtaatctaacagtcattcttccaacatggtatcaaattaggttttcgctcctccctcatccctcagccggctgcggctagggtttccttccctgccgccaggccgccgcccttctgctccctctaggcgtcgccaggccgccgcccctgcttggccgcgccaccaggaggacgcgac

SEQ ID NO: 83467 - DNA, 2756 bp, Zea Mays
aacggcgaagagaggaattccatacaaaatataaatagctcaaactcccaaatacctgctccacctccaccccctccccctctgtcctgtcttcctctccttcctcctcgtcgtcctccgccatagtggcgagcacgacaacagccacgcctcacgccctcacctccaatcattggcctccccaacccaacctctccccgccccgtcctgttgagccgggtgattgacggattattagttaatccgggggcttcacctcgttttagcggcctcgttcgttcgcctccgcaaaaggctaacgccagcccgggcgcgcgctaacggcagcaacgacagcaacccgctggctagctagtcctccccacgattcgactccgccaccgtccccggcccagcacaccttttcttctctcctgaagcaaaaaccaccaaagactagtcctacaaaatctaggggttctatggctgtttcaatgagggaggtggatcctgtttttcaaggtgcaggtcaaaaagatggattggaaatatggcggattgaaaagttacaggctgttcctgttcccaaggaatcatatgggaaatttttcacaggagattcctacatagtactgaagacaactgcccttaagaatggttcttttcgtcatgatatccattattggcttggcaaagataccagtcaggatgaagctggtacagctgcaattaagactgtggaactcgatgctgcccttggtggaagagctgtccaataccgtgaaatacagggaaatgagactgagaaatttctttcatactttaagccgtgtattataccagaggaaggtggtgttgcatctggtttcaggcatactgaagtaaatgagcgggagcataaaacacgattatttgtctgcagaggaaagcatactgttcatgttaaagaggttccttttgcacgagcatcactcaaccatgatgacatatttattttagatacaaaatctaagatattccaattcaatggatcaaattcaagtattcaggagagggctaaagcacttgaggttgtgcaacatcttaaagatacaaaccatgaaggaaaatgtgaagttgcggcagttgaggatggaaagttgatggcagatgctgatgctggtgaattctggggtctctttggcggatttgctcctttaccaagaaagacattttctgaactcaacgggaaagattctacttccacttcaaaattgctttgtgtaaacaagggccaatttgcccctattgattgcgaaattctaaaaagggagctattagattcaacaaaatgttacctactagactgtggttctgaaatttatgtctggatgggtagagaaacaactcttgaagaaaggaaacgaggcggctcagctgctgaggaattactacgtgaaggaaaccggcaaaaatctcatattattcggctcatggaaggatttgagactgtcacattcaaatcaaagtttgataaatggcccaagaaagctgatgcagttgtgtcggatgaaagcagaggaaaagtggcagctcttcttaagcgacaaggatttaatttcaaggatccagcaaaagctgctcctgtaaagcaagagcctcaacctcagattgattgcactggcaacttacaggtttggcgcgtaaatggcagtgataagactttcctttcgttttctgagcaatgcaagttttatagtggagactgctatatctttcaatacacctaccctggatatattggagatgaatgtcttattggtacctggtttgggaagaagagtgtccaggtaactgtttaatgcattttctatttgctgtattgcacatatgattgatacattgccatgaatcttactcaacgtctcattatttagtgcatgtttgtactttatcaacaatgtgctttgtgttgttagatgcctatgtatgtgtccttgttatattcggtctcatatatagagtacttttttctcgaatacgcaggagggttgcatatcattatattaaagtaattatattaaagtagagggaaaaaggcctgaggcctgggacaatcagaacacaacacaaaaaaaaacacacgagactcacaaaaaaaacacacacacacacaccaaacacacacaacacagacacataccagtcacacgacacaccaccaccccagcctaccaagaggctacaagactttcctttctctaaccagggtaaaaaaagggagcgcatgttcctgtctccaacagaaaaccacagtctcatctcatctttgaatccatcctctaaggtagaaaggcagggtcgagctccgtaaaaaacacacctatttctctgtttccaaagactccaagccccaagaattaccatactattaaacccctttcttttgcttttaggaatcctagttgaagcctttctccaccgttcaacaaaatctgaatctcttctcttaggacccacaaaagagagaccaattggagttaaaattgttagaatatgtggattaggcccatgaggcccatgtataaaccctatatagccaccccctagggttggcccaggtaatctaacagtcattcttccaacatggtatcaaattaggttttcgctcctccctcatccctcagccggctgcggctagggtttccttccctgccgccaggccgccgcccttctgctccctctaggcgtcgccaggccgccgcccctgcttggccgcgccaccaggaggacgcgac

SEQ ID NO: 83468 - DNA, 1720 bp, Zea Mays
aagaccgcgatgcttgtgatgcgcgaatcattttctaccaccatgttgttccatacaacgaaatggtgaaggacgaatttgcttttctagccaaaggacccaaggtcctaccttgcatcaccatcagaaattcttcgaatggaaatcctcctattgtaggatatcacatcggtcattaaatacttctgttaatgcttcggggcaacagctgcagtctgaacctgaaacacatgattctacaaccatctggagggcaatatcatcttctctagatgcattttacagattttcccggccacatactgtcataggaacagcattaagcatagtctcagtttcccttctagctgtccagagcttgtctgatatatcacctttgttcctcactggtttgctggaggcagtggtagctgcccttttcatgaatatctatattgttggactgaaccagttattcgacattgagatagacaaggttaacaagccaactcttccattggcatctggggaatacacccttgcaactggggttgcaatagtttcggtctttgccgctatgagctttggccttggatgggctgttggatcacaacctctgttttgggctcttttcataagctttgttcttgggactgcatattcaatcaatctgccgtaccttcgatggaagagatttgctgttgttgcagcactgtgcatattagcagttcgtgcagtgattgttcagctggccttttttctccacattcagacttttgttttcaggagaccggcagtgttttctaggccattattatttgcaactggatttatgacgttcttctctgttgtaatagcactattcaaggatatacctgacatcgaaggggaccgcatattcgggatccgatccttcagcgtccggttagggcaaaagaaggtcttttggatctgcgttggcttgcttgagatggcctacagcgttgcgatactgatgggagctacctcttcctgtttgtggagcaaaacagcaaccatcgctggccattccatacttgccgcgatcctatggagctgcgcgcgatcggtggacttgacgagcaaagccgcaataacgtccttctacatgttcatctggaagctgttctacgcggagtacctgctcatccctctggtgcggtgagcgcgaggcgaggtggtggcagacggatcggcgtcggcggggcggcaaacaactccacgggagaacttgagtgccggaagtaaactcccgtttgaaagttgaagcgtgcaccaccggcaccgggcagagagagacacggtggctggatggatacggatggcccccccaataaattcccccgtgcatggtaccccacgctgcttgatgatatcccatgtgtccgggtgaccggacctgatcgtctctagagagattggttgcacaacgtccaacatagcccgtaggtattgctaccactgctagtatgatactccttcctagtccttgccagcaccagtgacccaaacttggtcggctgagctcagcgctcagcagctttacgtgcatctgcgccttgacttgtgcagtgggcgtcgctagcatgaatgatgtatggtgcgtcacggcctgacggttcgtcagtctgggccgtgttttgtgtccgaggaagatcgtctgtcagagatctggattgcctcgctgctagatgcgttgcggtggccggtgggtgaatttgtg

SEQ ID NO: 83469 - DNA, 1925 bp, Zea Mays
cttcactcatcacttccacttatgtgcacacattgccgtgccgtgcggtgcgtgaaaggcacggggccgccggccggactcttctgacttggcaaccgccgcgcagcgcgacgagcgccacctgcttgctgccgcgtgcctgcgtgcgtgtgcgtccaccactgaccccgcgcccgcccgccgcccctgcccctccactccacttgctcactcgtcggctcgtcgcggcccgcttcccccccggccaagggatggacgcgcttcgcctacggccgtccctcctccccgtgcggcccggcgcggcccgcccgcgagatcattttctaccaccatgttgttccatacaacgaaatggtgaaggacgaatttgcttttctagccaaaggacccaaggtcctaccttgcatcaccatcagaaattcttcgaatggaaatcctcctattgtaggatatcacatcggtcattaaatacttctgttaatgcttcggggcaacagctgcagtctgaacctgaaacacatgattctacaaccatctggagggcaatatcatcttctctagatgcattttacagattttcccggccacatactgtcataggaacagcattaagcatagtctcagtttcccttctagctgtccagagcttgtctgatatatcacctttgttcctcactggtttgctggaggcagtggtagctgcccttttcatgaatatctatattgttggactgaaccagttattcgacattgagatagacaagagctttggccttggatgggctgttggatcacaacctctgttttgggctcttttcataagctttgttcttgggactgcatattcaatcaatctgccgtaccttcgatggaagagatttgctgttgttgcagcactgtgcatattagcagttcgtgcagtgattgttcagctggccttttttctccacattcagacttttgttttcaggagaccggcagtgttttctaggccattattatttgcaactggatttatgacgttcttctctgttgtaatagcactattcaaggatatacctgacatcgaaggggaccgcatattcgggatccgatccttcagcgtccggttagggcaaaagaaggtcttttggatctgcgttggcttgcttgagatggcctacagcgttgcgatactgatgggagctacctcttcctgtttgtggagcaaaacagcaaccatcgctggccattccatacttgccgcgatcctatggagctgcgcgcgatcggtggacttgacgagcaaagccgcaataacgtccttctacatgttcatctggaagctgttctacgcggagtacctgctcatccctctggtgcggtgagcgcgaggcgaggtggtggcagacggatcggcgtcggcggggcggcaaacaactccacgggagaacttgagtgccggaagtaaactcccgtttgaaagttgaagcgtgcaccaccggcaccgggcagagagagacacggtggctggatggatacggatggcccccccaataaattcccccgtgcatggtaccccacgctgcttgatgatatcccatgtgtccgggtgaccggacctgatcgtctctagagagattggttgcacaacgtccaacatagcccgtaggtattgctaccactgctagtatgatactccttcctagtccttgccagcaccagtgacccaaacttggtcggctgagctcagcgctcagcagctttacgtgcatctgcgccttgacttgtgcagtgggcgtcgctagcatgaatgatgtatggtgcgtcacggcctgacggttcgtcagtctgggccgtgttttgtgtccgaggaagatcgtctgtcagagatctggattgcctcgctgctagatgcgttgcggtggccggtgggtgaatttgtg

SEQ ID NO: 83470 - DNA, 1719 bp, Zea Mays
cttcactcatcacttccacttatgtgcacacattgccgtgccgtgcggtgcgtgaaaggcacggggccgccggccggactcttctgacttggcaaccgccgcgcagcgcgacgagcgccacctgcttgctgccgcgtgcctgcgtgcgtgtgcgtccaccactgaccccgcgcccgcccgccgcccctgcccctccactccacttgctcactcgtcggctcgtcgcggcccgcttcccccccggccaagggatggacgcgcttcgcctacggccgtccctcctccccgtgcggcccggcgcggcccgcccgcgaggcattaagcatagtctcagtttcccttctagctgtccagagcttgtctgatatatcacctttgttcctcactggtttgctggaggcagtggtagctgcccttttcatgaatatctatattgttggactgaaccagttattcgacattgagatagacaaggttaacaagccaactcttccattggcatctggggaatacacccttgcaactggggttgcaatagtttcggtctttgccgctatgagctttggccttggatgggctgttggatcacaacctctgttttgggctcttttcataagctttgttcttgggactgcatattcaatcaatctgccgtaccttcgatggaagagatttgctgttgttgcagcactgtgcatattagcagttcgtgcagtgattgttcagctggccttttttctccacattcagacttttgttttcaggagaccggcagtgttttctaggccattattatttgcaactggatttatgacgttcttctctgttgtaatagcactattcaaggatatacctgacatcgaaggggaccgcatattcgggatccgatccttcagcgtccggttagggcaaaagaaggtcttttggatctgcgttggcttgcttgagatggcctacagcgttgcgatactgatgggagctacctcttcctgtttgtggagcaaaacagcaaccatcgctggccattccatacttgccgcgatcctatggagctgcgcgcgatcggtggacttgacgagcaaagccgcaataacgtccttctacatgttcatctggaagctgttctacgcggagtacctgctcatccctctggtgcggtgagcgcgaggcgaggtggtggcagacggatcggcgtcggcggggcggcaaacaactccacgggagaacttgagtgccggaagtaaactcccgtttgaaagttgaagcgtgcaccaccggcaccgggcagagagagacacggtggctggatggatacggatggcccccccaataaattcccccgtgcatggtaccccacgctgcttgatgatatcccatgtgtccgggtgaccggacctgatcgtctctagagagattggttgcacaacgtccaacatagcccgtaggtattgctaccactgctagtatgatactccttcctagtccttgccagcaccagtgacccaaacttggtcggctgagctcagcgctcagcagctttacgtgcatctgcgccttgacttgtgcagtgggcgtcgctagcatgaatgatgtatggtgcgtcacggcctgacggttcgtcagtctgggccgtgttttgtgtccgaggaagatcgtctgtcagagatctggattgcctcgctgctagatgcgttgcggtggccggtgggtgaatttgtg

SEQ ID NO: 83471 - DNA, 2026 bp, Zea Mays
cttcactcatcacttccacttatgtgcacacattgccgtgccgtgcggtgcgtgaaaggcacggggccgccggccggactcttctgacttggcaaccgccgcgcagcgcgacgagcgccacctgcttgctgccgcgtgcctgcgtgcgtgtgcgtccaccactgaccccgcgcccgcccgccgcccctgcccctccactccacttgctcactcgtcggctcgtcgcggcccgcttcccccccggccaagggatggacgcgcttcgcctacggccgtccctcctccccgtgcggcccggcgcggcccgcccgcgagatcattttctaccaccatgttgttccatacaacgaaatggtgaaggacgaatttgcttttctagccaaaggacccaaggtcctaccttgcatcaccatcagaaattcttcgaatggaaatcctcctattgtaggatatcacatcggtcattaaatacttctgttaatgcttcggggcaacagctgcagtctgaacctgaaacacatgattctacaaccatctggagggcaatatcatcttctctagatgcattttacagattttcccggccacatactgtcataggaacagcattaagcatagtctcagtttcccttctagctgtccagagcttgtctgatatatcacctttgttcctcactggtttgctggaggcagtggtagctgcccttttcatgaatatctatattgttggactgaaccagttattcgacattgagatagacaaggttaacaagccaactcttccattggcatctggggaatacacccttgcaactggggttgcaatagtttcggtctttgccgctatgagctttggccttggatgggctgttggatcacaacctctgttttgggctcttttcataagctttgttcttgggactgcatattcaatcaatctgccgtaccttcgatggaagagatttgctgttgttgcagcactgtgcatattagcagttcgtgcagtgattgttcagctggccttttttctccacattcagacttttgttttcaggagaccggcagtgttttctaggccattattatttgcaactggatttatgacgttcttctctgttgtaatagcactattcaagtttgccatttctcgtaggatatacctgacatcgaaggggaccgcatattcgggatccgatccttcagcgtccggttagggcaaaagaaggtcttttggatctgcgttggcttgcttgagatggcctacagcgttgcgatactgatgggagctacctcttcctgtttgtggagcaaaacagcaaccatcgctggccattccatacttgccgcgatcctatggagctgcgcgcgatcggtggacttgacgagcaaagccgcaataacgtccttctacatgttcatctggaagctgttctacgcggagtacctgctcatccctctggtgcggtgagcgcgaggcgaggtggtggcagacggatcggcgtcggcggggcggcaaacaactccacgggagaacttgagtgccggaagtaaactcccgtttgaaagttgaagcgtgcaccaccggcaccgggcagagagagacacggtggctggatggatacggatggcccccccaataaattcccccgtgcatggtaccccacgctgcttgatgatatcccatgtgtccgggtgaccggacctgatcgtctctagagagattggttgcacaacgtccaacatagcccgtaggtattgctaccactgctagtatgatactccttcctagtccttgccagcaccagtgacccaaacttggtcggctgagctcagcgctcagcagctttacgtgcatctgcgccttgacttgtgcagtgggcgtcgctagcatgaatgatgtatggtgcgtcacggcctgacggttcgtcagtctgggccgtgttttgtgtccgaggaagatcgtctgtcagagatctggattgcctcgctgctagatgcgttgcggtggccggtgggtgaatttgtg

SEQ ID NO: 83472 - DNA, 1363 bp, Zea Mays
caatttttagttcagttggtgttctcaaatttggcagtaatctcctgttctcaaacgaaattactctgttagagaggatccatatggggagattcgaagagtgagaccaaagatcaatggaaattcatgggacatttcaaaattcaagcaagttgatattattcgaaatcatccagctgcaaattcacgtgaagagctcactgccaggaatccaaatgcttccagagatggaaagaaactattaaaggatattatgggagccagcaatttaacataccctaactttatttcaaaagctgaaaccgctgatgaaacatcagatgtccccgataaaccttcagctgtaaccccacaacaacatgattccagcttcccgcaagctggtaagaaacaaaaaggttttgctgctacaacacttaatcagtgttctaatgaggacctgaagaaaggctttgctttgaaggtggagcctttgaatgcatttattcctttcgagcagcagatgatggacctatctcacaggaagcaagagaatgctgcctgtgacgattcatgctctctctcaaaactaatgttgaaggaggatattgaggctgcacccagcctgccgacgggcattcaagtacagaatggctccaagaaccgcaggaggaggcagcccaacgtacagaagaccacggcgactccaacaaggtcgcctgcaaggggtcagcgtcgaaagaacaacgatgccatggtcaaatcggagatgggcttgattgagcagagtaaacttgtgctgacggaacaagagccagagctgggagacgttccggtgaagagacccgttgggaggcccaggaaggcgaggtaggtaacctccgacattttccaatttttttttttatatatatataggaacagaacagggcatggtgacctttcatggtctacttgtaaactaggaacggacctagctcagatgacccgggcacccctgcttcgtaggcttgagctccgtttggcttggattccggcgccttttccagtttcctgtgacttctgtacagtgcaagccatcttaacgccgccaaggttaacttatcgaaacatttggagaacctggaagcaaacggcgaagtttttccgtgtgcgttaatgtttcagagaagggagtccgagggaaaaaaaggttgccactacgcagctcatgtactgtttttttttgtaggatgtattgacatcattgtaccaaatcagctccatataatcctgtttgatagatataataccattgtatcaaatctcgagttttgataggcaaagattactagtaatcttgaagagcccgcggtcgtcagagacggcggtaattttgcgcctt

SEQ ID NO: 83473 - DNA, 2029 bp, Zea Mays
gcacgcgcctcctctcatggagtcatccgccgtgaggggcgacacccctcgccggccgtcggcgtttgccggggcctcgccgcctcctcccccgcccccgccgccgaggggttggctcgcgggtctcgtctccggcgccggccggatcctcgccgccgtgctcgggcccgagccctcctcttccggctccggctccattgcctcatctgcagcgtcggacggggactcgccgtcggcctcgtactcgccggcatggttcccgcctcctggcccgcacggcgagggttgcaatgacgccaccgataacaatgattccccagtctttcccctgagtaataatcagtcaaatcagggtaaaaaggagactgctctaaaagactacacggggtccctagcaattatctctgagattgaaccaaaggatgccataatgcaattgcttatgcaggaaacctattcaaggtccgagtgcagcaagtttataaagataattcaagagcgggttttagattcagattcaggtgatatagatgctggtgggtttgctctcactagtgctcggaaggctagcagactagccgtagatgggtactcttcatttagtccacatgaatcctcacctgcaacttctagtcttcaaatgcatggctgtgataatagtgctgctgtgggcacaattccaaaattaactcataccaaccaaagccctttcatcaacaatgctaagaacataaacccagttctcaaacgaaattactctgttagagaggatccatatggggagattcgaagagtgagaccaaagatcaatggaaattcatgggacatttcaaaattcaagcaagttgatattattcgaaatcatccagctgcaaattcacgtgaagagctcactgccaggaatccaaatgcttccagagatggaaagaaactattaaaggatattatgggagccagcaatttaacataccctaactttatttcaaaagctgaaaccgctgatgaaacatcagatgtccccgataaaccttcagctgtaaccccacaacaacatgattccagcttcccgcaagctggtaagaaacaaaaaggttttgctgctacaacacttaatcagtgttctaatgaggtggagcctttgaatgcatttattcctttcgagcagcagatgatggacctatctcacaggaagcaagagaatgctgcctgtgacgattcatgctctctctcaaaactaatgttgaaggaggatattgaggctgcacccagcctgccgacgggcattcaagtacagaatggctccaagaaccgcaggaggaggcagcccaacgtacagaagaccacggcgactccaacaaggtcgcctgcaaggggtcagcgtcgaaagaacaacgatgccatggtcaaatcggagatgggcttgattgagcagagtaaacttgtgctgacggaacaagagccagagctgggagacgttccggtgaagagacccgttgggaggcccaggaaggcgaggtaggtaacctccgacattttccaatttttttttttatatatatataggaacagaacagggcatggtgacctttcatggtctacttgtaaactaggaacggacctagctcagatgacccgggcacccctgcttcgtaggcttgagctccgtttggcttggattccggcgccttttccagtttcctgtgacttctgtacagtgcaagccatcttaacgccgccaaggttaacttatcgaaacatttggagaacctggaagcaaacggcgaagtttttccgtgtgcgttaatgtttcagagaagggagtccgagggaaaaaaaggttgccactacgcagctcatgtactgtttttttttgtaggatgtattgacatcattgtaccaaatcagctccatataatcctgtttgatagatataataccattgtatcaaatctcgagttttgataggcaaagattactagtaatcttgaagagcccgcggtcgtcagagacggcggtaattttgcgcctt

SEQ ID NO: 83474 - DNA, 1918 bp, Zea Mays
gcacgcgcctcctctcatggagtcatccgccgtgaggggcgacacccctcgccggccgtcggcgtttgccggggcctcgccgcctcctcccccgcccccgccgccgaggggttggctcgcgggtctcgtctccggcgccggccggatcctcgccgccgtgctcgggcccgagccctcctcttccggctccggctccattgcctcatctgcagcgtcggacggggactcgccgtcggcctcgtactcgccggcatggttcccgcctcctggcccgcacggcgagggttgcaatgacgccaccgataacaatgattccccagtctttcccctgagtaataatcagtcaaatcagggtaaaaaggagactgctctaaaagactacacggggtccctagcaattatctctgagattgaaccaaaggatgccataatgcaattgcttatgcaggaaacctattcaaggtccgagtgcagcaagtttataaagataattcaagagcgggttttagattcagattcaggtgatatagatgctggtgggtttgctctcactagtgctcggaaggctagcagactagccgtagatgggtactcttcatttagtccacatgaatcctcacctgcaacttctagtcttcaaatgcatggctgtgataatagtgctgctgtgggcacaattccaaaattaactcataccaaccaaagccctttcatcaacaatgctaagaacataaacccagttctcaaacgaaattactctgttagagaggatccatatggggagattcgaagagtgagaccaaagatcaatggaaattcatgggacatttcaaaattcaagcaagttgatattattcgaaatcatccagctgcaaattcacgtgaagagctcactgccaggaatccaaatgcttccagagatggaaagaaactattaaaggatattatgggagccagcaatttaacataccctaactttatttcaaaagctgaaaccgctgatgaaacatcagatgtccccgataaaccttcagctgtaaccccacaacaacatgattccagcttcccgcaagctggtaagaaacaaaaaggttttgctgctacaacacttaatcagtgttctaatgaggacctgaagaaaggctttgctttgaaggtggagcctttgaatgcatttattcctttcgagcagcagatgatggacctatctcacaggaagcaagagaatgctgcctgtgacgattcatgctctctctcaaaactaatgttgaaggaggatattgaggctgcacccagcctgccgacgggcattcaagtacagaatggctccaagaaccgcaggaggaggcagcccaacgtacagaagaccacggcgactccaacaaggtcgcctgcaaggggtcagcgtcgaaagaacaacgatgccatggtcaaatcggagatgggcttgattgagcagagtaaacttgtgctgacggaacaagagccagagctgggagacgttccggtgaagagacccgttgggaggcccaggaaggcgaggcttgagctccgtttggcttggattccggcgccttttccagtttcctgtgacttctgtacagtgcaagccatcttaacgccgccaaggttaacttatcgaaacatttggagaacctggaagcaaacggcgaagtttttccgtgtgcgttaatgtttcagagaagggagtccgagggaaaaaaaggttgccactacgcagctcatgtactgtttttttttgtaggatgtattgacatcattgtaccaaatcagctccatataatcctgtttgatagatataataccattgtatcaaatctcgagttttgataggcaaagattactagtaatcttgaagagcccgcggtcgtcagagacggcggtaattttgcgcctt

SEQ ID NO: 83475 - DNA, 1965 bp, Zea Mays
gcacgcgcctcctctcatggagtcatccgccgtgaggggcgacacccctcgccggccgtcggcgtttgccggggcctcgccgcctcctcccccgcccccgccgccgaggggttggctcgcgggtctcgtctccggcgccggccggatcctcgccgccgtgctcgggcccgagccctcctcttccggctccggctccattgcctcatctgcagcgtcggacggggactcgccgtcggcctcgtactcgccggcatggttcccgcctcctggcccgcacggcgagggttgcaatgacgccaccgataacaatgattccccagtctttcccctgagtaataatcagtcaaatcagggtaaaaaggagactgctctaaaagactacacggggtccctagcaattatctctgagattgaaccaaaggatgccataatgcaattgcttatgcaggaaacctattcaaggtccgagtgcagcaagtttataaagataattcaagagcgggttttagattcagattcaggtgatatagatgctggtgggtttgctctcactagtgctcggaaggctagcagactagccgtagatgggtactcttcatttagtccacatgaatcctcacctgcaacttctagtcttcaaatgcatggctgtgataatagtgctgctgtgggcacaattccaaaattaactcataccaaccaaagccctttcatcaacaatgctaagaacataaacccagttctcaaacgaaattactctgttagagaggatccatatggggagattcgaagagtgagaccaaagatcaatggaaattcatgggacatttcaaaattcaagcaagttgatattattcgaaatcatccagctgcaaattcacgtgaagagctcactgccaggaatccaaatgcttccagagatggaaagaaactattaaaggatattatgggagccagcaatttaacataccctaactttatttcaaaagctgaaaccgctgatgaaacatcagatgtccccgataaaccttcagctgtaaccccacaacaacatgattccagcttcccgcaagctggtaagaaacaaaaaggttttgctgctacaacacttaatcagtgttctaatgaggacctgaagaaaggctttgctttgaaggtggagcctttgaatgcatttattcctttcgagcagcagatgatggacctatctcacaggaagcaagagaatgctgcctgtgacgattcatgctctctctcaaaactaatgttgaaggaggatattgaggctgcacccagcctgccgacgggcattcaagtacagaatggctccaagaaccgcaggaggaggcagcccaacgtacagaagaccacggcgactccaacaaggtcgcctgcaaggggtcagcgtcgaaagaacaacgatgccatggtcaaatcggagatgggcttgattgagcagagtaaacttgtgctgacggaacaagagccagagctgggagacgttccggtgaagagacccgttgggaggcccaggaaggcgaggtaggaacggacctagctcagatgacccgggcacccctgcttcgtaggcttgagctccgtttggcttggattccggcgccttttccagtttcctgtgacttctgtacagtgcaagccatcttaacgccgccaaggttaacttatcgaaacatttggagaacctggaagcaaacggcgaagtttttccgtgtgcgttaatgtttcagagaagggagtccgagggaaaaaaaggttgccactacgcagctcatgtactgtttttttttgtaggatgtattgacatcattgtaccaaatcagctccatataatcctgtttgatagatataataccattgtatcaaatctcgagttttgataggcaaagattactagtaatcttgaagagcccgcggtcgtcagagacggcggtaattttgcgcctt

SEQ ID NO: 83476 - DNA, 1952 bp, Zea Mays
gcacgcgcctcctctcatggagtcatccgccgtgaggggcgacacccctcgccggccgtcggcgtttgccggggcctcgccgcctcctcccccgcccccgccgccgaggggttggctcgcgggtctcgtctccggcgccggccggatcctcgccgccgtgctcgggcccgagccctcctcttccggctccggctccattgcctcatctgcagcgtcggacggggactcgccgtcggcctcgtactcgccggcatggttcccgcctcctggcccgcacggcgagggttgcaatgacgccaccgataacaatgattccccagtctttcccctgagtaataatcagtcaaatcagggtaaaaaggagactgctctaaaagactacacggggtccctagcaattatctctgagattgaaccaaaggatgccataatgcaattgcttatgcaggaaacctattcaaggtccgagtgcagcaagtttataaagataattcaagagcgggttttagattcagattcaggtgatatagatgctggtgggtttgctctcactagtgctcggaaggctagcagactagccgtagatgggtactcttcatttagtccacatgaatcctcacctgcaacttctagtcttcaaatgcatggctgtgataatagtgctgctgtgggcacaattccaaaattaactcataccaaccaaagccctttcatcaacaatgctaagaacataaacccagttctcaaacgaaattactctgttagagaggatccatatggggagattcgaagagtgagaccaaagatcaatggaaattcatgggacatttcaaaattcaagcaagttgatattattcgaaatcatccagctgcaaattcacgtgaagagctcactgccaggaatccaaatgcttccagagatggaaagaaactattaaaggatattatgggagccagcaatttaacataccctaactttatttcaaaagctgaaaccgctgatgaaacatcagatgtccccgataaaccttcagctgtaaccccacaacaacatgattccagcttcccgcaagctggtaagaaacaaaaaggttttgctgctacaacacttaatcagtgttctaatgagaaaggctttgctttgaaggtggagcctttgaatgcatttattcctttcgagcagcagatgatggacctatctcacaggaagcaagagaatgctgcctgtgacgattcatgctctctctcaaaactaatgttgaaggaggatattgaggctgcacccagcctgccgacgggcattcaagtacagaatggctccaagaaccgcaggaggaggcagcccaacgtacagaagaccacggcgactccaacaaggtcgcctgcaaggggtcagcgtcgaaagaacaacgatgccatggtcaaatcggagatgggcttgattgagcagagtaaacttgtgctgacggaacaagagccagagctgggagacgttccggtgaagagacccgttgggaggcccaggaaggcgaggaacggacctagctcagatgacccgggcacccctgcttcgtaggcttgagctccgtttggcttggattccggcgccttttccagtttcctgtgacttctgtacagtgcaagccatcttaacgccgccaaggttaacttatcgaaacatttggagaacctggaagcaaacggcgaagtttttccgtgtgcgttaatgtttcagagaagggagtccgagggaaaaaaaggttgccactacgcagctcatgtactgtttttttttgtaggatgtattgacatcattgtaccaaatcagctccatataatcctgtttgatagatataataccattgtatcaaatctcgagttttgataggcaaagattactagtaatcttgaagagcccgcggtcgtcagagacggcggtaattttgcgcctt

SEQ ID NO: 83477 - DNA, 4031 bp, Zea Mays
gcaagctggaactgaggtcagtttcaaatcattacatcacatttttttgattttggtttcttctccattgtttctcaaaatacaataccaatatataatatatacacaggtacaagaaaaacctcaaatcaaaacggaaagaaaaataatccgtcctgcctgctcgcttcctcctttgtcctttccccgaggtggaaaagacttctcagcctcttccaagtcccatcactgctcgctcacagactggtcccacgtggcgagactgtgctgcctgtgactgtgaatacatgtgcttgcgcatccggaaaatccatctgggcagtctggcagcagggcactcgctcctgccggcgagacgctggagcagtcaagtttcactgacatgtggaccagccaggggcgacgtgatgtggctcggggcttgtggacccgtgtgggtgcgcggagtgggccgaaacgtcttggttcggcgatgcagatgtttgttctacccgaaggctgggtcatgcgtagaggacctgtgcgttgcagggcgcgagcccgacgaactcggtggggcccttgaccacctcccactccaccacttcctcctcgacgccgtggacgccgggtgccgcggcggtgtctgaggccgaaacagtgcccacggcgacgtccagcccggcgccaacaacgtatatccttcgcctcccaccggcgacctccccgatctccccggcgacgacgtgtggccggcgcacctcggggggcaccccgctgccggccaccatccgccactcgtcccgggcctcgtcgtactgcttcagccgccactccccgtactccgccacgatgtacatccggccgccggcgacggcgcaagagcccgtccacccctcccgcatcccgcgcgccatctcgcaccacgagtccgtggcggagtcgtacacggcgccgcgcggcgcgcgctcgaacggccacgcccacccctccgtcacgtacagcttcccacccgccgccgccgcgtcgtaccacgccaccgccgcgccccggcgcggcgcagccggcgaccaccgcccggcatccgggtcgaacacctcggcctcgccgtcctccccggccaccaccacccgccctcccacctccccagccgccatgtacccgcggggcgtccgcatcgccgccgcctcctcccatccgttccgcgcggcgctgtacacggccacgctcgtcaccgccttgtcgctgccctcctcgacgcccccaatcacgtagatctcgccgcggcgggggagccccaccaccgcaaacgacccggccgcggcgccgccgggcaccggcgggagcaggagccacctcctcgagaaagggtcgagcgcctggcactggaggcgtcgcgacacagggtcaaacgcgaaggcgaagaggaagggcagcgataaggacaacgagcccatggctgcgctccccgcgccagcccccgccccctccgcgggagtgaacagcagcggcttggcaggggagtcggtgaggaagcggttccaggtggaggagacggtgcggaagagacggtggtagaggaagggcaggtggaggaggcacttctcggccacctcttccggcaggcccgggataagctccacgacctcttccccctccccgtcaccggcgtccagcacctgctgtttgctcatggacgagaagctcatagtggcggggccgagtggcgcgcgattgttcggtcgaatttggcgcgatccgctgcaccccgctgtgggtgtggggaagctctctcggtctcggttcggcttggtgatggggagagatctctgatggggaatggaagggaagcggggtcggcgggaatttatagaggtgggtgggtcggtgtgtgagcgtgagggtttggaccctggacgcgcaggctgtccgaggcaccgatctcaccggtaacgatggttcgatggcgagaggttgggtgaggcggggccatggtgactggtggcaagtgctgcggcgccggaggacatggctaacatggcggtgtcggcgctggaggcctctctcggcagagcgtatccgcggacagcgcgcgctgtgccagtgtgcgcagcagcagagagaacgtatcggaggagcggcaggcgcgcgcgtgcgcatgtgcgccgggagtctggtgctgcgatcgggcgtgcagtgcacagacagggggcgcgcgggttgaggacggggcgcgcatgcggcatgcgcgccgcgcgtggtgggggcgggggatcgcttgcctcgtctttacgggacactgcgatccgaggcgggagcgcgcagccactcgagccgaggcggtgccgcgctcggggaggcagcccagcgcggggtgctcgcgcgtgcagcccagcgggggccagcagatcgagcatcgcgcgacgatggtgggtgggtggagatgatcaggcgcggggcggtgtaggtgcgtgccgacatcccatgcagccaacgcagtgccccagcccccagggtaggccgataccggagccccgcgccacccaacgccagcgacagcgacgccgcggactcctcctcgccctcgccgacgcgcacggtgcgttcctggaggcgctgctcgacctaaggtgcggccacggcgcactctggctgtgcgacacggcgggcgcccagcggcacgctgagagtgaccttgtccgcctcgtgtcctccgcgcgcgccggcgtcaggctcccgcaggcggcggtgcccgtggcgccagccagcgagcgaggaatagcacttcctgttggccatagatggcgatgaaagccaactgcatcgtccgcacctttcccctacgttgcccgcatacgctctgtagtggcggaccatggcctcccgcttcacctgcagggcgccgccgaccgagcgcgcctgtggcaggagccgctcgctcagaccagattggcgcctcttcagcagcgtgacttctgtccttcaagctatgaagtggtggttcatggccgaggcacagttccacgaccagggcgacgtgcacaacatcgccatcgagtgcagtggtggtgtgaggacgtgataccgatgtggaaattactattgccatcgacgacgagagcactttactagatcttcttagaagaggaaactgaacgatgggcacactgcgggtgatcaggtggcagcgatgtgaggacggtcagcatggccatggagatgctgatgaagcctaggttggtcatcctagatgagcccaccattggtttggatagaaactctttcaggcatgaactaactgtactggagaaggttcgacactgtactatgttgttcagttcgtcggagctgtcactcaggacatacctatgatgattgtttctgaactccatgaagagacttatgagatgtatccagaagaaagcaaagttacgtgcgcaaaaggtgctaagaaatggccttgatatttccagtgcatggttcgaagagcttcacaagcagagttcagagagttgctgaattgaaaaggggaattggagaagtcagaaaattctatcgggaactctctacatgatggatatctcaatatgggcacctggaaggcgagatggtactggtactatccgagagctctctgcatacgactttgtgtcgtattggttttagatactttctcatggcttgtcttggacaaccaaatgacgacgcaggacgacggtggacggtggaactatagagtaatggaagactacgagaatagggaaacgagaataaagaataaaaaaaaagagtactaaagatggtgcatttaagtggatggtttggtttcaacgcgagtagtctgtgcacgtcaggaaccagtggcctgcttccatgggagacctggcccggccgacgtcgcattcccacggcacgcgtcggtagggatgaaagcgaaaaccgtaatttttgaatactgggaattgtttttgaaattttactaaaattttagtctaaacagaaacggttactaaaaatacggaaacggaatcgatagaaaaactcggaatcgg

SEQ ID NO: 83478 - DNA, 1181 bp, Zea Mays
ccaggcggtggccatttttcttgcctcaccataccaccttaagaaccatgctggtgtcaaggatgatggggtgctgcaccatgtttgttggaatggcattgtctctaattggtctgattgaccttgtgatggtggaggagtcgatggacacagtggctgatgcacctcaagggacagtgcatggttcgaagagcttcacaagcagagttcagagagttgctgaattgaaaaggggaattggagaagtcagaaaattctatcggagatttgagatctcctttttagtcttctacgtcttttcaatctgtgattgggatttgggagcttcagcaaatataacatgtttatgggactgggagttttgaatgcggcaccagtcatactgaatcaggttcacactccaaaaaacacagcagataattcttcaggccaaggcacatccaaagatcacgagcattctattatagttactaggcctgatggcatgccagcacatattaggatgctagtgtttggttttgccttgacgaactctctacatgatggatatctcaatatgggcacctggaaggtaagggaaacacacgcccattctcacaattgagcagatgttcatgcttcctgcaactccccattttgcattcagaaggtcataatttggtaatacatggcaaacggatgtgagtttatagtataactgtctgtattgaaactataacatcttaggaaatagtcaaattaaatttgggcctggatataaaattgggattctgtttcaagtgtaccatgtactaaattgaattgtaacatatgaatggatgctagaaattccaataaattcaccgctacaattacctgcgtggtttttgccttaggtgatcgttactattctcatcatttcatacattgtccagatcattactattctcatcattgcatacattgtccaatatctctcttttttatgcggggcatgccagattgttcaccgtctgaaaatctataggttgttaagatttcacatttaaacatgagttatactctaattgccattctttgtggagagtcatgtaatagtgatgttgcaaacatcacgctctcgacgtaacttttttgagaggagtacaacacgcgttcacacacgttattgtggcatctttttctcgttgcaagacatgcgc

SEQ ID NO: 83479 - DNA, 999 bp, Zea Mays
gcgtccaggcggtggccatttttcttgcctcaccataccaccttaagaaccatgctggtgtcaaggatgatggggtgctgcaccatgtttgttggaatggcattgtctctaattggtctgattgaccttgtgatggtggaggagtcgatggacacagtggctgatgcacctcaagggacaggttgcattgctattgcattgaccaacctacatgttcacgtctgtttagcaccttgttctgcctatttgctttgatgcagtgcatggttcgaagagcttcacaagcagagttcagagagttgctgaattgaaaaggggaattggagaagtcagaaaattctatcgggaactctctacatgatggatatctcaatatgggcacctggaaggtaagggaaacacacgcccattctcacaattgagcagatgttcatgcttcctgcaactccccattttgcattcagaaggtcataatttggtaatacatggcaaacggatgtgagtttatagtataactgtctgtattgaaactataacatcttaggaaatagtcaaattaaatttgggcctggatataaaattgggattctgtttcaagtgtaccatgtactaaattgaattgtaacatatgaatggatgctagaaattccaataaattcaccgctacaattacctgcgtggtttttgccttaggtgatcgttactattctcatcatttcatacattgtccagatcattactattctcatcattgcatacattgtccaatatctctcttttttatgcggggcatgccagattgttcaccgtctgaaaatctataggttgttaagatttcacatttaaacatgagttatactctaattgccattctttgtggagagtcatgtaatagtgatgttgcaaacatcacgctctcgacgtaacttttttgagaggagtacaacacgcgttcacacacgttattgtggcatctttttctcgttgcaagacatgcgc

SEQ ID NO: 83480 - DNA, 4191 bp, Zea Mays
gcaagctggaactgaggtcagtttcaaatcattacatcacatttttttgattttggtttcttctccattgtttctcaaaatacaataccaatatataatatatacacaggtacaagaaaaacctcaaatcaaaacggaaagaaaaataatccgtcctgcctgctcgcttcctcctttgtcctttccccgaggtggaaaagacttctcagcctcttccaagtcccatcactgctcgctcacagactggtcccacgtggcgagactgtgctgcctgtgactgtgaatacatgtgcttgcgcatccggaaaatccatctgggcagtctggcagcagggcactcgctcctgccggcgagacgctggagcagtcaagtttcactgacatgtggaccagccaggggcgacgtgatgtggctcggggcttgtggacccgtgtgggtgcgcggagtgggccgaaacgtcttggttcggcgatgcagatgtttgttctacccgaaggctgggtcatgcgtagaggacctgtgcgttgcagggcgcgagcccgacgaactcggtggggcccttgaccacctcccactccaccacttcctcctcgacgccgtggacgccgggtgccgcggcggtgtctgaggccgaaacagtgcccacggcgacgtccagcccggcgccaacaacgtatatccttcgcctcccaccggcgacctccccgatctccccggcgacgacgtgtggccggcgcacctcggggggcaccccgctgccggccaccatccgccactcgtcccgggcctcgtcgtactgcttcagccgccactccccgtactccgccacgatgtacatccggccgccggcgacggcgcaagagcccgtccacccctcccgcatcccgcgcgccatctcgcaccacgagtccgtggcggagtcgtacacggcgccgcgcggcgcgcgctcgaacggccacgcccacccctccgtcacgtacagcttcccacccgccgccgccgcgtcgtaccacgccaccgccgcgccccggcgcggcgcagccggcgaccaccgcccggcatccgggtcgaacacctcggcctcgccgtcctccccggccaccaccacccgccctcccacctccccagccgccatgtacccgcggggcgtccgcatcgccgccgcctcctcccatccgttccgcgcggcgctgtacacggccacgctcgtcaccgccttgtcgctgccctcctcgacgcccccaatcacgtagatctcgccgcggcgggggagccccaccaccgcaaacgacccggccgcggcgccgccgggcaccggcgggagcaggagccacctcctcgagaaagggtcgagcgcctggcactggaggcgtcgcgacacagggtcaaacgcgaaggcgaagaggaagggcagcgataaggacaacgagcccatggctgcgctccccgcgccagcccccgccccctccgcgggagtgaacagcagcggcttggcaggggagtcggtgaggaagcggttccaggtggaggagacggtgcggaagagacggtggtagaggaagggcaggtggaggaggcacttctcggccacctcttccggcaggcccgggataagctccacgacctcttccccctccccgtcaccggcgtccagcacctgctgtttgctcatggacgagaagctcatagtggcggggccgagtggcgcgcgattgttcggtcgaatttggcgcgatccgctgcaccccgctgtgggtgtggggaagctctctcggtctcggttcggcttggtgatggggagagatctctgatggggaatggaagggaagcggggtcggcgggaatttatagaggtgggtgggtcggtgtgtgagcgtgagggtttggaccctggacgcgcaggctgtccgaggcaccgatctcaccggtaacgatggttcgatggcgagaggttgggtgaggcggggccatggtgactggtggcaagtgctgcggcgccggaggacatggctaacatggcggtgtcggcgctggaggcctctctcggcagagcgtatccgcggacagcgcgcgctgtgccagtgtgcgcagcagcagagagaacgtatcggaggagcggcaggcgcgcgcgtgcgcatgtgcgccgggagtctggtgctgcgatcgggcgtgcagtgcacagacagggggcgcgcgggttgaggacggggcgcgcatgcggcatgcgcgccgcgcgtggtgggggcgggggatcgcttgcctcgtctttacgggacactgcgatccgaggcgggagcgcgcagccactcgagccgaggcggtgccgcgctcggggaggcagcccagcgcggggtgctcgcgcgtgcagcccagcgggggccagcagatcgagcatcgcgcgacgatggtgggtgggtggagatgatcaggcgcggggcggtgtaggtgcgtgccgacatcccatgcagccaacgcagtgccccagcccccagggtaggccgataccggagccccgcgccacccaacgccagcgacagcgacgccgcggactcctcctcgccctcgccgacgcgcacggtgcgttcctggaggcgctgctcgacctaaggtgcggccacggcgcactctggctgtgcgacacggcgggcgcccagcggcacgctgagagtgaccttgtccgcctcgtgtcctccgcgcgcgccggcgtcaggctcccgcaggcggcggtgcccgtggcgccagccagcgagcgaggaatagcacttcctgttggccatagatggcgatgaaagccaactgcatcgtccgcacctttcccctacgttgcccgcatacgctctgtagtggcggaccatggcctcccgcttcacctgcagggcgccgccgaccgagcgcgcctgtggcaggagccgctcgctcagaccagattggcgcctcttcagcagcgtgacttctgtccttcaagctatgaagtggtggttcatggccgaggcacagttccacgaccagggcgacgtgcacaacatcgccatcgagtgcagtggtggtgtgaggacgtgataccgatgtggaaattactattgccatcgacgacgagagcactttactagatcttcttagaagaggaaactgaacgatgggcacactgcgggtgatcaggtggcagcgatgtgaggacggtcagcatggccatggagatgctgatgaagcctaggttggtcatcctagatgagcccaccattggtttggatagaaactctttcaggcatgaactaactgtactggagaaggttcgacactgtactatgttgttcagttcgtcggagctgtcactcaggacatacctatgatgattgtttctgaactccatgaagagacttatgagatgtatccagaagaaagcaaagttacgtgcgcaaaaggtgctaagaaatggccttgatatttccagtgcatggttcgaagagcttcacaagcagagttcagagagttgctgaattgaaaaggggaattggagaagtcagaaaattctatcgggaactctctacatgatggatatctcaatatgggcacctggaaggtaagggaaacacacgcccattctcacaattgagcagatgttcatgcttcctgcaactccccattttgcattcagaaggtcataatttggtaatacatggcaaacggatgtgagtttatagtataactgtctgtattgaaactataacatcttaggaaatagtcaaattaaatttgggcctggatataaaattgggattctgtttcaagtgtaccatgtactaaattgaattgtaacatatgaatggatgctagaaattccaataaattcaccgctacaattacctgcgtggtttttgccttaggtgatcgttactattctcatcatttcatacattgtccagatcattactattctcatcattgcatacattgtccaatatctctcttttttatgcggggcatgccagattgttcaccgtctgaaaatctataggttgttaagatttcacatttaaacatgagttatactctaattgccattctttgtggagagtcatgtaatagtgatgttgcaaacatcacgctctcgacgtaacttttttgagaggagtacaacacgcgttcacacacgttattgtggcatctttttctcgttgcaagacatgcgc

SEQ ID NO: 83481 - DNA, 4209 bp, Zea Mays
gcaagctggaactgaggtcagtttcaaatcattacatcacatttttttgattttggtttcttctccattgtttctcaaaatacaataccaatatataatatatacacaggtacaagaaaaacctcaaatcaaaacggaaagaaaaataatccgtcctgcctgctcgcttcctcctttgtcctttccccgaggtggaaaagacttctcagcctcttccaagtcccatcactgctcgctcacagactggtcccacgtggcgagactgtgctgcctgtgactgtgaatacatgtgcttgcgcatccggaaaatccatctgggcagtctggcagcagggcactcgctcctgccggcgagacgctggagcagtcaagtttcactgacatgtggaccagccaggggcgacgtgatgtggctcggggcttgtggacccgtgtgggtgcgcggagtgggccgaaacgtcttggttcggcgatgcagatgtttgttctacccgaaggctgggtcatgcgtagaggacctgtgcgttgcagggcgcgagcccgacgaactcggtggggcccttgaccacctcccactccaccacttcctcctcgacgccgtggacgccgggtgccgcggcggtgtctgaggccgaaacagtgcccacggcgacgtccagcccggcgccaacaacgtatatccttcgcctcccaccggcgacctccccgatctccccggcgacgacgtgtggccggcgcacctcggggggcaccccgctgccggccaccatccgccactcgtcccgggcctcgtcgtactgcttcagccgccactccccgtactccgccacgatgtacatccggccgccggcgacggcgcaagagcccgtccacccctcccgcatcccgcgcgccatctcgcaccacgagtccgtggcggagtcgtacacggcgccgcgcggcgcgcgctcgaacggccacgcccacccctccgtcacgtacagcttcccacccgccgccgccgcgtcgtaccacgccaccgccgcgccccggcgcggcgcagccggcgaccaccgcccggcatccgggtcgaacacctcggcctcgccgtcctccccggccaccaccacccgccctcccacctccccagccgccatgtacccgcggggcgtccgcatcgccgccgcctcctcccatccgttccgcgcggcgctgtacacggccacgctcgtcaccgccttgtcgctgccctcctcgacgcccccaatcacgtagatctcgccgcggcgggggagccccaccaccgcaaacgacccggccgcggcgccgccgggcaccggcgggagcaggagccacctcctcgagaaagggtcgagcgcctggcactggaggcgtcgcgacacagggtcaaacgcgaaggcgaagaggaagggcagcgataaggacaacgagcccatggctgcgctccccgcgccagcccccgccccctccgcgggagtgaacagcagcggcttggcaggggagtcggtgaggaagcggttccaggtggaggagacggtgcggaagagacggtggtagaggaagggcaggtggaggaggcacttctcggccacctcttccggcaggcccgggataagctccacgacctcttccccctccccgtcaccggcgtccagcacctgctgtttgctcatggacgagaagctcatagtggcggggccgagtggcgcgcgattgttcggtcgaatttggcgcgatccgctgcaccccgctgtgggtgtggggaagctctctcggtctcggttcggcttggtgatggggagagatctctgatggggaatggaagggaagcggggtcggcgggaatttatagaggtgggtgggtcggtgtgtgagcgtgagggtttggaccctggacgcgcaggctgtccgaggcaccgatctcaccggtaacgatggttcgatggcgagaggttgggtgaggcggggccatggtgactggtggcaagtgctgcggcgccggaggacatggctaacatggcggtgtcggcgctggaggcctctctcggcagagcgtatccgcggacagcgcgcgctgtgccagtgtgcgcagcagcagagagaacgtatcggaggagcggcaggcgcgcgcgtgcgcatgtgcgccgggagtctggtgctgcgatcgggcgtgcagtgcacagacagggggcgcgcgggttgaggacggggcgcgcatgcggcatgcgcgccgcgcgtggtgggggcgggggatcgcttgcctcgtctttacgggacactgcgatccgaggcgggagcgcgcagccactcgagccgaggcggtgccgcgctcggggaggcagcccagcgcggggtgctcgcgcgtgcagcccagcgggggccagcagatcgagcatcgcgcgacgatggtgggtgggtggagatgatcaggcgcggggcggtgtaggtgcgtgccgacatcccatgcagccaacgcagtgccccagcccccagggtaggccgataccggagccccgcgccacccaacgccagcgacagcgacgccgcggactcctcctcgccctcgccgacgcgcacggtgcgttcctggaggcgctgctcgacctaaggtgcggccacggcgcactctggctgtgcgacacggcgggcgcccagcggcacgctgagagtgaccttgtccgcctcgtgtcctccgcgcgcgccggcgtcaggctcccgcaggcggcggtgcccgtggcgccagccagcgagcgaggaatagcacttcctgttggccatagatggcgatgaaagccaactgcatcgtccgcacctttcccctacgttgcccgcatacgctctgtagtggcggaccatggcctcccgcttcacctgcagggcgccgccgaccgagcgcgcctgtggcaggagccgctcgctcagaccagattggcgcctcttcagcagcgtgacttctgtccttcaagctatgaagggacacgtatttgggcagtggtggttcatggccgaggcacagttccacgaccagggcgacgtgcacaacatcgccatcgagtgcagtggtggtgtgaggacgtgataccgatgtggaaattactattgccatcgacgacgagagcactttactagatcttcttagaagaggaaactgaacgatgggcacactgcgggtgatcaggtggcagcgatgtgaggacggtcagcatggccatggagatgctgatgaagcctaggttggtcatcctagatgagcccaccattggtttggatagaaactctttcaggcatgaactaactgtactggagaaggttcgacactgtactatgttgttcagttcgtcggagctgtcactcaggacatacctatgatgattgtttctgaactccatgaagagacttatgagatgtatccagaagaaagcaaagttacgtgcgcaaaaggtgctaagaaatggccttgatatttccagtgcatggttcgaagagcttcacaagcagagttcagagagttgctgaattgaaaaggggaattggagaagtcagaaaattctatcgggaactctctacatgatggatatctcaatatgggcacctggaaggtaagggaaacacacgcccattctcacaattgagcagatgttcatgcttcctgcaactccccattttgcattcagaaggtcataatttggtaatacatggcaaacggatgtgagtttatagtataactgtctgtattgaaactataacatcttaggaaatagtcaaattaaatttgggcctggatataaaattgggattctgtttcaagtgtaccatgtactaaattgaattgtaacatatgaatggatgctagaaattccaataaattcaccgctacaattacctgcgtggtttttgccttaggtgatcgttactattctcatcatttcatacattgtccagatcattactattctcatcattgcatacattgtccaatatctctcttttttatgcggggcatgccagattgttcaccgtctgaaaatctataggttgttaagatttcacatttaaacatgagttatactctaattgccattctttgtggagagtcatgtaatagtgatgttgcaaacatcacgctctcgacgtaacttttttgagaggagtacaacacgcgttcacacacgttattgtggcatctttttctcgttgcaagacatgcgc

SEQ ID NO: 83482 - DNA, 3290 bp, Zea Mays
gcaagctggaactgaggtcagtttcaaatcattacatcacatttttttgattttggtttcttctccattgtttctcaaaatacaataccaatatataatatatacacaggtacaagaaaaacctcaaatcaaaacggaaagaaaaataatccgtcctgcctgctcgcttcctcctttgtcctttccccgaggtggaaaagacttctcagcctcttccaagtcccatcactgctcgctcacagactggtcccacgtggcgagactgtgctgcctgtgactgtgaatacatgtgcttgcgcatccggaaaatccatctgggcagtctggcagcagggcactcgctcctgccggcgagacgctggagcagtcaagtttcactgacatgtggaccagccaggggcgacgtgatgtggctcggggcttgtggacccgtgtgggtgcgcggagtgggccgaaacgtcttggttcggcgatgcagatgtttgttctacccgaaggctgggtcatgcgtagaggacctgtgcgttgcagggcgcgagcccgacgaactcggtggggcccttgaccacctcccactccaccacttcctcctcgacgccgtggacgccgggtgccgcggcggtgtctgaggccgaaacagtgcccacggcgacgtccagcccggcgccaacaacgtatatccttcgcctcccaccggcgacctccccgatctccccggcgacgacgtgtggccggcgcacctcggggggcaccccgctgccggccaccatccgccactcgtcccgggcctcgtcgtactgcttcagccgccactccccgtactccgccacgatgtacatccggccgccggcgacggcgcaagagcccgtccacccctcccgcatcccgcgcgccatctcgcaccacgagtccgtggcggagtcgtacacggcgccgcgcggcgcgcgctcgaacggccacgcccacccctccgtcacgtacagcttcccacccgccgccgccgcgtcgtaccacgccaccgccgcgccccggcgcggcgcagccggcgaccaccgcccggcatccgggtcgaacacctcggcctcgccgtcctccccggccaccaccacccgccctcccacctccccagccgccatgtacccgcggggcgtccgcatcgccgccgcctcctcccatccgttccgcgcggcgctgtacacggccacgctcgtcaccgccttgtcgctgccctcctcgacgcccccaatcacgtagatctcgccgcggcgggggagccccaccaccgcaaacgacccggccgcggcgccgccgggcaccggcgggagcaggagccacctcctcgagaaagggtcgagcgcctggcactggaggcgtcgcgacacagggtcaaacgcgaaggcgaagaggaagggcagcgataaggacaacgagcccatggctgcgctccccgcgccagcccccgccccctccgcgggagtgaacagcagcggcttggcaggggagtcggtgaggaagcggttccaggtggaggagacggtgcggaagagacggtggtagaggaagggcaggtggaggaggcacttctcggccacctcttccggcaggcccgggataagctccacgacctcttccccctccccgtcaccggcgtccagcacctgctgtttgctcatggacgagaagctcatagtggcggggccgagtggcgcgcgattgttcggtcgaatttggcgcgatccgctgcaccccgctgtgggtgtggggaagctctctcggtctcggttcggcttggtgatggggagagatctctgatggggaatggaagggaagcggggtcggcgggaatttatagaggtgggtgggtcggtgtgtgagcgtgagggtttggaccctggacgcgcaggctgtccgaggcaccgatctcaccggtaacgatggttcgatggcgagaggttgggtgaggcggggccatggtgactggtggcaagtgctgcggcgccggaggacatggctaacatggcggtgtcggcgctggaggcctctctcggcagagcgtatccgcggacagcgcgcgctgtgccagtgtgcgcagcagcagagagaacgtatcggaggagcggcaggcgcgcgcgtgcgcatgtgcgccgggagtctggtgctgcgatcgggcgtgcagtgcacagacagggggcgcgcgggttgaggacggggcgcgcatgcggcatgcgcgccgcgcgtggtgggggcgggggatcgcttgcctcgtctttacgggacactgcgatccgaggcgggagcgcgcagccactcgagccgaggcggtgccgcgctcggggaggcagcccagcgcggggtgctcgcgcgtgcagcccagcgggggccagcagatcgagcatcgcgcgacgatggtgggtgggtggagatgatcaggcgcggggcggtgtaggtgcgtgccgacatcccatgcagccaacgcagtgccccagcccccagggtaggccgataccggagccccgcgccacccaacgccagcgacagcgacgccgcggactcctcctcgccctcgccgacgcgcacggtgcgttcctggaggcgctgctcgacctaaggtgcggccacggcgcactctggctgtgcgacacggcgggcgcccagcggcacgctgagagtgaccttgtccgcctcgtgtcctccgcgcgcgccggcgtcaggctcccgcaggcggcggtgcccgtggcgccagccagcgagcgaggaatagcacttcctgttggccatagatggcgatgaaagccaactgcatcgtccgcacctttcccctacgttgcccgcatacgctctgtagtggcggaccatggcctcccgcttcacctgcagggcgccgccgaccgagcgcgcctgtggcaggagccgctcgctcagaccagattggcgcctcttcagcagcgtgacttctgtccttcaagctatgaagtggtggttcatggccgaggcacagttccacgaccagggcgacgtgcacaacatcgccatcgagtgcagtggtggtgtgaggacgtgataccgatgtggaaattactattgccatcgacgacgagagcactttactagatcttcttagaggaaactgaacgatgggcacactgcgggtgatcaggtggcagcgatgtgaggacggtcagcatggccatggagatgctgatgaagcctaggttggtcatcctagatgagcccaccattggtttggatagtgcttcaacactgctaaggttggtgagagacaatggtcg

SEQ ID NO: 83483 - DNA, 3004 bp, Zea Mays
gcaagctggaactgaggtcagtttcaaatcattacatcacatttttttgattttggtttcttctccattgtttctcaaaatacaataccaatatataatatatacacaggtacaagaaaaacctcaaatcaaaacggaaagaaaaataatccgtcctgcctgctcgcttcctcctttgtcctttccccgaggtggaaaagacttctcagcctcttccaagtcccatcactgctcgctcacagactggtcccacgtggcgagactgtgctgcctgtgactgtgaatacatgtgcttgcgcatccggaaaatccatctgggcagtctggcagcagggcactcgctcctgccggcgagacgctggagcagtcaagtttcactgacatgtggaccagccaggggcgacgtgatgtggctcggggcttgtggacccgtgtgggtgcgcggagtgggccgaaacgtcttggttcggcgatgcagatgtttgttctacccgaaggctgggtcatgcgtagaggacctgtgcgttgcagggcgcgagcccgacgaactcggtggggcccttgaccacctcccactccaccacttcctcctcgacgccgtggacgccgggtgccgcggcggtgtctgaggccgaaacagtgcccacggcgacgtccagcccggcgccaacaacgtatatccttcgcctcccaccggcgacctccccgatctccccggcgacgacgtgtggccggcgcacctcggggggcaccccgctgccggccaccatccgccactcgtcccgggcctcgtcgtactgcttcagccgccactccccgtactccgccacgatgtacatccggccgccggcgacggcgcaagagcccgtccacccctcccgcatcccgcgcgccatctcgcaccacgagtccgtggcggagtcgtacacggcgccgcgcggcgcgcgctcgaacggccacgcccacccctccgtcacgtacagcttcccacccgccgccgccgcgtcgtaccacgccaccgccgcgccccggcgcggcgcagccggcgaccaccgcccggcatccgggtcgaacacctcggcctcgccgtcctccccggccaccaccacccgccctcccacctccccagccgccatgtacccgcggggcgtccgcatcgccgccgcctcctcccatccgttccgcgcggcgctgtacacggccacgctcgtcaccgccttgtcgctgccctcctcgacgcccccaatcacgtagatctcgccgcggcgggggagccccaccaccgcaaacgacccggccgcggcgccgccgggcaccggcgggagcaggagccacctcctcgagaaagggtcgagcgcctggcactggaggcgtcgcgacacagggtcaaacgcgaaggcgaagaggaagggcagcgataaggacaacgagcccatggctgcgctccccgcgccagcccccgccccctccgcgggagtgaacagcagcggcttggcaggggagtcggtgaggaagcggttccaggtggaggagacggtgcggaagagacggtggtagaggaagggcaggtggaggaggcacttctcggccacctcttccggcaggcccgggataagctccacgacctcttccccctccccgtcaccggcgtccagcacctgctgtttgctcatggacgagaagctcatagtggcggggccgagtggcgcgcgattgttcggtcgaatttggcgcgatccgctgcaccccgctgtgggtgtggggaagctctctcggtctcggttcggcttggtgatggggagagatctctgatggggaatggaagggaagcggggtcggcgggaatttatagaggtgggtgggtcggtgtgtgagcgtgagggtttggaccctggacgcgcaggctgtccgaggcaccgatctcaccggtaacgatggttcgatggcgagaggttgggtgaggcggggccatggtgactggtggcaagtgctgcggcgccggaggacatggctaacatggcggtgtcggcgctggaggcctctctcggcagagcgtatccgcggacagcgcgcgctgtgccagtgtgcgcagcagcagagagaacgtatcggaggagcggcaggcgcgcgcgtgcgcatgtgcgccgggagtctggtgctgcgatcgggcgtgcagtgcacagacagggggcgcgcgggttgaggacggggcgcgcatgcggcatgcgcgccgcgcgtggtgggggcgggggatcgcttgcctcgtctttacgggacactgcgatccgaggcgggagcgcgcagccactcgagccgaggcggtgccgcgctcggggaggcagcccagcgcggggtgctcgcgcgtgcagcccagcgggggccagcagatcgagcatcgcgcgacgatggtgggtgggtggagatgatcaggcgcggggcggtgtaggtgcgtgccgacatcccatgcagccaacgcagtgccccagcccccagggtaggccgataccggagccccgcgccacccaacgccagcgacagcgacgccgcggactcctcctcgccctcgccgacgcgcacggtgcgttcctggaggcgctgctcgacctaaggtgcggccacggcgcactctggctgtgcgacacggcgggcgcccagcggcacgctgagagtgaccttgtccgcctcgtgtcctccgcgcgcgccggcgtcaggctcccgcaggcggcggtgcccgtggcgccagccagcgagcgaggaatagcacttcctgttggccatagatggcgatgaaagccaactgcatcgtccgcacctttcccctacgttgcccgcatacgctctgtagtggcggaccatggcctcccgcttcacctgcagggcgccgccgaccgagcgcgcctgtggcaggagccgctcgctcagaccagattggcgcctcttcagcagcgtgacttctgtccttcaagctatgaagctgtgcagaaacatagaaaggttatctgca

SEQ ID NO: 83484 - DNA, 2023 bp, Zea Mays
ccgacatgttgcgactaagtccgacaaggtgttgccggagttgagaacgtcgacacacacaagacacaaacgcgaaggctggaatacacgagatcctttttggtgcagttaagccacagttttttttgactctgtattcatactaaacgaacagaaagagtgctgcgagatttcctcgcgcacgacgcatgaccgctccacgttcgtgagctccgtgccatcccacggcgaacgtgacgcatggatcatccttgaccacgtccatgatgctaacagactccctaattacaagcttagtcactgactaactacgactcaaccaagctgactagatattgaagaaacctgacgaaactgaaacaaagaacgattaaagactctgaaactgaaactctgaatgcagcatactggcgtctgcatctcactgtcaattctccccctgagatcagtcgccgtcatgcctgaccactcctatcttctttcgaaattcttggaactttgttttccccaacgccttggtaaggatgtctgcacactgctcctctgatcttacaaactgaagctgcacttctccattttcagcacactcccgtaggtagtgatacttcaaatcaatgtgtttgctccggtcgtggagtaccggattcttgctcagtgccagtgctgacatattatccatcatcaagactggtgaagccaagttggtgcccaggatgtcggccaacaaacgtttaagccaaactccctggcaagcaccgactgctcctgctatatactctgcctcacaagatgatagagcaactactcgctgcttttgtgattgccaagtgacaggacattcgttgaggaaaaatatcacacctgtagtgctcttcccgtcatttgcatctccaccatggtcgctgtcactgtacccagtcagacttagttcttcacccatcttgttgtacacaagtccatggttcactgtccctgcaatgtatctgagaactcgcttcatagccaccaagtgttcttgtctgggatcctgcatgaaacgactcaaatatccaactgagaaggcgagatctggccttgtgttcatcagatagcgcagacttccaatcaggcttctgtacttggttgcatcaacctgagcataggatgtctgggatagcctgatgcagtttggttcctgtctcacttctataccaagataataggtgagtccacccaaatcactcattctgaatagtgatttcatttcttgcttgaagacatcaattgcttcagttgactcccccgtaatgatgagatcatcaacataaatccccaccaccaatctggactgttgagtgtctcttgtgtacaagccatgttcattcctgcttcttgcaaatcccaattgcagtaggcttgtatccaactttgagttccatgctcgtggagcctgacgaagcccataaagagctctgtgcaacttcagcaccttgttcttgtgttctgcagccacaaagcctggtggctgtaagacataaacttcctcttccaattccccgttgaggaaagccgatttcacatccatgtgatgtactgaccaacctcgatgtgcagccacagccaacatgagtctcactgactccatccgcgccaccggcgcgaacacttcttcaaagtcgatgcccttcttctgtacatagcccttggcaaccagacgcgctttgtacttggtgacgtccccatgctcattgtgcttgattttgaacacccatttgagaccaattgctctctgtcctgctggaaggttcaccaatgtccaggtcttattgtgttctatggacgccatctcttccaacattgctgttcgccattgctcactactcattgcctcctctgcagtgagtggttcattcccagttgccatcagtagctcttgatctgacgcctgttcaacaagtccaggtgctggttcttgccccatgatatcagtgatggatcgataacgaagaggagcgtggttggggtcaacgtccaggttgtcatc

SEQ ID NO: 83485 - DNA, 890 bp, Zea Mays
gatctagctgtgagtcagtgaaggctctacccttcctcctacgtccgtcgaaatcttggagcccccgactctctccatgaagtttgcaatattctttttgaagtaatcgccatctggagatgcgaccggaggttgaagacaacagtaaccgtcatctgagactaaatttgggtcttttcatcaccctcggtgatgttttccctttcagtccagtaagccccgagcggtgtctcgtgatttttgcactgagaaccagcccacctttttccggccgtgagaccatctccatcattccctcaatatttctctgaaggcctccaatccattttccatgccaggtatttacctaacgtacattaaacctgcacacaaccctatctactagaaggtagatttcttcaaggggaacaatgtggtgtaacttaatcagcacaaccactttactgaaggtgtccggatcatgatgcagacaacgacaactggtgtactcattaccactttgatggtaagcgaaatggggacaaacacaattggagggaaaatatccaaaggcaaaaggagtgagttttcacttcttcagattccaccaatcagaataagaactagacatcatagagaccaacttttggtaagagcaacaaaaaactagactactaaaatttattggtgtgatctgcaactgtcctgttaccaatattttttagggtctattatggataacaatatgcatttgttctttgtacatagattttcctcgcaatactatgttcgtttgatcatttgtaattattagcagtaaataaacaccatttgcttcaacggttctaggttgcacagtggtaaaagaacaatcgattgccactaagtaagggtattaataaattatgcta

SEQ ID NO: 83486 - DNA, 943 bp, Zea Mays
ctcacgcttccatccatggcagctgcgccccgctccccttcatggcagtcgcgccagcatgctgatggaagatctaaaacccaaaagcatagtcggatctagctgtgagtcagtgaaggctctacccttcctcctacgtccgtcgaaatcttggagcccccgactctctccatgaagtttgcaatattctttttgaagtaatcgccatctggagatgcgaccggaggttgaagacaacagtaaccgtcatctgagactaaatttgggtcttttcatcaccctcggtgatgttttccctttcagtccagtaagccccgagcggtgtctcgtgatttttgcactgagaaccagcccacctttttccggccgtgagaccatctccatcattccctcaatatttctctgaaggcctccaatccattttccatgccagactagaaggtagatttcttcaaggggaacaatgtggtgtaacttaatcagcacaaccactttactgaaggtgtccggatcatgatgcagacaacgacaactggtgtactcattaccactttgatggtaagcgaaatggggacaaacacaattggagggaaaatatccaaaggcaaaaggagtgagttttcacttcttcagattccaccaatcagaataagaactagacatcatagagaccaacttttggtaagagcaacaaaaaactagactactaaaatttattggtgtgatctgcaactgtcctgttaccaatattttttagggtctattatggataacaatatgcatttgttctttgtacatagattttcctcgcaatactatgttcgtttgatcatttgtaattattagcagtaaataaacaccatttgcttcaacggttctaggttgcacagtggtaaaagaacaatcgattgccactaagtaagggtattaataaattatgcta

SEQ ID NO: 83487 - DNA, 1900 bp, Zea Mays
accccctcacttctcaaaactcccaactaccactaccagtccaatcaagaaatgctccactacatctcctcttcccctctccgtccccgattcctcctcctcccgagcccaccctccaatcttcgcttcctcaccatgagcgcctccccctcgagctcctcgtcccgttcggtgcgcggtgcggcggtgtcggtgccttccctcggcgccgacgaggcctgcgcagtggcagatgaagccttccggaggtacacgtcgccgagcttattgaggagaggcggcgtcggggtggccgtcgtgtggttcaggaacgacctccgagttatcgataacgaggcgcttctgcgagcatgggcggcttccgaggcggtcctgccggtgtactgtgtcgatccgcgggtctttgcggggagcacgcattactttgggttccccaagaagggagagtgtttaggagacctgaagcagagcctgaggaaaaagggcctcgatttgctagtccggcatggcaagcctgaagagatccttccttcaattgcaaaggccgtcagtgcacacacaatatacgctcataaggaaacctgtagcgaagagctcctcgtcgaacgcctagtgagcaaaggcttggaacaagtccagattgctcaaggaggagcatctgtcccgaagaggcctctgaaccccaggttgcagctcatctggggagcaacaatgtaccacatcgatgacctcccgttcccagttagcagcttgccagacgtgtacacacagttcagaaaggcagttgaatcgaagtgctcagttaggaactgcgccaagttgccaacgtcgctcggtccaccccctagttccagcatagatgagattggaggatgggggacagtaccaacactggagtcactaggccccagtgttacgaagtctgagaaaggaatgcatttcataggaggagagagcgcagctcttggtagggtacatgagtacttctggaagaaggatcagctgaaagattacaaggtgaccaggaacggcatgttaggtccagactactccacaaagttctctccttggcttgcttctggcagcctttcgccgcgttatatttgcgaagaggtgaagagatatgagaagcaaagagtggcaaatgattcaacatattgggttttatttgagttgatatggagagactacttcagatttctatcagcaaaatatggaaacgccatatttcacctgggaggcccgaggaaagtagtatcgaagtggagtcaggaccaagcactgtttgaatcatggagagatggtcgaactggataccctcttattgatgccaacatgagggagctttcagccaccggttacatgtccaaccgtggtcgtcagattgtctgctcatttcttgttcgagatatgggtgttgattggcgaatgggagccgaatggttcgagacatgcttattggattatgacccagcttcgaattatggcaattggacatatggagcaggagttggcaatgatccacgagaagatcgatacttcagtatcccaaaacaagccaagtcatatgatcctgaaggggaatacgttgcatactggttaccagaacttcggtcacttgcaaaggaaaggagaaatttcccaggagcctcatacatcaggcaggtagtaccactgaagtttgatggtggaaatcagaggaaggatcagcaattcaaccggcagagaagaccaaacaacgtgtacataagacaagtaaaataggaggctcttgattcacttgaaattgaaccatctatcagtaggagatgaagcaaatttttacacaactgattgtggtgtaaacatacgcgaattactctatggtcttatgcaatgttcattgatgcattcagataca

SEQ ID NO: 83488 - DNA, 1424 bp, Zea Mays
accccctcacttctcaaaactcccaactaccactaccagtccaatcaagaaatgctccactacatctcctcttcccctctccgtccccgattcctcctcctcccgagcccaccctccaatcttcgcttcctcaccatgagcgcctccccctcgagctcctcgtcccgttcggtgcgcggtgcggcggtgtcggtgccttccctcggcgccgacgaggcctgcgcagtggcagatgaagccttccggaggtacacgtcgccgagcttattgaggagaggcggcgtcggggtggccgtcgtgtggttcaggaacgacctccgagttatcgataacgaggcgcttctgcgagcatgggcggcttccgaggcggtcctgccggtgtactgtgtcgatccgcgggtctttgcggggagcacgcattactttgggttccccaagaagggagtctgagaaaggaatgcatttcataggaggagagagcgcagctcttggtagggtacatgagtacttctggaagaaggatcagctgaaagattacaaggtgaccaggaacggcatgttaggtccagactactccacaaagttctctccttggcttgcttctggcagcctttcgccgcgttatatttgcgaagaggtgaagagatatgagaagcaaagagtggcaaatgattcaacatattgggttttatttgagttgatatggagagactacttcagatttctatcagcaaaatatggaaacgccatatttcacctgggaggcccgaggaaagtagtatcgaagtggagtcaggaccaagcactgtttgaatcatggagagatggtcgaactggataccctcttattgatgccaacatgagggagctttcagccaccggttacatgtccaaccgtggtcgtcagattgtctgctcatttcttgttcgagatatgggtgttgattggcgaatgggagccgaatggttcgagacatgcttattggattatgacccagcttcgaattatggcaattggacatatggagcaggagttggcaatgatccacgagaagatcgatacttcagtatcccaaaacaagccaagtcatatgatcctgaaggggaatacgttgcatactggttaccagaacttcggtcacttgcaaaggaaaggagaaatttcccaggagcctcatacatcaggcaggtagtaccactgaagtttgatggtggaaatcagaggaaggatcagcaattcaaccggcagagaagaccaaacaacgtgtacataagacaagtaaaataggaggctcttgattcacttgaaattgaaccatctatcagtaggagatgaagcaaatttttacacaactgattgtggtgtaaacatacgcgaattactctatggtcttatgcaatgttcattgatgcattcagataca

SEQ ID NO: 83489 - DNA, 1185 bp, Zea Mays
accccctcacttctcaaaactcccaactaccactaccagtccaatcaagaaatgctccactacatctcctcttcccctctccgtccccgattcctcctcctcccgagcccaccctccaatcttcgcttcctcaccatgagcgcctccccctcgagctcctcgtcccgttcggtgcgcggtgcggcggtgtcggtgccttccctcggcgccgacgaggcctgcgcagtggcagatgaagccttccggaggtacacgtcgccgagcttattgaggagaggcggcgtcggggtggccgtcgtgtggttcaggaacgacctccgagttatcgataacgaggcgcttctgcgagcatgggcggcttccgaggcggtcctgccggtgtactgtgtcgatccgcgggtctttgcggggagcacgcattactttgggttccccaagaagggagggttttatttgagttgatatggagagactacttcagatttctatcagcaaaatatggaaacgccatatttcacctgggaggcccgaggaaagtagtatcgaagtggagtcaggaccaagcactgtttgaatcatggagagatggtcgaactggataccctcttattgatgccaacatgagggagctttcagccaccggttacatgtccaaccgtggtcgtcagattgtctgctcatttcttgttcgagatatgggtgttgattggcgaatgggagccgaatggttcgagacatgcttattggattatgacccagcttcgaattatggcaattggacatatggagcaggagttggcaatgatccacgagaagatcgatacttcagtatcccaaaacaagccaagtcatatgatcctgaaggggaatacgttgcatactggttaccagaacttcggtcacttgcaaaggaaaggagaaatttcccaggagcctcatacatcaggcaggtagtaccactgaagtttgatggtggaaatcagaggaaggatcagcaattcaaccggcagagaagaccaaacaacgtgtacataagacaagtaaaataggaggctcttgattcacttgaaattgaaccatctatcagtaggagatgaagcaaatttttacacaactgattgtggtgtaaacatacgcgaattactctatggtcttatgcaatgttcattgatgcattcagataca

SEQ ID NO: 83490 - DNA, 1108 bp, Zea Mays
accccctcacttctcaaaactcccaactaccactaccagtccaatcaagaaatgctccactacatctcctcttcccctctccgtccccgattcctcctcctcccgagcccaccctccaatcttcgcttcctcaccatgagcgcctccccctcgagctcctcgtcccgttcggtgcgcggtgcggcggtgtcggtgccttccctcggcgccgacgaggcctgcgcagtggcagatgaagccttccggaggtacacgtcgccgagcttattgaggagaggcggcgtcggggtggccgtcgtgtggttcaggaacgacctccgagttatcgataacgaggcgcttctgcgagcatgggcggcttccgaggcggtcctgccggtgtactgtgtcgatccgcgggtctttgcggggagcacgcattactttgggttccccaagaagggaggaggcccgaggaaagtagtatcgaagtggagtcaggaccaagcactgtttgaatcatggagagatggtcgaactggataccctcttattgatgccaacatgagggagctttcagccaccggttacatgtccaaccgtggtcgtcagattgtctgctcatttcttgttcgagatatgggtgttgattggcgaatgggagccgaatggttcgagacatgcttattggattatgacccagcttcgaattatggcaattggacatatggagcaggagttggcaatgatccacgagaagatcgatacttcagtatcccaaaacaagccaagtcatatgatcctgaaggggaatacgttgcatactggttaccagaacttcggtcacttgcaaaggaaaggagaaatttcccaggagcctcatacatcaggcaggtagtaccactgaagtttgatggtggaaatcagaggaaggatcagcaattcaaccggcagagaagaccaaacaacgtgtacataagacaagtaaaataggaggctcttgattcacttgaaattgaaccatctatcagtaggagatgaagcaaatttttacacaactgattgtggtgtaaacatacgcgaattactctatggtcttatgcaatgttcattgatgcattcagataca

SEQ ID NO: 83491 - DNA, 1994 bp, Zea Mays
gcctgctttggacattgtagatcacctacctcgacacattttctggattgtcgaacaacttgcgaagctttggatagagtggtgctcgtccaatgttagtagcttgccatcacaatttccggaacagatcgtgactgggtggcgtactagctagcgcatcgcaatacgtactagaaccaccaccgaatatcactgggggtgggtggactgctcggttgttgtagaattgtagggacaaatcttgggggaaaaaacattgcctgaaagttcttcaggccctggtgtagcagctgaattacccagtttaatggcgaagaacgagctttagatggtctaaagatggagatgagatagaagcaccacaaagtgtacagtggggtagcaaggatatgactgtcatgatgcctcagcgccaccgggctacagccaagaagcccatgtggataatcgtgctcttgtgcatggtttgcatcgtgctgattggggcttacgtcttcccaccgcggcgcttctctaactgctacctctctgcttcaagtgtatgcgcacctttcaaggattggctcccttctatgggccgtcgggagagaactgacgaggagattatttcatctgtagttattagggatatcctttcaatgcccatgcctatgccaaaaaatccaaagattgcccttatgttcttgacaccaggttcattgccctttgagaaattgtgggagaagtttttacagggacatgagggaagatactccatctatgtgcacgcatcacgtgaaaagcctgttcatactagttctttgtttgctggccgggatattcacagtgatgcggtagtatggggattgatttcaatggttgatgctgagaaaagattgttagcgaatgcactggaagatgttgataatcaagtttttatcttgctttctgacagttgtgttccactgcattcatttgattatgtgtataattacctcatgggaacgaatgttagcttcattgattggatccaggtccacatggcagtggaaggtactctattgagatgtatcctgaaatagacgagagggattttagaaagggtgcccagtggtttgcagttacaaggagacatgctttaatgattctggctgacagcttgtactacaagaagttcaagctatactgcaagccagcagaagggcgcaactgtattgcagatgagcattatttgccaaccctgttcaatatggtagatcctggtgggatctctaattggtctgttacacatgtggattggtctgagggaaaatggcatccaaggtcatatagcgctgatgatgtcacctatgatctcttgaagaacattacagcagttgatgagaacttccatgtaacaagtgatgacaagaaacttgtgatgcagaagccgtgtttgtggaatggatcaaagagaccgtgctatcttttcgctaggaagtttaatcctgaagcacttgacaacctactgaagcaatttaccagttacacatctgtttgagtcctaccggattctttgccttgtgctgtcaaatccgacaagcttttttctcttcctgtttatatgtaaattgtgaagtccgtacttattaggatctgggcctgaagataccggtacaactgcaacagctgtgatggcttggagctgagtcatgggtaaaacggccacagcgatgtttatagaatggcactgccctcatagtaatttatcgtgttcaatgtatgtctccatagtcttccacccaactcccaactcattagttctttattcttggagaacagtttttgtcagagtgttatactgtcatgatatgatccattctttgtagacacagagattacaacagatgtatcacaaatgcagtcttaattttgtcactattaaatcttttatcatgcgttctactgaattaggtgttagcatttcttaaatttcactgtgatcaattttcagcaaagtaagcgtatttgagctg

SEQ ID NO: 83492 - DNA, 2016 bp, Zea Mays
agcttccacctctgacccaaacccaaccccattcagcagaacatccagttatagcttaattaatccttttctttataccgactccctcgtggcctcgtcgcctcagctccaccaccaccacctccacccgcgcctccaaaatccaaatccgatcgatctccgcggcctccagatcccccggcgggcggagacggcgagctccaggcggccaagaagcccccccctcgcagcgctcctctcctctgcctctccgaatcccttaccagggggaaaaaacattgcctgaaagttcttcaggccctggtgtagcagctgaattacccagtttaatggcgaagaacgagctttagatggtctaaagatggagatgagatagaagcaccacaaagtgtacagtggggtagcaaggatatgactgtcatgatgcctcagcgccaccgggctacagccaagaagcccatgtggataatcgtgctcttgtgcatggtttgcatcgtgctgattggggcttacgtcttcccaccgcggcgcttctctaactgctacctctctgcttcaagtgtatgcgcacctttcaaggattggctcccttctatgggccgtcgggagagaactgacgaggagattatttcatctgtagttattagggatatcctttcaatgcccatgcctatgccaaaaaatccaaagattgcccttatgttcttgacaccaggttcattgccctttgagaaattgtgggagaagtttttacagggacatgagggaagatactccatctatgtgcacgcatcacgtgaaaagcctgttcatactagttctttgtttgctggccgggatattcacagtgatgcggtagtatggggattgatttcaatggttgatgctgagaaaagattgttagcgaatgcactggaagatgttgataatcaagtttttatcttgctttctgacagttgtgttccactgcattcatttgattatgtgtataattacctcatgggaacgaatgttagcttcattgattggatccaggtccacatggcagtggaaggtactctattgagatgtatcctgaaatagacgagagggattttagaaagggtgcccagtggtttgcagttacaaggagacatgctttaatgattctggctgacagcttgtactacaagaagttcaagctatactgcaagccagcagaagggcgcaactgtattgcagatgagcattatttgccaaccctgttcaatatggtagatcctggtgggatctctaattggtctgttacacatgtggattggtctgagggaaaatggcatccaaggtcatatagcgctgatgatgtcacctatgatctcttgaagaacattacagcagttgatgagaacttccatgtaacaagtgatgacaagaaacttgtgatgcagaagccgtgtttgtggaatggatcaaagagaccgtgctatcttttcgctaggaagtttaatcctgaagcacttgacaacctactgaagcaatttaccagttacacatctgtttgagtcctaccggattctttgccttgtgctgtcaaatccgacaagcttttttctcttcctgtttatatgtaaattgtgaagtccgtacttattaggatctgggcctgaagataccggtacaactgcaacagctgtgatggcttggagctgagtcatgggtaaaacggccacagcgatgtttatagaatggcactgccctcatagtaatttatcgtgttcaatgtatgtctccatagtcttccacccaactcccaactcattagttctttattcttggagaacagtttttgtcagagtgttatactgtcatgatatgatccattctttgtagacacagagattacaacagatgtatcacaaatgcagtcttaattttgtcactattaaatcttttatcatgcgttctactgaattaggtgttagcatttcttaaatttcactgtgatcaattttcagcaaagtaagcgtatttgagctg

SEQ ID NO: 83493 - DNA, 2593 bp, Zea Mays
agcttccacctctgacccaaacccaaccccattcagcagaacatccagttatagcttaattaatccttttctttataccgactccctcgtggcctcgtcgcctcagctccaccaccaccacctccacccgcgcctccaaaatccaaatccgatcgatctccgcggcctccagatcccccggcgggcggagacggcgagctccaggcggccaagaagcccccccctcgcagcgctcctctcctctgcctctccgaatcccttaccagggggaaaaaacattgcctgaaagttcttcaggccctggtgtagcagctgaattacccagtttaatggcgaagaacgagctttagatggtctaaagatggagatgagatagaagcaccacaaagtgtacagtggggtagcaaggatatgactgtcatgatgcctcagcgccaccgggctacagccaagaagcccatgtggataatcgtgctcttgtgcatggtttgcatcgtgctgattggggcttacgtcttcccaccgcggcgcttctctaactgctacctctctgcttcaagtgtatgcgcacctttcaaggattggctcccttctatgggccgtcgggagagaactgacgaggagattatttcatctgtagttattagggatatcctttcaatgcccatgcctatgccaaaaaatccaaagattgcccttatgttcttgacaccaggttcattgccctttgagaaattgtgggagaagtttttacagggacatgagggaagatactccatctatgtgcacgcatcacgtgaaaagcctgttcatactagttctttgtttgctggccgggatattcacagtgatgcggtagtatggggattgatttcaatggttgatgctgagaaaagattgttagcgaatgcactggaagatgttgataatcaagtttttatcttgctttctgacagttgtgttccactgcattcatttgattatgtgtataattacctcatgggaacgaatgttagcttcattgattgtttcaaggatccaggtccacatggcagtggaaggtactctattgagatgtatcctgaaatagacgagagggattttagaaagggtgcccagtggtttgcagttacaaggagacatgctttaatgattctggctgacagcttgtactacaagaagttcaagctatactgcaaggtatgctgcggaattattatctttagttaataatagaacaaaactagataccaagtatcttaacagggaacatgcatagaatacagcaatgacttaatttagatgtttgctcaaatatttgtttagatgtttgttacttcgtttgctcaaatatttgtttagatgtttgttacttcgtttgctgtagtatagtcttgttgtagtggaacttcagtgcagttatgctaaaaaaagcttcagtggagaaatttgataagacctctaaaaccttgcttggctatgatagtaacataaaaaacacaattcaaaatgtgaaatggacctcaaccactccatagtccatacaataacaacgcctcagaatctaagtttgaagaaccgaagaaatagttgaatacatactgggtcatcgataaatatgtgaagctaaagaggggcccatacattcaagtcagcgcttctcaagtctgaaccgatggccatgatttttcacttttccagttttcacttatgtttttctagtaagctcatttgttgttaagggaattatctttctcccgtgatctacagccagcagaagggcgcaactgtattgcagatgagcattatttgccaaccctgttcaatatggtagatcctggtgggatctctaattggtctgttacacatgtggattggtctgagggaaaatggcatccaaggtcatatagcgctgatgatgtcacctatgatctcttgaagaacattacagcagttgatgagaacttccatgtaacaagtgatgacaagaaacttgtgatgcagaagccgtgtttgtggaatggatcaaagagaccgtgctatcttttcgctaggaagtttaatcctgaagcacttgacaacctactgaagcaatttaccagttacacatctgtttgagtcctaccggattctttgccttgtgctgtcaaatccgacaagcttttttctcttcctgtttatatgtaaattgtgaagtccgtacttattaggatctgggcctgaagataccggtacaactgcaacagctgtgatggcttggagctgagtcatgggtaaaacggccacagcgatgtttatagaatggcactgccctcatagtaatttatcgtgttcaatgtatgtctccatagtcttccacccaactcccaactcattagttctttattcttggagaacagtttttgtcagagtgttatactgtcatgatatgatccattctttgtagacacagagattacaacagatgtatcacaaatgcagtcttaattttgtcactattaaatcttttatcatgcgttctactgaattaggtgttagcatttcttaaatttcactgtgatcaattttcagcaaagtaagcgtatttgagctg

SEQ ID NO: 83494 - DNA, 1836 bp, Zea Mays
cgcactcgactcgcttctacccagcccatgcatgtactttttctaccaacggtacagcaagctgagtatttacgcaaagggggaaaaaacattgcctgaaagttcttcaggccctggtgtagcagctgaattacccagtttaatggcgaagaacgagctttagatggtctaaagatggagatgagatagaagcaccacaaagtgtacagtggggtagcaaggatatgactgtcatgatgcctcagcgccaccgggctacagccaagaagcccatgtggataatcgtgctcttgtgcatggtttgcatcgtgctgattggggcttacgtcttcccaccgcggcgcttctctaactgctacctctctgcttcaagtgtatgcgcacctttcaaggattggctcccttctatgggccgtcgggagagaactgacgaggagattatttcatctgtagttattagggatatcctttcaatgcccatgcctatgccaaaaaatccaaagattgcccttatgttcttgacaccaggttcattgccctttgagaaattgtgggagaagtttttacagggacatgagggaagatactccatctatgtgcacgcatcacgtgaaaagcctgttcatactagttctttgtttgctggccgggatattcacagtgatgcggtagtatggggattgatttcaatggttgatgctgagaaaagattgttagcgaatgcactggaagatgttgataatcaagtttttatcttgctttctgacagttgtgttccactgcattcatttgattatgtgtataattacctcatgggaacgaatgttagcttcattgattgtttcaaggatccaggtccacatggcagtggaaggtactctattgagatgtatcctgaaatagacgagagggattttagaaagggtgcccagtggtttgcagttacaaggagacatgctttaatgattctggctgacagcttgtactacaagaagttcaagctatactgcaagccagcagaagggcgcaactgtattgcagatgagcattatttgccaaccctgttcaatatggtagatcctggtgggatctctaattggtctgttacacatgtggattggtctgagggaaaatggcatccaaggtcatatagcgctgatgatgtcacctatgatctcttgaagaacattacagcagttgatgagaacttccatgtaacaagtgatgacaagaaacttgtgatgcagaagccgtgtttgtggaatggatcaaagagaccgtgctatcttttcgctaggaagtttaatcctgaagcacttgacaacctactgaagcaatttaccagttacacatctgtttgagtcctaccggattctttgccttgtgctgtcaaatccgacaagcttttttctcttcctgtttatatgtaaattgtgaagtccgtacttattaggatctgggcctgaagataccggtacaactgcaacagctgtgatggcttggagctgagtcatgggtaaaacggccacagcgatgtttatagaatggcactgccctcatagtaatttatcgtgttcaatgtatgtctccatagtcttccacccaactcccaactcattagttctttattcttggagaacagtttttgtcagagtgttatactgtcatgatatgatccattctttgtagacacagagattacaacagatgtatcacaaatgcagtcttaattttgtcactattaaatcttttatcatgcgttctactgaattaggtgttagcatttcttaaatttcactgtgatcaattttcagcaaagtaagcgtatttgagctg

SEQ ID NO: 83495 - DNA, 1564 bp, Zea Mays
cacggcccaccggacgcgggaccctcatgtcggcgggcacgcacgtgcccccgcatcggcgtcgttgcctcgccaaggccgacgcggatccgagtcatcccgcgtcaccatccatttgacgaggcggtttatcccccagcaccccaaccaacctttccacgtaccaccgggtttctgtccgcgccccgcccttcaaaagcaggtccgcacgccggccggcgagacgagacgacaccaccacgccgggacgggaggcacaggtgcggtctgcgtcgagagttggtccactggcaggccggaatgaagaagtgcgcgtcggagctggagctggagggagcggcgtcttctcacccggcttcggtttcgccgactcggacaccatggatggaggcagttggtggtacgggaacgtccgcacgccgaacccagtcatgtcgcaggcggcgtccatatccgctagccccgggctaaccacctcagccaatcatgctcttgaaagcgagtcagactccgacagcgaatcactgtatgaggtagagggagttccatacgagcgaggtaacagatccattgagacgaagcgaataagaaggatggtgtccaatagggagtctgcgcggcggtctaggaggaggaaacaggcacagttgtctgaccttgagtcacaggttgaacgactcaaaggtgaaaacgcaacactgttccagcaactttcagatgccaaccaacagttcagtactgcagtcacagacaacagaatcctcaaatccgatgtagaagcgttaagaattaaggtaaagatggcagaggatatggtagcgagaagtgctgtatcgtgtggcctaggcgaccttggcctggcaccatacgtgaactcaaggaagatgtgccaagctttgaatgtgctcacagggttggatttactagggagtgatgcgttcaggggtccaaccgcaggtacacgagtacagaactcaccagtacagagcactgcaagcctagagagtctggataaccgaaagtccaacgaggtgaccagttgcgcggcggacatttggccttgagcttcaagccattgatctgattcaaagcttgctccaccctcaaaaaaaggaccagagtttgtcaactcaaatagctggtggcttgagcagagcttctggcacgagttctcttgaaccatatttccacataagctttataggatgcatcactcttttgatgtcacttagtttcaagtataaaatgaagctgtctttgtacaaagctgcaaatgagaagtaaatgaaacgtcctggacaaacttgtgaagtaggaatgatacataggctctatttccaggtcagatgagacagttatgtttacaacaaaaagcaatacatgttgtttagaaaccgctattaattcacaggaatgttcaatccagtacaagtcatctagtagatttgcacccctaccttctagtagattcaaccatgttttcactactacttgctgggactacaactgtacatcatgatggtaaaatgcataactagtgaggttcttgactcgaaaccttcag

SEQ ID NO: 83496 - DNA, 1412 bp, Zea Mays
tagatgcctctagatggtgaattggtgatgtatatgtaaggaaggtgcacattggctgccaggattacaatgctaagctttcagactttggtctcgcaagaacaggtcctagtggagaccaaacccatgtgtcaactcgggtcatgggaacttatggatacgcagctccagaatatgtcatgactggccatctgacggcacgaagtgatgtttatggcttcggagtggtgcttctagagatgattatcggaagaagggctgtggacaagagccggccaagccgtgagcataacctagttgactgggcacggcccctcctcgtccataacaggaagctgttccgaataatcgatccgagaatggaagggcaatactccaccaaggctgccactgaggtggcaagccttgcataccgctgcctgagccagaaccccaagggacgaccaaccatgagccaagtcgtcgagacctttgaggccgtgcagaacatgcctgaatgccaagacatactcctccagaacagcatcacaggtgccgtgacgctctatgaggtccccaaggagcctgcagacagagttgagctggagaaggccaagcaggaaccggcagtaaagagcgccgcgatgccgcccatgaacggaaagccagtcccccagagcaggcggacgcggcctgggaatggccggagcaagagcgagccatcgttggagtgcaagatgtacatcccgtcaccggactctgatggacaccagctcggcctggaggcagtcgcatccccagatggaagcataagggaccctcctgatgaggatttgtacaagatataacaccagggcagtttttcttcaacaacgaggggcagatctggcgcagtgttgagttgtgggttttcaaaccagcctcttcgcatttagggaggaagatttgcatctgtttatctctttctcatacctcatttacgtgggagcctcgatctgcctttttaacgtgagcccgcgttgctcacctttggcgccgccactcccgttcttaaagatcaatcagctgtaattttttctctgatggccactggccacggtagcgttcatattcttccgattagcaattgtatgtagaggagagttgtgatggaaagcatgtgtgtgtttgccatgacgacgctgtaaaaacctgaaacacttatttctaggggggtttccactccaaaatggaagtggagagatgtgtcctgataattggtgccgttacccgtgtgttgagtttttacccccctccacaatccccttctttcaaacaaggctggtttggatccatgggcaatcaccatgccctgaagaacgttgcaatctggaacagttctgcgggaaatcaacaccaccatggaaattgatactccaaacctgatgtgatga

SEQ ID NO: 83497 - DNA, 2467 bp, Zea Mays
gcccccgcggcccgcgttgttgttcttgtagtacgcggcagcagctttcttttacctattccaaccctctgggctctggcacacagctactccgcctcctcgcccttttctcctcatccctcgctttcgcttcgccgttccaacgcggagcccccacggaaaataaaggccaagaagtgatggtagtggagtaaaaccacgcgttggagggcagagggacaggttggtggaggacgcgcacccagcgtggagagcagcaggagctacgcgaattcgggccgcgagtgcgccggttcaggttgccgccgccggtggaattgtggcagacgaggtggcctgttggtagccgcgggagtttgcgagtaggtcggttccggttggtgtgcgagcgaaggtgctgttggaggcgtggatctggccggcggcgggcgatgggaaggagggactagggctcgattggagggaaaggcgcgatcttggaggttcccatgggcggatgcctctcgcaggaggagcaccggctccagagcaggccagctgaagctgctggagcagatggattgcggaagtctaaatctgattctaaagctgtagcaagtgttcttgctcctccaaaagatgtggtggacctgcaagtagaaggatatggaaatgtgaatattttcacatatgacgaattaagagcagccacaaaaaacttccggccagatcaaattcttggagagggtggatttggagttgtttacaaaggtgtaattgatgaaaatgttagagcaggtttcccatcgagacaggttgctgtgaaagaactaaacccagagggctttcaaggggacaaggagtggcttaagtcaactatcttgggcaacttagtcatccaaatcttgttgaattgattggctattgctgtgagggttcacatagactgcttgtctatgagtacatggcttgtggaagcctcgaaaagcacctttttcgccgggtttgccttaatatgccatggtcaacacgcatgaagattgcattgggtgctgcaagggggctcgagtaccttcacggagctgagagatccatcatttatcgagatttcaagacatcaaacatcttgctagatgcggattacaatgctaagctttcagactttggtctcgcaagaacaggtcctagtggagaccaaacccatgtgtcaactcgggtcatgggaacttatggatacgcagctccagaatatgtcatgactggccatctgacggcacgaagtgatgtttatggcttcggagtggtgcttctagagatgattatcggaagaagggctgtggacaagagccggccaagccgtgagcataacctagttgactgggcacggcccctcctcgtccataacaggaagctgttccgaataatcgatccgagaatggaagggcaatactccaccaaggctgccactgaggtggcaagccttgcataccgctgcctgagccagaaccccaagggacgaccaaccatgagccaagtcgtcgagacctttgaggccgtgcagaacatgcctgaatgccaagacatactcctccagaacagcatcacaggtgccgtgacgctctatgaggtccccaaggagcctgcagacagagttgagctggagaaggccaagcaggaaccggcagtaaagagcgccgcgatgccgcccatgaacggaaagccagtcccccagagcaggcggacgcggcctgggaatggccggagcaagagcgagccatcgttggagtgcaagatgtacatcccgtcaccggactctgatggacaccagctcggcctggaggcagtcgcatccccagatggaagcataagggaccctcctgatgaggatttgtacaagatataacaccagggcagtttttcttcaacaacgaggggcagatctggcgcagtgttgagttgtgggttttcaaaccagcctcttcgcatttagggaggaagatttgcatctgtttatctctttctcatacctcatttacgtgggagcctcgatctgcctttttaacgtgagcccgcgttgctcacctttggcgccgccactcccgttcttaaagatcaatcagctgtaattttttctctgatggccactggccacggtagcgttcatattcttccgattagcaattgtatgtagaggagagttgtgatggaaagcatgtgtgtgtttgccatgacgacgctgtaaaaacctgaaacacttatttctaggggggtttccactccaaaatggaagtggagagatgtgtcctgataattggtgccgttacccgtgtgttgagtttttacccccctccacaatccccttctttcaaacaaggctggtttggatccatgggcaatcaccatgccctgaagaacgttgcaatctggaacagttctgcgggaaatcaacaccaccatggaaattgatactccaaacctgatgtgatga

SEQ ID NO: 83498 - DNA, 2238 bp, Zea Mays
cgggccccttgtttcgcgaccgccgcctgcctcgcatcctcctccctggagctggccgtcgtgggtgccctgggttaggtccaacaactagcagacaaccgaccgaacctaccagcccgcagctgcaagcgatgctcgatccattgctagaggctagagcttagccccagtttaccggcatgtatgtctagttgtgtcctcgccgatgctttgtccagcttgatcggtttgtgtttttgttctttatgtagtatggggctgactccacaagggaaccgtcttgcttgcaagtctgaagctcaagctgaagctgctggagcagatggattgcggaagtctaaatctgattctaaagctgtagcaagtgttcttgctcctccaaaagatgtggtggacctgcaagtagaaggatatggaaatgtgaatattttcacatatgacgaattaagagcagccacaaaaaacttccggccagatcaaattcttggagagggtggatttggagttgtttacaaaggtgtaattgatgaaaatgttagagcaggtttcccatcgagacaggttgctgtgaaagaactaaacccagagggctttcaaggggacaaggagtggcttgcagaagtcaactatcttgggcaacttagtcatccaaatcttgttgaattgattggctattgctgtgagggttcacatagactgcttgtctatgagtacatggcttgtggaagcctcgaaaagcacctttttcgccgggtttgccttaatatgccatggtcaacacgcatgaagattgcattgggtgctgcaagggggctcgagtaccttcacggagctgagagatccatcatttatcgagatttcaagacatcaaacatcttgctagatgcggattacaatgctaagctttcagactttggtctcgcaagaacaggtcctagtggagaccaaacccatgtgtcaactcgggtcatgggaacttatggatacgcagctccagaatatgtcatgactggccatctgacggcacgaagtgatgtttatggcttcggagtggtgcttctagagatgattatcggaagaagggctgtggacaagagccggccaagccgtgagcataacctagttgactgggcacggcccctcctcgtccataacaggaagctgttccgaataatcgatccgagaatggaagggcaatactccaccaaggctgccactgaggtggcaagccttgcataccgctgcctgagccagaaccccaagggacgaccaaccatgagccaagtcgtcgagacctttgaggccgtgcagaacatgcctgaatgccaagacatactcctccagaacagcatcacaggtgccgtgacgctctatgaggtccccaaggagcctgcagacagagttgagctggagaaggccaagcaggaaccggcagtaaagagcgccgcgatgccgcccatgaacggaaagccagtcccccagagcaggcggacgcggcctgggaatggccggagcaagagcgagccatcgttggagtgcaagatgtacatcccgtcaccggactctgatggacaccagctcggcctggaggcagtcgcatccccagatggaagcataagggaccctcctgatgaggatttgtacaagatataacaccagggcagtttttcttcaacaacgaggggcagatctggcgcagtgttgagttgtgggttttcaaaccagcctcttcgcatttagggaggaagatttgcatctgtttatctctttctcatacctcatttacgtgggagcctcgatctgcctttttaacgtgagcccgcgttgctcacctttggcgccgccactcccgttcttaaagatcaatcagctgtaattttttctctgatggccactggccacggtagcgttcatattcttccgattagcaattgtatgtagaggagagttgtgatggaaagcatgtgtgtgtttgccatgacgacgctgtaaaaacctgaaacacttatttctaggggggtttccactccaaaatggaagtggagagatgtgtcctgataattggtgccgttacccgtgtgttgagtttttacccccctccacaatccccttctttcaaacaaggctggtttggatccatgggcaatcaccatgccctgaagaacgttgcaatctggaacagttctgcgggaaatcaacaccaccatggaaattgatactccaaacctgatgtgatga

SEQ ID NO: 83499 - DNA, 1153 bp, Zea Mays
cttgtagtacgcggcagcagctttcttttacctattccaaccctctgggctctggcacacagctactccgcctcctcgcccttttctcctcatccctcgctttcgcttcgccgttccaacgcggagcccccacggaaaataaaggccaagaagtgatggtagtggagtaaaaccacgcgttggagggcagagggacaggttggtggaggacgcgcacccagcgtggagagcagcaggagctacgcgaattcgggccgcgagtgcgccggttcaggttgccgccgccggtggaattgtggcagacgaggtggcctgttggtagccgcgggagtttgcgagtaggtcggttccggttggtgtgcgagcgaaggtgctgttggaggcgtggatctggccggcggcgggcgatgggaaggagggactagggctcgattggagggaaaggcgcgatcttggaggttcccatgggcggatgcctctcgcaggaggagcaccggctccagagcaggccagctgaagctgctggagcagatggattgcggaagtctaaatctgattctaaagctgtagcaagtgttcttgctcctccaaaagatgtggtggacctgcaagtagaaggatatggaaatgtgaatattttcacatatgacgaattaagagcagccacaaaaaacttccggccagatcaaattcttggagagggtggatttggagttgtttacaaaggtgtaattgatgaaaatgttagagcaggtttcccatcgagacaggttgctgtgaaagaactaaacccagagggctttcaaggggacaaggagtggcttgcagaagtcaactatcttgggcaacttagtcatccaaatcttgttgaattgattggctattgctgtgagggttcacatagactgcttgtctatgagtacatggcttgtggaagcctcgaaaagcacctttttcgccgggtttgccttaatatgccatggtcaacacgcatgaagattgcattgggtgctgcaagggggctcgagtaccttcacggagctgagagatccatcatttatcgagatttcaagacatcaaacatcttgctagatgcggaaggggactgtggtggtggttggtctgagggaggacagtgagggaagtgaaagga

SEQ ID NO: 83500 - DNA, 1594 bp, Zea Mays
cagatggatgcaatgcaaccttttccggtttcctctcctatatgcattcgccgaccaagtgaccaacacgcgccatccattccaacctggggctgaaccgccgaactatgccgttgtcgtctttctccttcctccgccaccacctgccgctccctcttcagctcccgccaacttcaaatcgtcagccaccacacccccgcctcttccacctcctcctccctccgttcacaccgcgccgcaccttcgtctgccagccgctcaccgcggccacggacgatatggctgctgcggccgcggcggcgtcgccccccacactgctcgagcacatgggccaggcgggcacggccgctgacctcactgtccttgtggcccatatccagagcgcgtgcaagcgcatcgcggctctcgtggcgtcccccggcaacgccgagctgtcgcgggccaaggcgaggggtggggctatggcggcagggcgtgacgcgcctaagccgctcgacgaattgtcgaatgatatcatcttgtcagcgctccaaagttctggaaaggttgcagcgctagcatctgaagaaaacgatctgcccatttggatatctgatggcggtccatatgttgttgttactgatccgcttgatggttctcgcaacattgaggtctccatacctaccggaacaatatttgggatctacaataggctggtggaggtcgaccatctccctttggaggagagagctcagctcaactcactgcaaagtggaactcgccttgttgctgctggatatgtcctgtactcatctgccaccatcttgtgtatcagctttggtgcaggtacccatgccttcacattggattggtcgactggagaattcatccttacacatccttccatccaaataccacctagagggcagatatattcagtgaacgacgctaggtattttgactggcccgagggcttaaggaagtacattgacacaatcagacaaggcaaaggacagcatccgaagaagtactcagctcgctacgtgtgctcactggtggctgatttccaccggacgctcatatatggcggggtcgctatgaacccaagggaccatctgcggctggtttatgaggcgaaccctctcagtttccttgctgaacaggctgggggtagagggtcagatggcaagaacagaatcctcaccattcagcctgtgaagttgcaccagaggctgcctttgttcttaggaagcatggatgacatgcttgagttggaaagctacggagatgtgcagcagaaggtcaatcctggatatgaagtttaacgatatgtaaaaaaaggttcagattttttcaagcgcccaagcagaaaataaggatccaccgaagacagtctactccaacgaataatgtaaaataggtacacagaaccgtagattacaatgtttaatattatttgtagaataaagtttgatataagatatctgctagagatagtctaagggtcaaaggatggtaatggtactacaaactcgaatgccctattgttttttctcctcagttttgcaaaacagggctcggagtatggatggtagcatgctggtctacaatcttt

SEQ ID NO: 83501 - DNA, 1642 bp, Zea Mays
cagatggatgcaatgcaaccttttccggtttcctctcctatatgcattcgccgaccaagtgaccaacacgcgccatccattccaacctggggctgaaccgccgaactatgccgttgtcgtctttctccttcctccgccaccacctgccgctccctcttcagctcccgccaacttcaaatcgtcagccaccacacccccgcctcttccacctcctcctccctccgttcacaccgcgccgcaccttcgtctgccagccgctcaccgcggccacggacgatatggctgctgcggccgcggcggcgtcgccccccacactgctcgagcacatgggccaggcgggcacggccgctgacctcactgtccttgtggcccatatccagagcgcgtgcaagcgcatcgcggctctcgtggcgtcccccggcaacgccgagctgtcgcgggccaaggcgaggggtggggctatggcggcagggcgtgacgcgcctaagccgctcgacgaattgtcgaactgtgttaagcatcctttctgtttgcttggattcagaatgatatcatcttgtcagcgctccaaagttctggaaaggttgcagcgctagcatctgaagaaaacgatctgcccatttggatatctgatggcggtccatatgttgttgttactgatccgcttgatggttctcgcaacattgaggtctccatacctaccggaacaatatttgggatctacaataggctggtggaggtcgaccatctccctttggaggagagagctcagctcaactcactgcaaagtggaactcgccttgttgctgctggatatgtcctgtactcatctgccaccatcttgtgtatcagctttggtgcaggtacccatgccttcacattggattggtcgactggagaattcatccttacacatccttccatccaaataccacctagagggcagatatattcagtgaacgacgctaggtattttgactggcccgagggcttaaggaagtacattgacacaatcagacaaggcaaaggacagcatccgaagaagtactcagctcgctacgtgtgctcactggtggctgatttccaccggacgctcatatatggcggggtcgctatgaacccaagggaccatctgcggctggtttatgaggcgaaccctctcagtttccttgctgaacaggctgggggtagagggtcagatggcaagaacagaatcctcaccattcagcctgtgaagttgcaccagaggctgcctttgttcttaggaagcatggatgacatgcttgagttggaaagctacggagatgtgcagcagaaggtcaatcctggatatgaagtttaacgatatgtaaaaaaaggttcagattttttcaagcgcccaagcagaaaataaggtaacactcgtgtggcaaccctgtatctgccgatactataccttgtcttttcctctcggtttttagcccaccgcaacttgattgggactaaatccagttgttgttattgttgttcactcttttctgccaaaaattgctgtacttctcagtgaatgtaagttttatgattggcagcttcctcaaccctgcacgcttatatgtgaataatagaaagcttctaaagtctaaggctacaacaacaaaaaaaa

SEQ ID NO: 83502 - DNA, 1394 bp, Zea Mays
cagatggatgcaatgcaaccttttccggtttcctctcctatatgcattcgccgaccaagtgaccaacacgcgccatccattccaacctggggctgaaccgccgaactatgccgttgtcgtctttctccttcctccgccaccacctgccgctccctcttcagctcccgccaacttcaaatcgtcagccaccacacccccgcctcttccacctcctcctccctccgttcacaccgcgccgcaccttcgtctgccagccgctcaccgcggccacggacgatatggctgctgcggccgcggcggcgtcgccccccacactgctcgagcacatgggccaggcgggcacggccgctgacctcactgtccttgtggcccatatccagagcgcgtgcaagcgcatcgcggctctcgtggcgtcccccggcaacgccgagctgtcgcgggccaaggcgaggggtggggctatggcggcagggcgtgacgcgcctaagccgctcgacgaattgtcgaatgatatcatcttgtcagcgctccaaagttctggaaaggttgcagcgctagcatctgaagaaaacgatctgcccatttggatatctgatggcggtccatatgttgttgttactgatccgcttgatggttctcgcaacattgaggtctccatacctaccggaacaatatttgggatctacaataggctggtggaggtcgaccatctccctttggaggagagagctcagctcaactcactgcaaagtggaactcgccttgttgctgctggatatgtcctgtactcatctgccaccatcttgtgtatcagctttggtgcaggtacccatgccttcacattggattggtcgactggagaattcatccttacacatccttccatccaaataccacctagagggcagatatattcagtgaacgacgctaggtattttgactggcccgagggcttaaggaagtacattgacacaatcagacaaggcaaaggacagcatccgaagaagtactcagctcgctacgtgtgctcactggtggctgatttccaccggacgctcatatatggcggggtcgctatgaacccaagggaccatctgcggctggtttatgaggcgaaccctctcagtttccttgctgaacaggctgggggtagagggtcagatggcaagaacagaatcctcaccattcagcctgtgaagttgcaccagaggctgcctttgttcttaggaagcatggatgacatgcttgagttggaaagctacggagatgtgcagcagaaggtcaatcctggatatgaagtttaacgatatgtaaaaaaaggttcagattttttcaagcgcccaagcagaaaataagtcaattcagcacagtagtagcagtgccatcgtgtgttt

SEQ ID NO: 83503 - DNA, 2413 bp, Zea Mays
ataactgattttgcaaggataagtttgtaagccattttttattttgcatcaatcaatataaattctaaagcatgtacgggtagtagacttttgccatttttattttcctgatatcaatacaagatttgtttccacttgcattttttcttcagttgaaagtatgattctatcttcatctttgcacagattgcttgtactgctcaatctgttcctgcctaggcttgtttagtataagagcggccgacttcgcacatatccattgaaacagtgcagtaatgtgaatctaggagatcttttagttctatattaaactttttacttcactgttggaatttactgctaccggacactctataatgattttccccttcattatcttgtcttactattgattacattatgtcaatctgaatagacccttcgcgcactgattgatactacctggctacgtgagatttctattgcttggcaagtctcaaattttttcatgaattaccaattcaggtgttttgactattgttctatgtttgctctgcaaatttgcacatatatagttaatgcatgaagtgtgtcatcagatataccccatccaggttgtggtccataatttttatactattctctttttagagatggcactccacattcatgaaaatggtatagattgtggtccataatgtttatcagcgtctacagtttatagattgcattgctacagttccaaacaaacctttattcagtctatgcaacctgtacattgtcagtttcagtaacctttaaccagttttcattttgtgtattttattcagattgcatacttgacatttttttagtttgtaaaatttattcagtttacagacctcactatattcagtttaagcagatttctacatacaacattttattcagttaagagacttcaccttatgcatcatggtcttatagcttctttatacaacagttattttataactgttgttgttgaccatttagttactataggttgagcttgagtcatgaagctaaaaaacattaggattaaataagccaattatttaaagagaaactctcgaaatatagaccttccaaagtgttttgaagtcagtaccaagtattgatacaagttgcacatgatagagcttattgagaaaatgacttcggaaatagcaaagcaacagctcaatagggaaatcatgtcaactattggcccatgataccttcagaatcatatgaagggagagaaaagatagattattgtgtcactgtgtgaactgtaatattattatcatgcatggttattatgagttgcttcctgttctagaatattattatcctacatggttagctagaataatagtgtggtccaagcttcaattatttcgatatgtgaactgtaattctgaattgttgcattccctattggtctatagtagtggtcagttctgatatggtgtgttctggtgtttatatgcaattacttgttattctgatatggtgtgtatatttcttatttttgtttttatctcttaacctgagaaaatgggttttatcagaatatgtttaagaacaaattagatctttgagagttactatgggttcgactgtttctatctactttgaatttttattgtcaataatagcaactgatataggttagttttgttgtttctatctacttatctatattctcctcttgtttgatttactcttgtataatttaatgaatatttggaactgcattttctagaacaacattttgtcttccgatcagtgaggtcagtcatcctctattgttatatattattgcatgtggtttattaatccatcataattaaatatatttgactagactattttcctaataaagatttaacatgccttgttatgtcatgaattagtaccgcttcattgctgcaacaattaatcagtactgacttttctttctgtattgacaaaacaagcaacaagcaactacaaaattaagactaatgttctgcactaatcaatcatttagcattagtcatatttctatctttagctaggacatgccacttgtgcttttttccttctcttcattgttaaatgtcacctccattctgatgtagcgttccttcaggaaaggggaagatctcagttctatatccaaacaagactaccacccccaagtcagttaaagaccttgaatttgatggtttctccttcactactgaccttcgtgagctgatgcttcagctttgggaagctttgctttggaagcagatcggcctctaattgaggctcctgcctttggcttcaagggatcgcgacgccgacgccaactgccggttggtgccgtggtggcggagggaggactcggatcaggttcacggcagtgctacgtatcaacatgtgcaaacttccaaacgaaaaggag

SEQ ID NO: 83504 - DNA, 1167 bp, Zea Mays
ctacgcctcggccgcgtgccccctggtctccagacatcgtgcgaacaacattttgtcttccgatcagtgaggaaaggggaagatctcagttctatatccaaacaagactaccacccccaagtcagttaaagaccttgaatttgatggtttctccttcactactgaccttcgtgaggtttctccttgactactgaccttgaatctgcaaaactttattttattgaatccattctatggttgttaatttagttttcacattgaaattttgtgtattgttgttttttttttatgtttacatgtgcatagtgtttccctgtacttaaattggttgttctgttaagaagctatatacagatcgtgtttagaaattcattgacaaagtgctatgatccgtgaacttaagtcagctgttctgaaatgtccattcatttaaacgtagcctactaaaaccgaggttcctataaagattcatagtataggttttcgacttcgtcttcatttttaattctgaattgttgcattccccacgggtctagagtagtagttagttctattatggtctatatatatttctgtctattgtacatgttcatttcatggttggatttccagctcatttccgaaaaggtggcttaattgggttgcttctcagtttatcttcagttttaattctcggtttatatacaatatatgtgatgttatttgcaaatactcgagtttaggataataaacaaagattcaaaaaaattctctcacttgttattcccgtccttttagtatgaattttaatatatattcacttcattaccattacaatcctcacaatgcacaaacattgtactcacttagacgttatttttgtgattttcacattgtattgtaaattgatttgtattagtttaattcttcatttgttgttttcagagaatttataagattgtgatcgataatatgtgttacttgtttttatgtaatcattgtgcacgaataatttgtgtgtcgttgcaacgcacagacacttgactagtaccactctatgtatgggtttacactttacgttttcttgtgctatgggccacctagccatttctaggccagttattttctacagttactttgcaaggctgcagtcccattccacacaatttttaatgcagtacagtatag

SEQ ID NO: 83505 - DNA, 1152 bp, Zea Mays
ttcaggctctcctccaggctcaagctacgcctcggccgcgtgccccctggtctccagacatcgtgcgatctcagttctatatccaaacaagactaccacccccaagtcagttaaagaccttgaatttgatggtttctccttcactactgaccttcgtgaggtttctccttgactactgaccttgaatctgcaaaactttattttattgaatccattctatggttgttaatttagttttcacattgaaattttgtgtattgttgttttttttttatgtttacatgtgcatagtgtttccctgtacttaaattggttgttctgttaagaagctatatacagatcgtgtttagaaattcattgacaaagtgctatgatccgtgaacttaagtcagctgttctgaaatgtccattcatttaaacgtagcctactaaaaccgaggttcctataaagattcatagtataggttttcgacttcgtcttcatttttaattctgaattgttgcattccccacgggtctagagtagtagttagttctattatggtctatatatatttctgtctattgtacatgttcatttcatggttggatttccagctcatttccgaaaaggtggcttaattgggttgcttctcagtttatcttcagttttaattctcggtttatatacaatatatgtgatgttatttgcaaatactcgagtttaggataataaacaaagattcaaaaaaattctctcacttgttattcccgtccttttagtatgaattttaatatatattcacttcattaccattacaatcctcacaatgcacaaacattgtactcacttagacgttatttttgtgattttcacattgtattgtaaattgatttgtattagtttaattcttcatttgttgttttcagagaatttataagattgtgatcgataatatgtgttacttgtttttatgtaatcattgtgcacgaataatttgtgtgtcgttgcaacgcacagacacttgactagtaccactctatgtatgggtttacactttacgttttcttgtgctatgggccacctagccatttctaggccagttattttctacagttactttgcaaggctgcagtcccattccacacaatttttaatgcagtacagtatag

SEQ ID NO: 83506 - DNA, 3097 bp, Zea Mays
atccttcaggctctcctccaggctcaagctacgcctcggccgcgtgccccctggtctccagacatcgtgcgattgcttgtactgctcaatctgttcctgcctaggcttgtttagtataagagcggccgacttcgcacatatccattgaaacagtgcagtaatgtgaatctaggagatcttttagttctatattaaactttttacttcactgttggaatttactgctaccggacactctataatgattttccccttcattatcttgtcttactattgattacattatgtcaatctgaatagacccttcgcgcactgattgatactacctggctacgtgagatttctattgcttggcaagtctcaaattttttcatgaattaccaattcaggtgttttgactattgttctatgtttgctctgcaaatttgcacatatatagttaatgcatgaagtgtgtcatcagatataccccatccaggttgtggtccataatttttatactattctctttttagagatggcactccacattcatgaaaatggtatagattgtggtccataatgtttatcagcgtctacagtttatagattgcattgctacagttccaaacaaacctttattcagtctatgcaacctgtacattgtcagtttcagtaacctttaaccagttttcattttgtgtattttattcagattgcatacttgacatttttttagtttgtaaaatttattcagtttacagacctcactatattcagtttaagcagatttctacatacaacattttattcagttaagagacttcaccttatgcatcatggtcttatagcttctttatacaacagttattttataactgttgttgttgaccatttagttactataggttgagcttgagtcatgaagctaaaaaacattaggattaaataagccaattatttaaagagaaactctcgaaatatagaccttccaaagtgttttgaagtcagtaccaagtattgatacaagttgcacatgatagagcttattgagaaaatgacttcggaaatagcaaagcaacagctcaatagggaaatcatgtcaactattggcccatgataccttcagaatcatatgaagggagagaaaagatagattattgtgtcactgtgtgaactgtaatattattatcatgcatggttattatgagttgcttcctgttctagaatattattatcctacatggttagctagaataatagtgtggtccaagcttcaattatttcgatatgtgaactgtaattctgaattgttgcattccctattggtctatagtagtggtcagttctgatatggtgtgttctggtgtttatatgcaattacttgttattctgatatggtgtgtatatttcttatttttgtttttatctcttaacctgagaaaatgggttttatcagaatatgtttaagaacaaattagatctttgagagttactatgggttcgactgtttctatctactttgaatttttattgtcaataatagcaactgatataggttagttttgttgtttctatctacttatctatattctcctcttgtttgatttactcttgtataatttaatgaatatttggaactgcattttctagaacaacattttgtcttccgatcagtgaggtcagtcatcctctattgttatatattattgcatgtggtttattaatccatcataattaaatatatttgactagactattttcctaataaagatttaacatgccttgttatgtcatgaattagtaccgcttcattgctgcaacaattaatcagtactgacttttctttctgtattgacaaaacaagcaacaagcaactacaaaattaagactaatgttctgcactaatcaatcatttagcattagtcatatttctatctttagctaggacatgccacttgtgcttttttccttctcttcattgttaaatgtcacctccattctgatgtagcgttccttcaggaaaggggaagatctcagttctatatccaaacaagactaccacccccaagtcagttaaagaccttgaatttgatggtttctccttcactactgaccttcgtgaggtttctccttgactactgaccttgaatctgcaaaactttattttattgaatccattctatggttgttaatttagttttcacattgaaattttgtgtattgttgttttttttttatgtttacatgtgcatagtgtttccctgtacttaaattggttgttctgttaagaagctatatacagatcgtgtttagaaattcattgacaaagtgctatgatccgtgaacttaagtcagctgttctgaaatgtccattcatttaaacgtagcctactaaaaccgaggttcctataaagattcatagtataggttttcgacttcgtcttcatttttaattctgaattgttgcattccccacgggtctagagtagtagttagttctattatggtctatatatatttctgtctattgtacatgttcatttcatggttggatttccagctcatttccgaaaaggtggcttaattgggttgcttctcagtttatcttcagttttaattctcggtttatatacaatatatgtgatgttatttgcaaatactcgagtttaggataataaacaaagattcaaaaaaattctctcacttgttattcccgtccttttagtatgaattttaatatatattcacttcattaccattacaatcctcacaatgcacaaacattgtactcacttagacgttatttttgtgattttcacattgtattgtaaattgatttgtattagtttaattcttcatttgttgttttcagagaatttataagattgtgatcgataatatgtgttacttgtttttatgtaatcattgtgcacgaataatttgtgtgtcgttgcaacgcacagacacttgactagtaccactctatgtatgggtttacactttacgttttcttgtgctatgggccacctagccatttctaggccagttattttctacagttactttgcaaggctgcagtcccattccacacaatttttaatgcagtacagtatag

SEQ ID NO: 83507 - DNA, 1190 bp, Zea Mays
ttctccggacctcttggacacggatccttcaggctctcctccaggctcaagctacgcctcggccgcgtgccccctggtctccagacatcgtgcggaaaggggaagatctcagttctatatccaaacaagactaccacccccaagtcagttaaagaccttgaatttgatggtttctccttcactactgaccttcgtgaggtttctccttgactactgaccttgaatctgcaaaactttattttattgaatccattctatggttgttaatttagttttcacattgaaattttgtgtattgttgttttttttttatgtttacatgtgcatagtgtttccctgtacttaaattggttgttctgttaagaagctatatacagatcgtgtttagaaattcattgacaaagtgctatgatccgtgaacttaagtcagctgttctgaaatgtccattcatttaaacgtagcctactaaaaccgaggttcctataaagattcatagtataggttttcgacttcgtcttcatttttaattctgaattgttgcattccccacgggtctagagtagtagttagttctattatggtctatatatatttctgtctattgtacatgttcatttcatggttggatttccagctcatttccgaaaaggtggcttaattgggttgcttctcagtttatcttcagttttaattctcggtttatatacaatatatgtgatgttatttgcaaatactcgagtttaggataataaacaaagattcaaaaaaattctctcacttgttattcccgtccttttagtatgaattttaatatatattcacttcattaccattacaatcctcacaatgcacaaacattgtactcacttagacgttatttttgtgattttcacattgtattgtaaattgatttgtattagtttaattcttcatttgttgttttcagagaatttataagattgtgatcgataatatgtgttacttgtttttatgtaatcattgtgcacgaataatttgtgtgtcgttgcaacgcacagacacttgactagtaccactctatgtatgggtttacactttacgttttcttgtgctatgggccacctagccatttctaggccagttattttctacagttactttgcaaggctgcagtcccattccacacaatttttaatgcagtacagtatag

SEQ ID NO: 83508 - DNA, 1547 bp, Zea Mays
caaaaccatggaccagcaccgccggtatcccgttcccaattccacagatttccgctccccactccgcactcccagtacttaaaccacctaaaaaccaagcaaaatcccacctcccgaaccctggactcatagacaaggaattgggagattcgatttctgctattcagaccacggttcagattactgtcaagcatgtctctactttcaaagttgcgcttgatcaccgtggatgttactggtacactgattgcttacaaaggacaccttggggattactactgtatggcagcaaagtctgctgggatgccatgtcctgactataaccgcatgcatgagggcttcaagcttgcatacactgagatggcaagacagtacccttgctttggatttgcagctaagatgccgaacatcgaatggtggaggacatgtgttaagaattcattcgttaaggctggctatgattatgatgaagagacatttgagaaagtcttcaggcgcatttattctgcatttggctcctctgcgccatactcggcgtttcctgattcgcagcccttcctaaggtgggcacgcgaaaagggactcactgttggcatcgtcagcaatgcagaataccgctacaaagatgtaatcctgccagctttaggattgaatcagagctccgaatgggactttggggtgttctcaggtgtcgttggcgttgagaagccagacccaagaatttacaagatagcgctggagatggcaggaaacgtcgctccggaagaagcgctccacataggtgacagcatgcggaaggactacaccccagctaggagcatcgggatgcatgcgctgctcctggaccggttcaagactgccgacgctgagagctggaggcagtcaggcgccacggtgctcccggaccttgtcgccactcaagagtggctcaccaaggatcagaatgacgaacaggaggaaacagtggcagcacgagtgctgaagagaatgtccgaaaagctatagatgggggctttaaccatgcattaattctacgagtgttcctttatattatctagctatggactgaaggtccaaaagcaacttatgctgatgagaggttggtgacgattcttggctactggctactgtaattagcttgagctactattctggttgcagcatctgtggctgaacacgagtaccatatctgagtgtcataagtcatgttgcgaagaacatgagtagcatatttcaggtgccgtttggttcatatatttgtaatgtaatgggtaacggataacgttaaatcatgtttgttttagtccaaccgtaatcaaataccaccctaaaatttgataccagcctattcaaatttgttaccgccagtaatcgagtcgaaaccattaccatttgcgttacattttttgaaccaaacatcacctcagtgtcatgagtcatgttacgaagatctcgagttgtcttacattcacctgcgtggagcagtagaggagcaagtggaaatgaatctgaacatgagcacaataataaaggacgaagcagtgaat

SEQ ID NO: 83509 - DNA, 1715 bp, Zea Mays
ttgaaattcgatgagcaaaaccatggaccagcaccgccggtatcccgttcccaattccacagatttccgctccccactccgcactcccagtacttaaaccacctaaaaaccaagcaaaatcccacctcccgaaccctggactcatagacaaggaattgggagattcgatttctgctattcagcccacgcccactggttcaaccggtttcttcaaatctcaggcttcaaggccgcaacttttcccccgttggggttggacttggacagctgccgtgcttgggaggcattgccggcaacgggaggtccaatcatcgatccttcgattgtatataaggaccacggttcagattactgtcaagcatgtctctactttcaaagttgcgcttgatcaccgtggatgttactggtacactgattgcttacaaaggacaccttggggattactactgtatggcagcaaagtctgctgggatgccatgtcctgactataaccgcatgcatgagggcttcaagcttgcatacactgagatggcaagacagtacccttgctttggatttgcagctaagatgccgaacatcgaatggtggaggacatgtgttaagaattcattcgttaaggctggctatgattatgatgaagagacatttgagaaagtcttcaggcgcatttattctgcatttggctcctctgcgccatactcggcgtttcctgattcgcagcccttcctaaggtgggcacgcgaaaagggactcactgttggcatcgtcagcaatgcagaataccgctacaaagatgtaatcctgccagctttaggattgaatcagagctccgaatgggactttggggtgttctcaggtgtcgttggcgttgagaagccagacccaagaatttacaagatagcgctggagatggcaggaaacgtcgctccggaagaagcgctccacataggtgacagcatgcggaaggactacaccccagctaggagcatcgggatgcatgcgctgctcctggaccggttcaagactgccgacgctgagagctggaggcagtcaggcgccacggtgctcccggaccttgtcgccactcaagagtggctcaccaaggatcagaatgacgaacaggaggaaacagtggcagcacgagtgctgaagagaatgtccgaaaagctatagatgggggctttaaccatgcattaattctacgagtgttcctttatattatctagctatggactgaaggtccaaaagcaacttatgctgatgagaggttggtgacgattcttggctactggctactgtaattagcttgagctactattctggttgcagcatctgtggctgaacacgagtaccatatctgagtgtcataagtcatgttgcgaagaacatgagtagcatatttcaggtgccgtttggttcatatatttgtaatgtaatgggtaacggataacgttaaatcatgtttgttttagtccaaccgtaatcaaataccaccctaaaatttgataccagcctattcaaatttgttaccgccagtaatcgagtcgaaaccattaccatttgcgttacattttttgaaccaaacatcacctcagtgtcatgagtcatgttacgaagatctcgagttgtcttacattcacctgcgtggagcagtagaggagcaagtggaaatgaatctgaacatgagcacaataataaaggacgaagcagtgaat

SEQ ID NO: 83510 - DNA, 1724 bp, Zea Mays
gttgaaattcgatgagcaaaaccatggaccagcaccgccggtatcccgttcccaattccacagatttccgctccccactccgcactcccagtacttaaaccacctaaaaaccaagcaaaatcccacctcccgaaccctggactcatagacaaggaattgggagattcgatttctgctattcagcccacgcccactggttcaaccggtttcttcaaatctcaggcttcaaggccgcaacttttcccccgttggggttggacttggacagctgccgtgcttgggaggcattgccggcaacgggaggtccaatcatcgatccttcggtagatagattgtatataaggaccacggttcagattactgtcaagcatgtctctactttcaaagttgcgcttgatcaccgtggatgttactggtacactgattgcttacaaaggacaccttggggattactactgtatggcagcaaagtctgctgggatgccatgtcctgactataaccgcatgcatgagggcttcaagcttgcatacactgagatggcaagacagtacccttgctttggatttgcagctaagatgccgaacatcgaatggtggaggacatgtgttaagaattcattcgttaaggctggctatgattatgatgaagagacatttgagaaagtcttcaggcgcatttattctgcatttggctcctctgcgccatactcggcgtttcctgattcgcagcccttcctaaggtgggcacgcgaaaagggactcactgttggcatcgtcagcaatgcagaataccgctacaaagatgtaatcctgccagctttaggattgaatcagagctccgaatgggactttggggtgttctcaggtgtcgttggcgttgagaagccagacccaagaatttacaagatagcgctggagatggcaggaaacgtcgctccggaagaagcgctccacataggtgacagcatgcggaaggactacaccccagctaggagcatcgggatgcatgcgctgctcctggaccggttcaagactgccgacgctgagagctggaggcagtcaggcgccacggtgctcccggaccttgtcgccactcaagagtggctcaccaaggatcagaatgacgaacaggaggaaacagtggcagcacgagtgctgaagagaatgtccgaaaagctatagatgggggctttaaccatgcattaattctacgagtgttcctttatattatctagctatggactgaaggtccaaaagcaacttatgctgatgagaggttggtgacgattcttggctactggctactgtaattagcttgagctactattctggttgcagcatctgtggctgaacacgagtaccatatctgagtgtcataagtcatgttgcgaagaacatgagtagcatatttcaggtgccgtttggttcatatatttgtaatgtaatgggtaacggataacgttaaatcatgtttgttttagtccaaccgtaatcaaataccaccctaaaatttgataccagcctattcaaatttgttaccgccagtaatcgagtcgaaaccattaccatttgcgttacattttttgaaccaaacatcacctcagtgtcatgagtcatgttacgaagatctcgagttgtcttacattcacctgcgtggagcagtagaggagcaagtggaaatgaatctgaacatgagcacaataataaaggacgaagcagtgaat

SEQ ID NO: 83511 - DNA, 2699 bp, Zea Mays
  misc_feature (2698)..(2699): n is a, c, g, or t
cattctgttgtggcacgctaaatatggtattgtggacgaatagctactaaggccatttgaggatataattgaagcgatagaagatgctggatttgaagcagaaattatccctgaatctgctgtctctcagcctaaatcacagaagactttatcagcacaattcaggatagggggaatgacatgtgccaattgtgtaaattcggttgagggtatcttaaaaaagctacctggtgttaaaggagcagtcgttgccttggcaacctcattaggggaagttgagtatattccttctgccattagcaaagatgaaattgttcaggccatcgaggatgctgggtttgaagcagcattcttgcagagtactgagcaagataaggttttgctgggactgattggtttgcacacagagagggatgtagaactattaagtgatattcttaagaaaatagatggcttgcgacaatttggtgtaaatagtgttctctcagaagttgagattgtattcgatccagaagctgttggtctcagatcaatcgtggatacaattgagatgacaagcaatgggagtttgaaagctcatgttcagaatccatacactcgaggggcttcaaatgatgcacaggaggcctccaaaatgcttaaccttctacgttctagcttgttcctcagcattcctgtatttttcatacgtatggtttgccccagtataccatttttaagtacactactaagcatgcactgtggaccatttctcatgggggatttactgaagtggatattggtaagcattgtacagtttgttgttggcaaacggttctatgttgcggcttatagggctgtgaggcatggctctacaaacatggatgtgctagtggttcttggcaccactgcatcatatgcatactctgtctgtgcactactatacggagcatttactggatatcatcctcccatatattttgagacaagtgcaatgataattacatttgtgttgctcgggaagtatctcgaggtgcttgcaaaagggaagacatcggatgcaattaagaagcttgtagaactggtcccttctactgctgttttggttctgaaagacaaagaagggaaacatgttggtgagagggagattgatgcacggttggtccaacctggtgatgtcttaaaagtgcttcctggttcaaagattccagctgatggtgttgtcgtttggggaacaagtcatgtgaatgaaagtatgataactggtgaatcagcacccattcctaaagaagtatcaagtgtgcctacaactgcaatatggtacaaatctttcaggcatggatttgtcttcatttatccttctgaaacatacaggcaggaggtggctagcatttttgttccaattgtcatcacattgtctatagtaacattttctgcgtggtttttgtgtggatggttaggtgcatatccaaattcttgggttgctgaaaatagcaattgctttgtcttctctctcatgtttgccatatctgttgttgttattgcttgcccttgtgcccttggtttggcaacaccaactgctgtgatggtagcgactggaattggggctaatcatggagtacttgtaaaaggcggagatgctttggagagagctcaaaatgtaaattacgtggtttttgataaaacagggacactaacacaaggaaaggctgttgtaacagctgcaaaggttttctcgggaatggacctaggagatttcctcacactggttgcatcagcagaggcaagcagtgagcatcctcttgccaaagctattttggactatgcattgcatttccatttctttggcaagcttccttcatcaaaagatggcattgagcaacgaaaagacaaggtattatcccagtggctgcttgaagctgaagacttctctgcagtacctggcaaaggagttcagtgctcgatcaatgggaagcatgttttggtcggaaaccgttctttgatgactgaaaacggtgtgaccattcccccagaagcagaaactttcttgatagacctggaatcgaatgcaaaaacaggcatacttgtggcatatgatggcgattttgtgggtttgatgggcataaccgaccccctgaaacgggaggctgctgttgtagtggaaggactaaaaaagttgggtgtccatccagtgatgctcacaggagataattggaggaccgcgcaagctgttgctaaggaggttggtattgaggacgtgagagcagaggtgatgccagccggaaaagctgacgttgttcgctccctccagaaggacgggggcaccgtcgccatggttggcgatggcatcaacgactccccagccctggcagcagccgacgtcgggatggccatcggcgggggaacggacattgccatcgaggccgcggactacgtgctggtgcggaacaacctggaagacgtgatcaccgcgatcgacctatccaggaagacgttcagccggatccggtggaactacttcttcgcgatggcctacaacgtcgtggccatccctattgccgcgggcgcgctgttcccgtttaccgggctccagatgccgccgtggctggccggcgcctgcatggccttctcgtccgtaagtgtagtgtgctcgtcgctactgttgaggaggtacagaaaacccaggctgacgactgtgctgcagataactgtagagtgnn

SEQ ID NO: 83512 - DNA, 2820 bp, Zea Mays
  misc_feature (2819)..(2820): n is a, c, g, or t
atggcccacctgcagctctcagcggtcgccggcgcccggccggccgccgcgggcgggcgcggcgacgagatggaggacgtcgcgctgctcgactcgtacgacgaggagatggggctgccgctgccgggtgcatcgggcgccgaggctgcggaggcgcacgtgcgcgtcaccggcatgacgtgctccgcctgcaccagcgccgtcgaggccgccgtctccgcgcgccgcggagtgaggcgcgtcgccgtgtcgttgctccagaaccgcgcccacgtcatgttcgatcccgcgctggccaaggtgcttaccggtgctcctctcctcgctttggtgtggcgtatttcgacgggcgatgcgatccttgcgtactcgcaaccgttgagtggacgcgaggctcgtgcggttccgtgggaagttgggagctctcccgtagaggatataattgaagcgatagaagatgctggatttgaagcagaaattatccctgaatctgctgtctctcagcctaaatcacagaagactttatcagcacaattcaggatagggggaatgacatgtgccaattgtgtaaattcggttgagggtatcttaaaaaagctacctggtgttaaaggagcagtcgttgccttggcaacctcattaggggaagttgagtatattccttctgccattagcaaagatgaaattgttcaggccatcgaggatgctgggtttgaagcagcattcttgcagagtactgagcaagataaggttttgctgggactgattggtttgcacacagagagggatgtagaactattaagtgatattcttaagaaaatagatggcttgcgacaatttggtgtaaatagtgttctctcagaagttgagattgtattcgatccagaagctgttggtctcagatcaatcgtggatacaattgagatgacaagcaatgggagtttgaaagctcatgttcagaatccatacactcgaggggcttcaaatgatgcacaggaggcctccaaaatgcttaaccttctacgttctagcttgttcctcagcattcctgtatttttcatacgtatggtttgccccagtataccatttttaagtacactactaagcatgcactgtggaccatttctcatgggggatttactgaagtggatattgaagggaaacatgttggtgagagggagattgatgcacggttggtccaacctggtgatgtcttaaaagtgcttcctggttcaaagattccagctgatggtgttgtcgtttggggaacaagtcatgtgaatgaaagtatgataactggtgaatcagcacccattcctaaagaagtatcaagtgtggtaattggggggacgataaacttacatggtatccttcatatacaagcaacaaaagtaggatctggtacagttttgagtcagataatctctctggttgaaactgctcagatgtccaaagctcctattcagaaattcgctgattatgtggctagcatttttgttccaattgtcatcacattgtctatagtaacattttctgcgtggtttttgtgtggatggttaggtgcatatccaaattcttgggttgctgaaaatagcaattgctttgtcttctctctcatgtttgccatatctgttgttgttattgcttgcccttgtgcccttggtttggcaacaccaactgctgtgatggtagcgactggaattggggctaatcatggagtacttgtaaaaggcggagatgctttggagagagctcaaaatgtaaattacgtggtttttgataaaacagggacactaacacaaggaaaggctgttgtaacagctgcaaaggttttctcgggaatggacctaggagatttcctcacactggttgcatcagcagaggcaagcagtgagcatcctcttgccaaagctattttggactatgcattgcatttccatttctttggcaagcttccttcatcaaaagatggcattgagcaacgaaaagacaaggtattatcccagtggctgcttgaagctgaagacttctctgcagtacctggcaaaggagttcagtgctcgatcaatgggaagcatgttttggtcggaaaccgttctttgatgactgaaaacggtgtgaccattcccccagaagcagaaactttcttgatagacctggaatcgaatgcaaaaacaggcatacttgtggcatatgatggcgattttgtgggtttgatgggcataaccgaccccctgaaacgggaggctgctgttgtagtggaaggactaaaaaagttgggtgtccatccagtgatgctcacaggagataattggaggaccgcgcaagctgttgctaaggaggttggtattgaggacgtgagagcagaggtgatgccagccggaaaagctgacgttgttcgctccctccagaaggacgggggcaccgtcgccatggttggcgatggcatcaacgactccccagccctggcagcagccgacgtcgggatggccatcggcgggggaacggacattgccatcgaggccgcggactacgtgctggtgcggaacaacctggaagacgtgatcaccgcgatcgacctatccaggaagacgttcagccggatccggtggaactacttcttcgcgatggcctacaacgtcgtggccatccctattgccgcgggcgcgctgttcccgtttaccgggctccagatgccgccgtggctggccggcgcctgcatggccttctcgtccgtaagtgtagtgtgctcgtcgctactgttgaggaggtacagaaaacccaggctgacgactgtgctgcagataactgtagagtgnn

SEQ ID NO: 83513 - DNA, 3039 bp, Zea Mays
  misc_feature (3038)..(3039): n is a, c, g, or t
cgctgctccaccccctgcgtctgacgggcatggcccacctgcagctctcagcggtcgccggcgcccggccggccgccgcgggcgggcgcggcgacgagatggaggacgtcgcgctgctcgactcgtacgacgaggagatggggctgccgctgccgggtgcatcgggcgccgaggctgcggaggcgcacgtgcgcgtcaccggcatgacgtgctccgcctgcaccagcgccgtcgaggccgccgtctccgcgcgccgcggagtgaggcgcgtcgccgtgtcgttgctccagaaccgcgcccacgtcatgttcgatcccgcgctggccaaggtagaggatataattgaagcgatagaagatgctggatttgaagcagaaattatccctgaatctgctgtctctcagcctaaatcacagaagactttatcagcacaattcaggatagggggaatgacatgtgccaattgtgtaaattcggttgagggtatcttaaaaaagctacctggtgttaaaggagcagtcgttgccttggcaacctcattaggggaagttgagtatattccttctgccattagcaaagatgaaattgttcaggccatcgaggatgctgggtttgaagcagcattcttgcagagtactgagcaagataaggttttgctgggactgattggtttgcacacagagagggatgtagaactattaagtgatattcttaagaaaatagatggcttgcgacaatttggtgtaaatagtgttctctcagaagttgagattgtattcgatccagaagctgttggtctcagatcaatcgtggatacaattgagatgacaagcaatgggagtttgaaagctcatgttcagaatccatacactcgaggggcttcaaatgatgcacaggaggcctccaaaatgcttaaccttctacgttctagcttgttcctcagcattcctgtatttttcatacgtatggtttgccccagtataccatttttaagtacactactaagcatgcactgtggaccatttctcatgggggatttactgaagtggatattggtaagcattgtacagtttgttgttggcaaacggttctatgttgcggcttatagggctgtgaggcatggctctacaaacatggatgtgctagtggttcttggcaccactgcatcatatgcatactctgtctgtgcactactatacggagcatttactggatatcatcctcccatatattttgagacaagtgcaatgataattacatttgtgttgctcgggaagtatctcgaggtgcttgcaaaagggaagacatcggatgcaattaagaagcttgtagaactggtcccttctactgctgttttggttctgaaagacaaagaagggaaacatgttggtgagagggagattgatgcacggttggtccaacctggtgatgtcttaaaagtgcttcctggttcaaagattccagctgatggtgttgtcgtttggggaacaagtcatgtgaatgaaagtatgataactggtgaatcagcacccattcctaaagaagtatcaagtgtggtaattggggggacgataaacttacatggtatccttcatatacaagcaacaaaagtaggatctggtacagttttgagtcagataatctctctggttgaaactgctcagatgtccaaagctcctattcagaaattcgctgattatgtggctagcatttttgttccaattgtcatcacattgtctatagtaacattttctgcgtggtttttgtgtggatggttaggtgcatatccaaattcttgggttgctgaaaatagcaattgctttgtcttctctctcatgtttgccatatctgttgttgttattgcttgcccttgtgcccttggtttggcaacaccaactgctgtgatggtagcgactggaattggggctaatcatggagtacttgtaaaaggcggagatgctttggagagagctcaaaatgtaaattacgtggtttttgataaaacagggacactaacacaaggaaaggctgttgtaacagctgcaaaggttttctcgggaatggacctaggagatttcctcacactggttgcatcagcagaggcaagcagtgagcatcctcttgccaaagctattttggactatgcattgcatttccatttctttggcaagcttccttcatcaaaagatggcattgagcaacgaaaagacaaggtattatcccagtggctgcttgaagctgaagacttctctgcagtacctggcaaaggagttcagtgctcgatcaatgggaagcatgttttggtcggaaaccgttctttgatgactgaaaacggtgtgaccattcccccagaagcagaaactttcttgatagacctggaatcgaatgcaaaaacaggcatacttgtggcatatgatggcgattttgtgggtttgatgggcataaccgaccccctgaaacgggaggctgctgttgtagtggaaggactaaaaaagttgggtgtccatccagtgatgctcacaggagataattggaggaccgcgcaagctgttgctaaggaggttggtattgaggacgtgagagcagaggtgatgccagccggaaaagctgacgttgttcgctccctccagaaggacgggggcaccgtcgccatggttggcgatggcatcaacgactccccagccctggcagcagccgacgtcgggatggccatcggcgggggaacggacattgccatcgaggccgcggactacgtgctggtgcggaacaacctggaagacgtgatcaccgcgatcgacctatccaggaagacgttcagccggatccggtggaactacttcttcgcgatggcctacaacgtcgtggccatccctattgccgcgggcgcgctgttcccgtttaccgggctccagatgccgccgtggctggccggcgcctgcatggccttctcgtccgtaagtgtagtgtgctcgtcgctactgttgaggaggtacagaaaacccaggctgacgactgtgctgcagataactgtagagtgnn

SEQ ID NO: 83514 - DNA, 3050 bp, Zea Mays
  misc_feature (3049)..(3050): n is a, c, g, or t
cgctgctccaccccctgcgtctgacgggcatggcccacctgcagctctcagcggtcgccggcgcccggccggccgccgcgggcgggcgcggcgacgagatggaggacgtcgcgctgctcgactcgtacgacgaggagatggggctgccgctgccgggtgcatcgggcgccgaggctgcggaggcgcacgtgcgcgtcaccggcatgacgtgctccgcctgcaccagcgccgtcgaggccgccgtctccgcgcgccgcggagtgaggcgcgtcgccgtgtcgttgctccagaaccgcgcccacgtcatgttcgatcccgcgctggccaaggtagaggatataattgaagcgatagaagatgctggatttgaagcagaaattatccctgaatctgctgtctctcagcctaaatcacagaagactttatcagcacaattcaggatagggggaatgacatgtgccaattgtgtaaattcggttgagggtatcttaaaaaagctacctggtgttaaaggagcagtcgttgccttggcaacctcattaggggaagttgagtatattccttctgccattagcaaagatgaaattgttcaggccatcgaggatgctgggtttgaagcagcattcttgcagagtactgagcaagataaggttttgctgggactgattggtttgcacacagagagggatgtagaactattaagtgatattcttaagaaaatagatggcttgcgacaatttggtgtaaatagtgttctctcagaagttgagattgtattcgatccagaagctgttggtctcagatcaatcgtggatacaattgagatgacaagcaatgggagtttgaaagctcatgttcagaatccatacactcgaggggcttcaaatgatgcacaggaggcctccaaaatgcttaaccttctacgttctagcttgttcctcagcattcctgtatttttcatacgtatggtttgccccagtataccatttttaagtacactactaagcatgcactgtggaccatttctcatgggggatttactgaagtggatattggtaagcattgtacagtttgttgttggcaaacggttctatgttgcggcttatagggctgtgaggcatggctctacaaacatggatgtgctagtggttcttggcaccactgcatcatatgcatactctgtctgtgcactactatacggagcatttactggatatcatcctcccatatattttgagacaagtgcaatgataattacatttgtgttgctcgggaagtatctcgaggtgcttgcaaaagggaagacatcggatgcaattaagaagcttgtagaactggtcccttctactgctgttttggttctgaaagacaaagaagggaaacatgttggtgagagggagattgatgcacggttggtccaacctggtgatgtcttaaaagtgcttcctggttcaaagattccagctgatggtgttgtcgtttggggaacaagtcatgtgaatgaaagtatgataactggtgaatcagcacccattcctaaagaagtatcaagtgtggtaattggggggacgataaacttacatggtatccttcatatacaagcaacaaaagtaggatctggtacagttttgagtcagataatctctctggttgaaactgctcagatgtccaaagctcctattcagaaattcgctgattatgtggctagcatttttgttccaattgtcatcacattgtctatagtaacattttctgcgtggtttttgtgtggatggttaggtgcatatccaaattcttgggttgctgaaaatagcaattgctttgtcttctctctcatgtttgccatatctgttgttgttattgcttgcccttgtgcccttggtttggcaacaccaactgctgtgatggtagcgactggaattggggctaatcatggagtacttgtaaaaggcggagatgctttggagagagctcaaaatgtaaattacgtggtttttgataaaacagggacactaacacaaggaaaggctgttgtaacagctgcaaaggttttctcgggaatggacctaggagatttcctcacactggttgcatcagcagaggcaagcagtgagcatcctcttgccaaagctattttggactatgcattgcatttccatttctttggcaagcttccttcatcaaaagatggcattgagcaacgaaaagacaaggtattatcccagtggctgcttgaagctgaagacttctctgcagtacctggcaaaggagttcagtgctcgatcaatgggaagcatgttttggtgagtcataggtcggaaaccgttctttgatgactgaaaacggtgtgaccattcccccagaagcagaaactttcttgatagacctggaatcgaatgcaaaaacaggcatacttgtggcatatgatggcgattttgtgggtttgatgggcataaccgaccccctgaaacgggaggctgctgttgtagtggaaggactaaaaaagttgggtgtccatccagtgatgctcacaggagataattggaggaccgcgcaagctgttgctaaggaggttggtattgaggacgtgagagcagaggtgatgccagccggaaaagctgacgttgttcgctccctccagaaggacgggggcaccgtcgccatggttggcgatggcatcaacgactccccagccctggcagcagccgacgtcgggatggccatcggcgggggaacggacattgccatcgaggccgcggactacgtgctggtgcggaacaacctggaagacgtgatcaccgcgatcgacctatccaggaagacgttcagccggatccggtggaactacttcttcgcgatggcctacaacgtcgtggccatccctattgccgcgggcgcgctgttcccgtttaccgggctccagatgccgccgtggctggccggcgcctgcatggccttctcgtccgtaagtgtagtgtgctcgtcgctactgttgaggaggtacagaaaacccaggctgacgactgtgctgcagataactgtagagtgnn

SEQ ID NO: 83515 - DNA, 1345 bp, Zea Mays
atggcccacctgcagctctcagcggtcgccggcgcccggccggccgccgcgggcgggcgcggcgacgagatggaggacgtcgcgctgctcgactcgtacgacgaggagatggggctgccgctgccgggtgcatcgggcgccgaggctgcggaggcgcacgtgcgcgtcaccggcatgacgtgctccgcctgcaccagcgccgtcgaggccgccgtctccgcgcgccgcggagtgaggcgcgtcgccgtgtcgttgctccagaaccgcgcccacgtcatgttcgatcccgcgctggccaaggtagaggatataattgaagcgatagaagatgctggatttgaagcagaaattatccctgaatctgctgtctctcagcctaaatcacagaagactttatcagcacaattcaggatagggggaatgacatgtgccaattgtgtaaattcggttgagggtatcttaaaaaagctacctggtgttaaaggagcagtcgttgccttggcaacctcattaggggaagttgagtatattccttctgccattagcaaagatgaaattgttcaggccatcgaggatgctgggtttgaagcagcattcttgcagagtactgagcaagataaggttttgctgggactgattggtttgcacacagagagggatgtagaactattaagtgatattcttaagaaaatagatggcttgcgacaatttggtgtaaatagtgttctctcagaagttgagattgtattcgatccagaagctgttggtctcagatcaatcgtggatacaattgagatgacaagcaatgggagtttgaaagctcatgttcagaatccatacactcgaggggcttcaaatgatgcacaggaggcctccaaaatgcttaaccttctacgttctagcttgttcctcagcattcctgtatttttcatacgtatggtttgccccagtataccatttttaagtacactactaagcatgcactgtggaccatttctcatgggggatttactgaagtggatattgaagggaaacatgttggtgagagggagattgatgcacggttggtccaacctggtgatgtcttaaaagtgcttcctggttcaaagattccagctgatggtgttgtcgtttggggaacaagtcatgtgaatgaaagtatgataactggtgaatcagcacccattcctaaagaagtatcaagtgtgcctacaactgcaatatggtacaaatctttcaggcatggatttgtcttcatttatccttctgaaacatacaggcaggaggtggctagcatttttgttccaattgtcatcacattgtctatagtaacattttctgcgtg

SEQ ID NO: 83516 - DNA, 715 bp, Zea Mays
cgccgatttcctcctctcccatttccaaaccatgctagatgctagttagtccttgcctccttgatgaaaagctaccagctgtcttttactacacggcggtgtggtgtggaccatgtagggcgatcgcacctttagtatcaaagctgagcagccagtatcccaagataccggtgtacaaagttgacattgaattggaaggactgggaaacaaactccgtgatctaaacatatgttcagtgccgacgttccacttctatcacaaggggcagagaattagtgaaatcgtgggtgctgatgcaaagaaaattgaagctaccatggaaagtctccacaagcagcagtagaagtttcagagcagagcctcaacctcacaccaatggaatggtttaatctacctcgcatgagaagtgttgcgcacttttggattcgtgtttttctttacgtgtcacaccgtgtgaacgccagcgtttcgtcatcagatgcttgtgattcgtgccggcttgtttcatgtgaagacatcagatgcttgtgtttcgtgccggcttgttttgagttttgggtcttgagcttcggcgactctgtccagagctgcggatgtttctcatgcttggaatgagtgagatgggttgaaaatggccacccatatgcagttctggttcgagtcgagcgccgggtgtttggttcgattgaactatcattgcacaagctttgtcag

SEQ ID NO: 83517 - DNA, 1868 bp, Zea Mays
gataaactgctcggaacttgacattatttttattatagcctccccctttcattgctataaactgtatagatacactgctacgcacaatcaataactcaacatgttgaattccagtgttgttttcatatatcaatttctgcacagcagagctcgaaacaagactgctacataattataatataattcccaatagtgaggaaaacgatgctgaaaattaaataatatgaagagcaatgtatctgcgaatataggcgtggacaacaattacaacacttaggaaagggctatggaagtcaagattactgtttaaatctatgctaaaaacatatggaaggaacagttcatacccttgccataataatagccatttccatgtttagtgattgcttgacaaatagttcgtaattacacggcttgtaaaagaaacctgctagccaagtctcattccaaatgcggctgaaattataaaatggttgcaacagaagctttagaacaagtgaacaacagaacaattaacacgatacttcagaaatacataagtcaggaacatggagatacatgatccaatcagcaacacttcagaaccaatattcagaattgttcaatggcagtgttgcgatgaaagcaagtaacttgtcataccactaccatatagtttgaagcaagtactatcatgatttagcactcatcaacacattttagttacatagcttaccaaaatcagaactatcaaacaatagctgaaaaccaaattttcagttaaattatttttagcttggaacgggtattttaaggttgaaaaggttctcatggaactgttgtgtcatcgacatactttctatcctgtttctctttcagttctttagttctgtaaataatttttaccccctaaagacacagaaagtcagtgcttagataatgcaaagaaataagacatgatatgggatagaaattacttgtttacctgaatagattcaagaacagaggtgacagctggctttgcagcctctccttcaactaatagaaagaaatgtgaaacaccaatgacattgtgataatacaaccatggaagaatctggtgtaggccagcagatgtgcttcccgtgatacagatctgcaatccaagatacaggataagctgaatataggtacagtttgggttcaaaatgtgaacaagattattgcaaaacaaaagaaaaaaagaaaaagaggggacaaggttttaaggttgaaatgaaaaaatggtattgttggatcatggcaagtgttcgcgagtgaggcttctcaacaaacattttaagatcacaggaatgttatatatcttgttttcccaagttcctaccttaataacaaggtaaactaatatgcttggattcatgctgttgccaaaactcttgtgtatatgaatgtgatgatacaacatctccatattgtgcaatcatgattgtacaaacaaggaatttctacatatactgcagctacggttgctcatgcaagggaactttcacttgaatgctacgacctgcactgcacaatttaccgaacatagaacgagcgctagtggggaggaggcaactgttgcttcaacgcgcaagcagaatcgcggcaccacacgtggggatccggctgcctagtggggaggaggccgtgcggggagagaagcctgctcgtcgcctcctcgagagggcgacgacggagataaccagatcttgggatttggggttggtggggagatggggacgcgacgagaggtgatcgcgacaagaacctccgtccccatctcaagcctgctcgtcgcccattgtgaccagatctctacgatcttcgagtcggccagctgcacgtacccgtaggagacgagcttggac

SEQ ID NO: 83518 - DNA, 369 bp, Zea Mays
atggtggggcatatgcaccaggctcgatcgatctatccacaatggcacagcgtgcagactgcaggctacattaaagaaactagaaaaaatagcgccctatcgggcgctgtatcacctagcatggttaaacaacccgagtccatgcttaataacgcctccagaacctcacagcgtcgtcaagtcgtcatgacaaagcagtggcgcgttccgagagctcgagcaaaccaggggacggcctcggcggcattgcttcttcctgttcctgggcgtccaccatttccaagatctttcttacggttgcctgtaacctctcgtgaccaccttccagtgtggactgaccagcagttacgttcggttggatggccatag

SEQ ID NO: 83519 - DNA, 1296 bp, Zea Mays
cagggttatccaagaatgaaaatcaatttaaatacaattgcaagagatcaagttcatgcacacaaaataatcatttgtaaaaagatcatagatttttgtgcaagagcgagtggatatggaaccatcccctcagcctatgggtgtcgctgccggtgggtcacaagtgtatcctgcctctgcctatccgcctgcagcaacagtagctcctgcttctgttgtatctgctggtttacagtcagggcagccattcccagccaatcctggtcatatgagtgctcagcaccagattgtctaccaacaagctcaacaattccaccaacagctccagcagcaacaacaacagcagcttcagcagttctgggttgaacgcatgactgaaattgaggcgacgactgatttcaagaaccacaacttgccacttgcgaggataaagaagatcatgaaggccgatgaagatgttcgcatgatctcagctgaagctcctgtagtctttgcaaaagcttgtgagatattcatactggagctgacacttaggtcgtggatgcacactgaggagaacaagcgccgcaccttgcaaaagaatgacattgcagcagcgatcactaggactgacatttatgacttcttggtcgacattgttcccagggatgagatgaaggaggacggaattgggcttcctagggctggtctgccacccatgggagccccagctgatgcatatccatactactacatgccacagcagcaggtgcctggttctggaatggtttatggtgcccagcaagggcacccagtgacttatttgtggcaggagcctcagcaacagcaggagcaagctcctgaagagcagcaatctgcatgaaagtggctgagaatattgctcagaagctatcacctgattcagagttctcattttaggttgtccaaactgcaggttttcttagtaatatcgttggttatcaaactgaaacaggcgattctaagtagggtgtagcatcatggtagtttcatttctgcttgtgatgttagttgaaaggataatgattagtggctagtggattaaagttaccataccatttccttctattccgaaagtttgcctccatgaggcctctgatatgacgtgctagttgttaatgcttctatgctctgcttgtgctgtacagttcaagctgtttttttggttgctcttgatttgtagcatgtaaggtgctgttaattcttgggaaattcgttcgagacctcaatatagttgaattctgagatccagtagagttggggcttggataagaccaa

SEQ ID NO: 83520 - DNA, 1270 bp, Zea Mays
cttggaagtttgaaaccgctaatcgtcatgctattttgcgacaaaagattgtaaaaagatcatagatttttgtgcaagagcgagtggatatggaaccatcccctcagcctatgggtgtcgctgccggtgggtcacaagtgtatcctgcctctgcctatccgcctgcagcaacagtagctcctgcttctgttgtatctgctggtttacagtcagggcagccattcccagccaatcctggtcatatgagtgctcagcaccagattgtctaccaacaagctcaacaattccaccaacagctccagcagcaacaacaacagcagcttcagcagttctgggttgaacgcatgactgaaattgaggcgacgactgatttcaagaaccacaacttgccacttgcgaggataaagaagatcatgaaggccgatgaagatgttcgcatgatctcagctgaagctcctgtagtctttgcaaaagcttgtgagatattcatactggagctgacacttaggtcgtggatgcacactgaggagaacaagcgccgcaccttgcaaaagaatgacattgcagcagcgatcactaggactgacatttatgacttcttggtcgacattgttcccagggatgagatgaaggaggacggaattgggcttcctagggctggtctgccacccatgggagccccagctgatgcatatccatactactacatgccacagcagcaggtgcctggttctggaatggtttatggtgcccagcaagggcacccagtgacttatttgtggcaggagcctcagcaacagcaggagcaagctcctgaagagcagcaatctgcatgaaagtggctgagaatattgctcagaagctatcacctgattcagagttctcattttaggttgtccaaactgcaggttttcttagtaatatcgttggttatcaaactgaaacaggcgattctaagtagggtgtagcatcatggtagtttcatttctgcttgtgatgttagttgaaaggataatgattagtggctagtggattaaagttaccataccatttccttctattccgaaagtttgcctccatgaggcctctgatatgacgtgctagttgttaatgcttctatgctctgcttgtgctgtacagttcaagctgtttttttggttgctcttgatttgtagcatgtaaggtgctgttaattcttgggaaattcgttcgagacctcaatatagttgaattctgagatccagtagagttggggcttggataagaccaa

SEQ ID NO: 83521 - DNA, 1329 bp, Zea Mays
gaaaatttgacaaaagattaggaacaccatcatagatctgttctttttgtccccataacttgttcacggatgaccaccatttttgggaaccggtgtccatcttttagttgtaaaaagatcatagatttttgtgcaagagcgagtggatatggaaccatcccctcagcctatgggtgtcgctgccggtgggtcacaagtgtatcctgcctctgcctatccgcctgcagcaacagtagctcctgcttctgttgtatctgctggtttacagtcagggcagccattcccagccaatcctggtcatatgagtgctcagcaccagattgtctaccaacaagctcaacaattccaccaacagctccagcagcaacaacaacagcagcttcagcagttctgggttgaacgcatgactgaaattgaggcgacgactgatttcaagaaccacaacttgccacttgcgaggataaagaagatcatgaaggccgatgaagatgttcgcatgatctcagctgaagctcctgtagtctttgcaaaagcttgtgagatattcatactggagctgacacttaggtcgtggatgcacactgaggagaacaagcgccgcaccttgcaaaagaatgacattgcagcagcgatcactaggactgacatttatgacttcttggtcgacattgttcccagggatgagatgaaggaggacggaattgggcttcctagggctggtctgccacccatgggagccccagctgatgcatatccatactactacatgccacagcagcaggtgcctggttctggaatggtttatggtgcccagcaagggcacccagtgacttatttgtggcaggagcctcagcaacagcaggagcaagctcctgaagagcagcaatctgcatgaaagtggctgagaatattgctcagaagctatcacctgattcagagttctcattttaggttgtccaaactgcaggttttcttagtaatatcgttggttatcaaactgaaacaggcgattctaagtagggtgtagcatcatggtagtttcatttctgcttgtgatgttagttgaaaggataatgattagtggctagtggattaaagttaccataccatttccttctattccgaaagtttgcctccatgaggcctctgatatgacgtgctagttgttaatgcttctatgctctgcttgtgctgtacagttcaagctgtttttttggttgctcttgatttgtagcatgtaaggtgctgttaattcttgggaaattcgttcgagacctcaatatagttgaattctgagatccagtagagttggggcttggataagaccaa

SEQ ID NO: 83522 - DNA, 1269 bp, Zea Mays
aagaacggacctgagcttcgcttcttgctgccgctgccgctgccgcgttgtaaaaagatcatagatttttgtgcaagagcgagtggatatggaaccatcccctcagcctatgggtgtcgctgccggtgggtcacaagtgtatcctgcctctgcctatccgcctgcagcaacagtagctcctgcttctgttgtatctgctggtttacagtcagggcagccattcccagccaatcctggtcatatgagtgctcagcaccagattgtctaccaacaagctcaacaattccaccaacagctccagcagcaacaacaacagcagcttcagcagttctgggttgaacgcatgactgaaattgaggcgacgactgatttcaagaaccacaacttgccacttgcgaggataaagaagatcatgaaggccgatgaagatgttcgcatgatctcagctgaagctcctgtagtctttgcaaaagcttgtgagatattcatactggagctgacacttaggtcgtggatgcacactgaggagaacaagcgccgcaccttgcaaaagaatgacattgcagcagcgatcactaggactgacatttatgacttcttggtcgacattgttcccagggatgagatgaaggaggacggaattgggcttcctagggctggtctgccacccatgggagccccagctgatgcatatccatactactacatgccacagcagcaggtgcctggttctggaatggtttatggtgcccagcaagggcacccagtgacttatttgtggcaggagcctcagcaacagcaggagcaagctcctgaagagcagcaatctgcatgaaagtggctgagaatattgctcagaagctatcacctgattcagagttctcattttaggttgtccaaactgcaggttttcttagtaatatcgttggttatcaaactgaaacaggcgattctaagtagggtgtagcatcatggtagtttcatttctgcttgtgatgttagttgaaaggataatgattagtggctagtggattaaagttaccataccatttccttctattccgaaagtttgcctccatgaggcctctgatatgacgtgctagttgttaatgcttctatgctctgcttgtgctgtacagttcaagctgtttttttggttgctcttgatttgtagcatgtaaggtgctgttaattcttgggaaattcgttcgagacctcaatatagttgaattctgagatccagtagagttggggcttggataagaccaa

SEQ ID NO: 83523 - DNA, 714 bp, Zea Mays
caaaccccaatacagacataggaacaaacaatgagagttcgtctagaaagcgagctatgaaagctatgggcaatgttaaccaaccaaaagtagcatatgataatttagaagatgaatgtgtgaatcttgaaagcaaaaaatggggactgaagattaatagggtcactggcgagcctatgtatgatacagatgattaaagtgaacatgattctgaatatgaaagtgagtactctgaaaatgagtactctgaagatgaaaacatagtgaataacatgacagcaggggagaagaacttatattttcaaaaaaaaaagattcctgaataaggagagacatccaaagaagtcaaaatccatgaaccaggatgctccaacaagcagaagggattattttgaagataggagggactgtgccagagcatctaatgttgaagacttaatgaatgctacaaaaaatggtgtgcttaattcacacaacagaagggatgattatgaagaagggagagacagtgctagggcactcaattctgaaaactatgaggaggggagggactgtaccagggcatccaatgccgaaaacattgtgaatgctacaaaaaaagctgatagaactgaagagaagaggggccatggcaaaaacaaatgtaaaaaacttgctaaactaaagcctggagaaaaaaattaaagtaacgttctacaacaaccatgctctttg

SEQ ID NO: 83524 - DNA, 1990 bp, Zea Mays
gccatatgtacgaagagtgaccgacgaccaaaactaaccgaaacaaggcacgaaaaattaatagattcctaggcttggtttccctcacacgaagcatatttggtaactgcttatacacagattcattaggccccgatctcctccccttcctctctcgatctcctccattgcacagattcgaaattcatagcagcagcaacgggagaacccatccctaatctctccggcgaccaagatcctctcccctctgcccgtaggaggcagcagcaagcatctcccctcccaggtcctcctcccctccgcccagagaaggcagctgctggaatcacctctcccaggcgactacatcctcctcctactcctctcctccccagctgcagttcgcacacccacaaagggcgctttgttttggcaaaggccacttggtgctcacaagactcgagatcttgagtttcttgagttacaacaggctcacatatatgttctcaggaattgctacgaggtgcaaccatttattagtgagtacaacagcggtgagggctcttcattgctgcaatttacatcctcctggaacaataagtttattgaatggttcagggagaagatccataatttgtatgaacatgatacaagtgaaaaaaatggatgaccttctatcgttgtctcggggccctttgcaaaacacaacatgttttgcaggctatgacatcaatggattcagatatcgtatagagattcgtgatagaaatcgctgcacacaaaatagtggggtggctgttttttcagaagggaatacaactgatgacaatgctgaatattatggtgtattaacagagataattgagcttcagtttcttggtggaagacgtgtgccattatttcgttgcaagtgggttgacatattcaataaaaagagaggaataaagaaggacacatatggacttgttagtgtcaattttaagtgcctccttcgaacagatgagccatttgtattagctagccaagcttctcaagtcttttttgttaaagacaatgtgatcaaaggatgtcacttggttgtcaaaatgcagccacgtgacacatatgatgtagccgacgtttcagatgatgaagacattgaagatgaggatgccaatgcagaggaagacacatgatgaatatccttcaaccacatccttgagtggaaataggaaatattgttatgaattttgtttccatatcttaggatatgaaatctgtgaccattgcatcaatatttgtttttatattgacagcttatgtatgaactagtttttatagccgtttttattgtctccttgaggtgcagccacgtgcctccttataatgcagcttatgtatgaccattgcatcaatatttttgtatcaaccacatccttgcatcaatagccgttttatatttctatcttgccattaatctgttttcttgcttctattcacagcttaccattttgtgcatttgttatctatgtaggctgtagtaatgcaaagcaagtatggaaatgtgagatcccctccaaggtcacacttcatcagcccaggattgcttcgtcaacaacatgtgaaaagccatgaaccaggatgctccaacaagcagaagggattattttgaagataggagggactgtgccagagcatctaatgttgaagacttaatgaatgctacaaaaaatggtgtgcttaattcacacaacagaagggatgattatgaagaagggagagacagtgctagggcactcaattctgaaaactatgaggaggggagggactgtaccagggcatccaatgccgaaaacattgtgaatgctacaaaaaaaggtataggaacacaactaatagttgaagtataaatgtttcagctgatagaactgaagagaagaggggccatggcaaaaacaaatgtaaaaaacttgctaaactaaagcctggagaaaaaaattaaagtaacgttctacaacaaccatgctctttg

SEQ ID NO: 83525 - DNA, 1756 bp, Zea Mays
atctgttgtcatccctgttctttgcccactttcaccttgctttccccatttcacacgctttccttccgcccattgacgagttgacgaccaacagacccaggcctccgaccagatcgaggtgagcgaacgtgccccgcctgcgctggtgacggtgagggtgaggccgcacgccatccgccatcctcactgatggttccgtcccgccgccatcggagagtgtagaagtggaagcaagcagataaaccccaggttctgtacttctgtcaactgtcctgtttttcagacgaaatcgaaacatgttagatcaatcaatggagacctctttttagtgtcgcacttgttgaaacggatccactcgagactttttcagatcgattaggcttattcttggggctggtaatgtgagcttctcactaccggattttcctgctgttttctgatgcccatgcccgtctctcgcccgtgcagcacaagtagttcgtaacgccatccatgggatcctccttatcgaacctcaccgacgccgcttgcatcgtgcaccagtttaagatcaacggctactcggctaccaaatccatggcgaggacggactcgctcccgtccaagcggctggccgtgggagggtacgagtgggaggtccactacaccccaagcctcctcgtcgacggcagctacatgatagcgttcaggctcgtcctcctcggcgcgccgcgtcggaacgacgtgaaggcggcgttcagatgtcggctgctgtatccttccaccaactacggtcatcaacgcggtgcgtgcgtcagcgattcaatggggaacgtggaaggtcagatgtctcatgcgttcaagcgggcgaaggagagctcgggatggattccgctccgcaaaaggaatgttgtggaggcggcccgggtcatcgagaacgactctctcactgccgaatgtaccatcacggtggtcaccgagctacctgaacctgatacagcaaagactaacgccgtcttgccccgaattcggcgattgacgggcgtgcattccttgcaccatgatctcggtgagctcttgggcaagggaaccggatccgatgtcgtgctggtggtttgcggagacgcactcgcagtcgcagagggtggagatcatggacatggaggcggccgtattcggggccatgcttcgcttcatgtacaccgacgtggtgcccgagcttgagcggcaggagaacggcgacgtcatcgcgcagcatctgcttgcagctgcggacagatatggactcgacaagctcaaatcgatgtgcgaggacaagctctgcggtggcaccacagtggagacagcagcgacgactctggcgctggcagagcagcacggttgcccaaagctcaaggcttggtgtgttgagttcatcgctgcaaaccttgatgccgtcatggtgaccgagggttacaagcatctgatgacaagctccccgttggttctgaatgaccttctgagagctgtgcgtggaacgaagaactgaagaacattggtagttgtattgtatctgctctctatgaattcggtgtttaagtttatattccttcccattgaggaagggtggattgctggaaggctgtcatttgagaacttggcttcatttctagtcgttgtcccagctcatgggtttatgggtattttctaggagaaaagaggtaagacttaactatcctaatgctacagaaaagatagttaatgaccattcgcacgtagtaaaaaacttttacagaaa

SEQ ID NO: 83526 - DNA, 3464 bp, Zea Mays
ctgaattctgcattgctccttactttagcaaagaaggagccctttgatcatttgctgatcagcaaccagagttctaacaaatgcatagaagcagagtccatgcagacggattatatgtccctaaatgcttctcttgttctattcgctgaggctgtcaaaggatctctgctatctactaacctagaagttcaggcagggacattggatttgatctttcatttcctgtcatctgatgcaaatatttgtgctctacttcaaactttgatcgatgaaaatgttgctgattacatatttgaggttctcaggttatcagagataccatttcacccagtccagtcccatgttttacgacttgtttggatttgcatggccaattgttctggtatcctctcactgccccaagaagaacagatagcctgtactttgactgcaatcttgagaagaaatctcaatggtgaacttgacatgagttctgaaacttttattctggtttgctcaatattaatagagattctgaagtcacctcatgctcatgatattgagaaactaccatcatttattgaagaagcatcaaaatatgcgatatcttctacattgtcacatgggtatgattctacgatcctcagtactcattctcttcttcttctgaaagaagcacttatattctgccttgaagggagcaaatacaatattgctagaacgaaggatcttgaggatagcatcatgggaacttgtggaacaattttactgcaatggcttgaaagtgctgtggttgacggtaatgatgaagaaacattggctgagatccttcagattttccaaattattttgtcaagggcatctgacaaaaagccattaaaattcgctgaattgctagcatcatcatcatggctctgtgctaacaaccaaattctggcttctgttgagcaatacatcctcctcaatggtgggacctttccatatgaaatcaatggttccattatgcttacgcttctggtccatctttatgccttcatcagaggcctttcccatagctgcagcattccacacagtccagaagccgagaatacactattccacttaatcatacacaaggactgggatttgcttgtgattcgagtccattcggtagcaataaaatggctctttcagaagcaagaaattatggaaccactcgccttccagatgctaaagttttgtagaactttctgtgaagatgaaactgtcatgctttcaaacagcagtcagttggttgacatgcaaatgattgcggagcttgcactttctggagaaaccaccatctcgtctttgctggtgtccttgctagaccagatgctaaaggagggtacagaagatgagttattttcagttgtcagtgttatcgctgaaatcctcatgatctctccatgttcttccgatcaatttatatcatgtggtattatcggttcattccatggcatatattgcttaccatactcttcaaggagcagaacagtttgttcctatttgatctttaacatcttatgctcagcaaatgcatcaacatttggccaggaagatgaatggcttcctcttgttctaaagcaaagtaggttggcgtctaggtgtcggttgcttggctcagttctaacagatgttgtagtaaacaacgcttgtgttaaaggcccatctttatttcaacacaatcaggagacaacctttggagaattcctgattcttgtacttctattggtgttcttctctctaagaagtttgcatagcattctagaggtaagtattgactggcaggacttccttcagcattcagacgatgtccagtcattttctgttctcggtattccatgccatgatttatgccgtctcatgcacttcggttcaccttctattaagcttattgcttcacaatgcctgttggagttgctcacgagaatttcagatcaaaggtcatgtaataatgctgagttaagatgctctgtgggatatttgaagtccattattgcagtgacagagggattggtgttcagtgaagacagtaaagttgctggaaattgcagtgcctgtctctctgtgattttgggatgggagaaatttggaagccaagaaaaggtggcagtcagagaatctaaatggtttaggctaataatggaggaatttgttgtggccttgactgctcctggtttgacgtcgaaatctttctccagtcagcagaagtttgctgcgaatatggctgtttcgttgctcaggctgagccaagtgccagattggctgacatcgttgtttgatgggcatctgatatctggcatcgtggctaatctttctgctaggaatgttactgcagaaatcatcaatctcttcagtgagctcatggctaggaagtatctcagtcaagagcacattgttgatctacataacttgttgcaggtgtgcagaagccaggtctacgagggaagctccaaagcaccgttgccagagcaaagggttgaaaaagtcgcgagaagcaccaatgacgtgctcgcatctctctttggcctgatggtgaaccagtgcacagactctggcacggcgcaagcggagcagcagagactactgcatgcgattgacgtgttcttccaggagtcgggcaggagacaacagcaacatgctacagctcgacaagagacagtgccaggggattatggaccaagacagggcagcagggcccgtcgccccaaagagaagatatccggtccaggatggatccggatccggcactagtgagcctacgcctacgcctgcgctcgtgaccgatgccggccgtgcccaggttgctgctggcttgtgttcggagctcccacgcttgatttgtggggaattccggcgatcagctccgccgctcccatctcacgagtcacgaactacatccgcttccaaagaaacatgatatcttgaatcctaagtcatgaatcctgagtcagaaactctagtgaagtcgcaactactcgacgtgttttaagtttttaaggagccgtaaatttagctcttgtatttaacgagctcctcgcgaaccggaatgagctgaggaagcccaaaactgatgcccacaacaagcacaaagccaacagcccaacactaacaagaccctacgtttatctcttcctattgatttcaccctgaccctgcgccaacggcttgctgccagccatggtcttgtgctaatcgcttcttgtccggttcctacccatgcttagtgtgaccctagtgttgtctgcttcgacaccaataggtaacacgaacactaaacaagcttatccatggtcatcaagcagtctattaccttcccattcttcgtactgcatttataactcaagcttgatgaatacatgagtacgtatgtgtgttttgaattatattgtcgtctactgaataagtatatgctttttcttctcgtacatgagtatgcattttcttctcgtacattgacttca

SEQ ID NO: 83527 - DNA, 3794 bp, Zea Mays
gttctcttttcttaaatcttgttaatgatctccgacttccaagcgatgaaattcgtggagagatactctttgttctatacaaactcgctttactaaatgccaccccatgggacgatatatgtgaaactggagatttggaccttctggcaattggtagaagcttgcttcaactctctcttgaagtcctactcaaaactcaaaatgatgctgttcgcttgaactgtattgcattgctccttactttagcaaagaaggagccctttgatcatttgctgatcagcaaccagagttctaacaaatgcatagaagcagagtccatgcagacggattatatgtccctaaatgcttctcttgttctattcgctgaggctgtcaaaggatctctgctatctactaacctagaagttcaggcagggacattggatttgatctttcatttcctgtcatctgatgcaaatatttgtgctctacttcaaactttgatcgatgaaaatgttgctgattacatatttgaggttctcaggttatcagagataccatttcacccagtccagtcccatgttttacgacttgtttggatttgcatggccaattgttctggtatcctctcactgccccaagaagaacagatagcctgtactttgactgcaatcttgagaagaaatctcaatggtgaacttgacatgagttctgaaacttttattctggtttgctcaatattaatagagattctgaagtcacctcatgctcatgatattgagaaactaccatcatttattgaagaagcatcaaaatatgcgatatcttctacattgtcacatgggtatgattctacgatcctcagtactcattctcttcttcttctgaaagaagcacttatattctgccttgaagggagcaaatacaatattgctagaacgaaggatcttgaggatagcatcatgggaacttgtggaacaattttactgcaatggcttgaaagtgctgtggttgacggtaatgatgaagaaacattggctgagatccttcagattttccaaattattttgtcaagggcatctgacaaaaagccattaaaattcgctgaattgctagcatcatcatcatggctctgtgctaacaaccaaattctggcttctgttgagcaatacatcctcctcaatggtgggacctttccatatgaaatcaatggttccattatgcttacgcttctggtccatctttatgccttcatcagaggcctttcccatagctgcagcattccacacagtccagaagccgagaatacactattccacttaatcatacacaaggactgggatttgcttgtgattcgagtccattcggtagcaataaaatggctctttcagaagcaagaaattatggaaccactcgccttccagatgctaaagttttgtagaactttctgtgaagatgaaactgtcatgctttcaaacagcagtcagttggttgacatgcaaatgattgcggagcttgcactttctggagaaaccaccatctcgtctttgctggtgtccttgctagaccagatgctaaaggagggtacagaagatgagttattttcagttgtcagtgttatcgctgaaatcctcatgatctctccatgttcttccgatcaatttatatcatgtgcaaatgcatcaacatttggccaggaagatgaatggcttcctcttgttctaaagcaaagtaggttggcgtctaggtgtcggttgcttggctcagttctaacagatgttgtagtaaacaacgcttgtgttaaaggcccatctttatttcaacacaatcaggagacaacctttggagaattcctgattcttgtacttctattggtgttcttctctctaagaaggtatggggctgttgcttgcatgcttcattttatttgcttgggtctgcactaattgtggtctgcattttcacttttcagttttcataatactctataggcactaattgtagcctgtgttttcagtttgcataatctagaggcactaattgtagcctgtgttttcagtttgcatattctagaggcactaaattgtattgtttgttttcagtttgcatagcattctagaggtaagtattgactggcaggacttccttcagcattcagacgatgtccagtcattttctgttctcggtattccatgccatgatttatgccgtctcatgcacttcggttcaccttctattaagcttattgcttcacaatgcctgttggagttgctcacgagaatttcagatcaaaggtcatgtaataatgctgagttaagatgctctgtgggatatttgaagtccattattgcagtgacagagggattggtgttcagtgaagacagtaaagttgctggaaattgcagtgcctgtctctctgtgattttgggatgggagaaatttggaagccaagaaaaggtggcagtcagagaatctaaatggtttaggctaataatggaggaatttgttgtggccttgactgctcctggtttgacgtcgaaatctttctccagtcagcagaagtttgctgcgaatatggctgtttcgttgctcaggctgagccaagtgccagattggctgacatcgttgtttgatgggcatctgatatctggcatcgtggctaatctttctgctaggaatgttactgcagaaatcatcaatctcttcagtgagctcatggctaggaagtatctcagtcaagagcacattgttgatctacataacttgttgcaggtgtgcagaagccaggtctacgagggaagctccaaagcaccgttgccagagcaaagggttgaaaaagtcgcgagaagcaccaatgacgtgctcgcatctctctttggcctgatggtgaaccagtgcacagactctggcacggcgcaagcggagcagcagagactactgcatgcgattgacgtgttcttccaggagtcgggcaggagacaacagcaacatgctacagctcgacaagagacagtgccaggggattatggaccaagacagggcagcagggcccgtcgccccaaagagaagatatccggtccaggatggatccggatccggcactagtgagcctacgcctacgcctgcgctcgtgaccgatgccggccgtgcccaggttgctgctggcttgtgttcggagctcccacgcttgatttgtggggaattccggcgatcagctccgccgctcccatctcacgagtcacgaactacatccgcttccaaagaaacatgatatcttgaatcctaagtcatgaatcctgagtcagaaactctagtgaagtcgcaactactcgacgtgttttaagtttttaaggagccgtaaatttagctcttgtatttaacgagctcctcgcgaaccggaatgagctgaggaagcccaaaactgatgcccacaacaagcacaaagccaacagcccaacactaacaagaccctacgtttatctcttcctattgatttcaccctgaccctgcgccaacggcttgctgccagccatggtcttgtgctaatcgcttcttgtccggttcctacccatgcttagtgtgaccctagtgttgtctgcttcgacaccaataggtaacacgaacactaaacaagcttatccatggtcatcaagcagtctattaccttcccattcttcgtactgcatttataactcaagcttgatgaatacatgagtacgtatgtgtgttttgaattatattgtcgtctactgaataagtatatgctttttcttctcgtacatgagtatgcattttcttctcgtacattgacttca

SEQ ID NO: 83528 - DNA, 3895 bp, Zea Mays
ctgcttcctttccctgttattgtaattctggtgaaccaactacccattttgtccaaagtggcctgcagcggttttatctcatcacttatcagtcgtcgcttgagtgagatagactggatccattaaagattgcagctacattgtttggggcttttgctgaactctaccaaagatgctggagcatatataggggacaaatgttctcttttcttaaatcttgttaatgatctccgacttccaagcgatgaaattcgtggagagatactctttgttctatacaaactcgctttactaaatgccaccccatgggacgatatatgtgaaactggagatttggaccttctggcaattggtagaagcttgcttcaactctctcttgaagtcctactcaaaactcaaaatgatgctgttcgcttgaactgtattgcattgctccttactttagcaaagaaggagccctttgatcatttgctgatcagcaaccagagttctaacaaatgcatagaagcagagtccatgcagacggattatatgtccctaaatgcttctcttgttctattcgctgaggctgtcaaaggatctctgctatctactaacctagaagttcaggcagggacattggatttgatctttcatttcctgtcatctgatgcaaatatttgtgctctacttcaaactttgatcgatgaaaatgttgctgattacatatttgaggttctcaggttatcagagataccatttcacccagtccagtcccatgttttacgacttgtttggatttgcatggccaattgttctggtatcctctcactgccccaagaagaacagatagcctgtactttgactgcaatcttgagaagaaatctcaatggtgaacttgacatgagttctgaaacttttattctggtttgctcaatattaatagagattctgaagtcacctcatgctcatgatattgagaaactaccatcatttattgaagaagcatcaaaatatgcgatatcttctacattgtcacatgggtatgattctacgatcctcagtactcattctcttcttcttctgaaagaagcacttatattctgccttgaagggagcaaatacaatattgctagaacgaaggatcttgaggatagcatcatgggaacttgtggaacaattttactgcaatggcttgaaagtgctgtggttgacggtaatgatgaagaaacattggctgagatccttcagattttccaaattattttgtcaagggcatctgacaaaaagccattaaaattcgctgaattgctagcatcatcatcatggctctgtgctaacaaccaaattctggcttctgttgagcaatacatcctcctcaatggtgggacctttccatatgaaatcaatggttccattatgcttacgcttctggtccatctttatgccttcatcagaggcctttcccatagctgcagcattccacacagtccagaagccgagaatacactattccacttaatcatacacaaggactgggatttgcttgtgattcgagtccattcggtagcaataaaatggctctttcagaagcaagaaattatggaaccactcgccttccagatgctaaagttttgtagaactttctgtgaagatgaaactgtcatgctttcaaacagcagtcagttggttgacatgcaaatgattgcggagcttgcactttctggagaaaccaccatctcgtctttgctggtgtccttgctagaccagatgctaaaggagggtacagaagatgagttattttcagttgtcagtgttatcgctgaaatcctcatgatctctccatgttcttccgatcaatttatatcatgtggtattatcggttcattccatggcatatattgcttaccatactcttcaaggagcagaacagtttgttcctatttgatctttaacatcttatgctcagcaaatgcatcaacatttggccaggaagatgaatggcttcctcttgttctaaagttattggaatttatcagttcgggtattgattatacctctagtggccaagaacacaagatagtaatgttgtagtaaacaacgcttgtgttaaaggcccatctttatttcaacacaatcaggagacaacctttggagaattcctgattcttgtacttctattggtgttcttctctctaagaagtttgcatagcattctagaggtaagtattgactggcaggacttccttcagcattcagacgatgtccagtcattttctgttctcggtattccatgccatgatttatgccgtctcatgcacttcggttcaccttctattaagcttattgcttcacaatgcctgttggagttgctcacgagaatttcagatcaaaggtcatgtaataatgctgagttaagatgctctgtgggatatttgaagtccattattgcagtgacagagggattggtgttcagtgaagacagtaaagttgctggaaattgcagtgcctgtctctctgtgattttgggatgggagaaatttggaagccaagaaaaggtggcagtcagagaatctaaatggtttaggctaataatggaggaatttgttgtggccttgactgctcctggtttgacgtcgaaatctttctccagtcagcagaagtttgctgcgaatatggctgtttcgttgctcaggctgagccaagtgccagattggctgacatcgttgtttgatgggcatctgatatctggcatcgtggctaatctttctgctaggaatgttactgcagaaatcatcaatctcttcagtgagctcatggctaggaagtatctcagtcaagagcacattgttgatctacataacttgttgcaggtgtgcagaagccaggtctacgagggaagctccaaagcaccgttgccagagcaaagggttgaaaaagtcgcgagaagcaccaatgacgtgctcgcatctctctttggcctgatggtgaaccagtgcacagactctggcacggcgcaagcggagcagcagagactactgcatgcgattgacgtgttcttccaggagtcgggcaggagacaacagcaacatgctacagctcgacaagagacagtgccaggggattatggaccaagacagggcagcagggcccgtcgccccaaagagaagatatccggtccaggatggatccggatccggcactagtgagcctacgcctacgcctgcgctcgtgaccgatgccggccgtgcccaggttgctgctggcttgtgttcggagctcccacgcttgatttgtggggaattccggcgatcagctccgccgctcccatctcacgagtcacgaactacatccgcttccaaagaaacatgatatcttgaatcctaagtcatgaatcctgagtcagaaactctagtgaagtcgcaactactcgacgtgttttaagtttttaaggagccgtaaatttagctcttgtatttaacgagctcctcgcgaaccggaatgagctgaggaagcccaaaactgatgcccacaacaagcacaaagccaacagcccaacactaacaagaccctacgtttatctcttcctattgatttcaccctgaccctgcgccaacggcttgctgccagccatggtcttgtgctaatcgcttcttgtccggttcctacccatgcttagtgtgaccctagtgttgtctgcttcgacaccaataggtaacacgaacactaaacaagcttatccatggtcatcaagcagtctattaccttcccattcttcgtactgcatttataactcaagcttgatgaatacatgagtacgtatgtgtgttttgaattatattgtcgtctactgaataagtatatgctttttcttctcgtacatgagtatgcattttcttctcgtacattgacttca

SEQ ID NO: 83529 - DNA, 4023 bp, Zea Mays
gactaatctcactggatccattgaataagtgcagctacattgtttggggcttttgctgaactctaccaaagatgctggagcatatataggggacaaatgttctcttttcttaaatcttgttaatgatctccgacttccaagcgatgaaattcgtggagagatactctttgttctatacaaactcgctttactaaatgccaccccatgggacgatatatgtgaaactggagatttggaccttctggcaattggtagaagcttgcttcaactctctcttgaagtcctactcaaaactcaaaatgatgctgttcgcttgaactgtattgcattgctccttactttagcaaagaaggagccctttgatcatttgctgatcagcaaccagagttctaacaaatgcatagaagcagagtccatgcagacggattatatgtccctaaatgcttctcttgttctattcgctgaggctgtcaaaggatctctgctatctactaacctagaagttcaggcagggacattggatttgatctttcatttcctgtcatctgatgcaaatatttgtgctctacttcaaactttgatcgatgaaaatgttgctgattacatatttgaggttctcaggttatcaggaaataatgatctgcttgtcatttcctctattcgggtactattactttttgcgagatcagaggaaaatttcaaagaaaagcttgccattggattttccactcttcttcctgttcttcactatgttgcagagataccatttcacccagtccagtcccatgttttacgacttgtttggatttgcatggccaattgttctggtatcctctcactgccccaagaagaacagatagcctgtactttgactgcaatcttgagaagaaatctcaatggtgaacttgacatgagttctgaaacttttattctggtttgctcaatattaatagagattctgaagtcacctcatgctcatgatattgagaaactaccatcatttattgaagaagcatcaaaatatgcgatatcttctacattgtcacatgggtatgattctacgatcctcagtactcattctcttcttcttctgaaagaagcacttatattctgccttgaagggagcaaatacaatattgctagaacgaaggatcttgaggatagcatcatgggaacttgtggaacaattttactgcaatggcttgaaagtgctgtggttgacggtaatgatgaagaaacattggctgagatccttcagattttccaaattattttgtcaagggcatctgacaaaaagccattaaaattcgctgaattgctagcatcatcatcatggctctgtgctaacaaccaaattctggcttctgttgagcaatacatcctcctcaatggtgggacctttccatatgaaatcaatggttccattatgcttacgcttctggtccatctttatgccttcatcagaggcctttcccatagctgcagcattccacacagtccagaagccgagaatacactattccacttaatcatacacaaggactgggatttgcttgtgattcgagtccattcggtagcaataaaatggctctttcagaagcaagaaattatggaaccactcgccttccagatgctaaagttttgtagaactttctgtgaagatgaaactgtcatgctttcaaacagcagtcagttggttgacatgcaaatgattgcggagcttgcactttctggagaaaccaccatctcgtctttgctggtgtccttgctagaccagatgctaaaggagggtacagaagatgagttattttcagttgtcagtgttatcgctgaaatcctcatgatctctccatgttcttccgatcaatttatatcatgtggtattatcggttcattccatggcatatattgcttaccatactcttcaaggagcagaacagtttgttcctatttgatctttaacatcttatgctcagcaaatgcatcaacatttggccaggaagatgaatggcttcctcttgttctaaagttattggaatttatcagttcgggtattgattatacctctagtggccaagaacacaagatagtagttgggatactatgccttgttttacatcattcgtcaagcaactttcttattgagcctgcaaaagccataatattgaacagttctttggtttctttaacagatgttgtagtaaacaacgcttgtgttaaaggcccatctttatttcaacacaatcaggagacaacctttggagaattcctgattcttgtacttctattggtgttcttctctctaagaagtttgcatagcattctagaggtaagtattgactggcaggacttccttcagcattcagacgatgtccagtcattttctgttctcggtattccatgccatgatttatgccgtctcatgcacttcggttcaccttctattaagcttattgcttcacaatgcctgttggagttgctcacgagaatttcagatcaaaggtcatgtaataatgctgagttaagatgctctgtgggatatttgaagtccattattgcagtgacagagggattggtgttcagtgaagacagtaaagttgctggaaattgcagtgcctgtctctctgtgattttgggatgggagaaatttggaagccaagaaaaggtggcagtcagagaatctaaatggtttaggctaataatggaggaatttgttgtggccttgactgctcctggtttgacgtcgaaatctttctccagtcagcagaagtttgctgcgaatatggctgtttcgttgctcaggctgagccaagtgccagattggctgacatcgttgtttgatgggcatctgatatctggcatcgtggctaatctttctgctaggaatgttactgcagaaatcatcaatctcttcagtgagctcatggctaggaagtatctcagtcaagagcacattgttgatctacataacttgttgcaggtgtgcagaagccaggtctacgagggaagctccaaagcaccgttgccagagcaaagggttgaaaaagtcgcgagaagcaccaatgacgtgctcgcatctctctttggcctgatggtgaaccagtgcacagactctggcacggcgcaagcggagcagcagagactactgcatgcgattgacgtgttcttccaggagtcgggcaggagacaacagcaacatgctacagctcgacaagagacagtgccaggggattatggaccaagacagggcagcagggcccgtcgccccaaagagaagatatccggtccaggatggatccggatccggcactagtgagcctacgcctacgcctgcgctcgtgaccgatgccggccgtgcccaggttgctgctggcttgtgttcggagctcccacgcttgatttgtggggaattccggcgatcagctccgccgctcccatctcacgagtcacgaactacatccgcttccaaagaaacatgatatcttgaatcctaagtcatgaatcctgagtcagaaactctagtgaagtcgcaactactcgacgtgttttaagtttttaaggagccgtaaatttagctcttgtatttaacgagctcctcgcgaaccggaatgagctgaggaagcccaaaactgatgcccacaacaagcacaaagccaacagcccaacactaacaagaccctacgtttatctcttcctattgatttcaccctgaccctgcgccaacggcttgctgccagccatggtcttgtgctaatcgcttcttgtccggttcctacccatgcttagtgtgaccctagtgttgtctgcttcgacaccaataggtaacacgaacactaaacaagcttatccatggtcatcaagcagtctattaccttcccattcttcgtactgcatttataactcaagcttgatgaatacatgagtacgtatgtgtgttttgaattatattgtcgtctactgaataagtatatgctttttcttctcgtacatgagtatgcattttcttctcgtacattgacttca

SEQ ID NO: 83530 - DNA, 4944 bp, Zea Mays
atggaatccgacggcgacacgtcgccacctcgcccgcctacgccggcgccagtgcgtgcctgcggcgcgggccacccggcatcgcactcgctgccgacctcggcgggcggccgtgtctgcctctcctgtgtcgtggcgctcctctcctccgcgggcaacgcctccacgccatcccaccacgtcgcgcacgcgctggccaacctctccctggcgctcgccgacccggcattcctcaggccgctccgcgccgcgcacccacacctcctcgcggcgccgctcgccgaggcgctcgagggcgccgccgaacgccgcgatgccgcgctcgccgcgcaggcgtgcgacgtcgcggccgacctcgccgccgtcgtgggcgccccggctgattcagagctcgtcgcccgccttgcccgcgtcctctcctccggctcactcgtcaagcacctccatacgtgcagctacattgtttggggcttttgctgaactctaccaaagatgctggagcatatataggggacaaatgttctcttttcttaaatcttgttaatgatctccgacttccaagcgatgaaattcgtggagagatactctttgttctatacaaactcgctttactaaatgccaccccatgggacgatatatgtgaaactggagatttggaccttctggcaattggtagaagcttgcttcaactctctcttgaagtcctactcaaaactcaaaatgatgctgttcgcttgaactgtattgcattgctccttactttagcaaagaaggagccctttgatcatttgctgatcagcaaccagagttctaacaaatgcatagaagcagagtccatgcagacggattatatgtccctaaatgcttctcttgttctattcgctgaggctgtcaaaggatctctgctatctactaacctagaagttcaggcagggacattggatttgatctttcatttcctgtcatctgatgcaaatatttgtgctctacttcaaactttgatcgatgaaaatgttgctgattacatatttgaggttctcaggttatcaggaaataatgatctgcttgtcatttcctctattcgggtactattactttttgcgagatcagaggaaaatttcaaagaaaagcttgccattggattttccactcttcttcctgttcttcactatgttgcagagataccatttcacccagtccagtcccatgttttacgacttgtttggatttgcatggccaattgttctggtatcctctcactgccccaagaagaacagatagcctgtactttgactgcaatcttgagaagaaatctcaatggtgaacttgacatgagttctgaaacttttattctggtttgctcaatattaatagagattctgaagtcacctcatgctcatgatattgagaaactaccatcatttattgaagaagcatcaaaatatgcgatatcttctacattgtcacatgggtatgattctacgatcctcagtactcattctcttcttcttctgaaagaagcacttatattctgccttgaagggagcaaatacaatattgctagaacgaaggatcttgaggatagcatcatgggaacttgtggaacaattttactgcaatggcttgaaagtgctgtggttgacggtaatgatgaagaaacattggctgagatccttcagattttccaaattattttgtcaagggcatctgacaaaaagccattaaaattcgctgaattgctagcatcatcatcatggctctgtgctaacaaccaaattctggcttctgttgagcaatacatcctcctcaatggtgggacctttccatatgaaatcaatggttccattatgcttacgcttctggtccatctttatgccttcatcagaggcctttcccatagctgcagcattccacacagtccagaagccgagaatacactattccacttaatcatacacaaggactgggatttgcttgtgattcgagtccattcggtagcaataaaatggctctttcagaagcaagaaattatggaaccactcgccttccagatgctaaagttttgtagaactttctgtgaagatgaaactgtcatgctttcaaacagcagtcagttggttgacatgcaaatgattgcggagcttgcactttctggagaaaccaccatctcgtctttgctggtgtccttgctagaccagatgctaaaggagggtacagaagatgagttattttcagttgtcagtgttatcgctgaaatcctcatgatctctccatgttcttccgatcaatttatatcatgtggtattatcggttcattccatggcatatattgcttaccatactcttcaaggagcagaacagtttgttcctatttgatctttaacatcttatgctcagcaaatgcatcaacatttggccaggaagatgaatggcttcctcttgttctaaaggtactcttattctgtctatttaacttgaacctcgtaagttacattcagataatattattattcgctggctattaatagcttcatgggatgcctattcggctaacttgtggatatagcaaagtaggttggcgtctaggtgtcggttgcttggctcagttctaacaggtgcgtatgtaatcacagaacattatagtggtgtgtgtgggtgtttcaatgtttgtggttgtcacttcatgttgtcccatttttgtttttaatataatgatacacggctctcctgtgtgttcaagaaaaaaaaagaaattccagtgcagtacacgtagtgttttaaatattgtctttctttggattacttggtagggatcccacatcattaacgcttagttgtctgtttagaccagtgcagctttccaaaaagaatgcatcactagctagtattgcatttgtattactggttagatttataatttttctgattcagaaattacttttgcttgcagttattggaatttatcagttcgggtattgattatacctctagtggccaagaacacaagatagtagttgggatactatgccttgttttacatcattcgtcaagcaactttcttattgagcctgcaaaagccataatattgaacagttctttggtttctttaacagatgttgtagtaaacaacgcttgtgttaaaggcccatctttatttcaacacaatcaggagacaacctttggagaattcctgattcttgtacttctattggtgttcttctctctaagaagtttgcatagcattctagaggtaagtattgactggcaggacttccttcagcattcagacgatgtccagtcattttctgttctcggtattccatgccatgatttatgccgtctcatgcacttcggttcaccttctattaagcttattgcttcacaatgcctgttggagttgctcacgagaatttcagatcaaaggtcatgtaataatgctgagttaagatgctctgtgggatatttgaagtccattattgcagtgacagagggattggtgttcagtgaagacagtaaagttgctggaaattgcagtgcctgtctctctgtgattttgggatgggagaaatttggaagccaagaaaaggtggcagtcagagaatctaaatggtttaggctaataatggaggaatttgttgtggccttgactgctcctggtttgacgtcgaaatctttctccagtcagcagaagtttgctgcgaatatggctgtttcgttgctcaggctgagccaagtgccagattggctgacatcgttgtttgatgggcatctgatatctggcatcgtggctaatctttctgctaggaatgttactgcagaaatcatcaatctcttcagtgagctcatggctaggaagtatctcagtcaagagcacattgttgatctacataacttgttgcaggtgtgcagaagccaggtctacgagggaagctccaaagcaccgttgccagagcaaagggttgaaaaagtcgcgagaagcaccaatgacgtgctcgcatctctctttggcctgatggtgaaccagtgcacagactctggcacggcgcaagcggagcagcagagactactgcatgcgattgacgtgttcttccaggagtcgggcaggagacaacagcaacatgctacagctcgacaagagacagtgccaggggattatggaccaagacagggcagcagggcccgtcgccccaaagagaagatatccggtccaggatggatccggatccggcactagtgagcctacgcctacgcctgcgctcgtgaccgatgccggccgtgcccaggttgctgctggcttgtgttcggagctcccacgcttgatttgtggggaattccggcgatcagctccgccgctcccatctcacgagtcacgaactacatccgcttccaaagaaacatgatatcttgaatcctaagtcatgaatcctgagtcagaaactctagtgaagtcgcaactactcgacgtgttttaagtttttaaggagccgtaaatttagctcttgtatttaacgagctcctcgcgaaccggaatgagctgaggaagcccaaaactgatgcccacaacaagcacaaagccaacagcccaacactaacaagaccctacgtttatctcttcctattgatttcaccctgaccctgcgccaacggcttgctgccagccatggtcttgtgctaatcgcttcttgtccggttcctacccatgcttagtgtgaccctagtgttgtctgcttcgacaccaataggtaacacgaacactaaacaagcttatccatggtcatcaagcagtctattaccttcccattcttcgtactgcatttataactcaagcttgatgaatacatgagtacgtatgtgtgttttgaattatattgtcgtctactgaataagtatatgctttttcttctcgtacatgagtatgcattttcttctcgtacattgacttca

SEQ ID NO: 83531 - DNA, 4683 bp, Zea Mays
atggaatccgacggcgacacgtcgccacctcgcccgcctacgccggcgccagtgcgtgcctgcggcgcgggccacccggcatcgcactcgctgccgacctcggcgggcggccgtgtctgcctctcctgtgtcgtggcgctcctctcctccgcgggcaacgcctccacgccatcccaccacgtcgcgcacgcgctggccaacctctccctggcgctcgccgacccggcattcctcaggccgctccgcgccgcgcacccacacctcctcgcggcgccgctcgccgaggcgctcgagggcgccgccgaacgccgcgatgccgcgctcgccgcgcaggcgtgcgacgtcgcggccgacctcgccgccgtcgtgggcgccccggctgattcagagctcgtcgcccgccttgcccgcgtcctctcctccggctcactcgtcaagcacctccatacgctacattgtttggggcttttgctgaactctaccaaagatgctggagcatatataggggacaaatgttctcttttcttaaatcttgttaatgatctccgacttccaagcgatgaaattcgtggagagatactctttgttctatacaaactcgctttactaaatgccaccccatgggacgatatatgtgaaactggagatttggaccttctggcaattggtagaagcttgcttcaactctctcttgaagtcctactcaaaactcaaaatgatgctgttcgcttgaactgtattgcattgctccttactttagcaaagaaggagccctttgatcatttgctgatcagcaaccagagttctaacaaatgcatagaagcagagtccatgcagacggattatatgtccctaaatgcttctcttgttctattcgctgaggctgtcaaaggatctctgctatctactaacctagaagttcaggcagggacattggatttgatctttcatttcctgtcatctgatgcaaatatttgtgctctacttcaaactttgatcgatgaaaatgttgctgattacatatttgaggttctcaggttatcagagataccatttcacccagtccagtcccatgttttacgacttgtttggatttgcatggccaattgttctggtatcctctcactgccccaagaagaacagatagcctgtactttgactgcaatcttgagaagaaatctcaatggtgaacttgacatgagttctgaaacttttattctggtttgctcaatattaatagagattctgaagtcacctcatgctcatgatattgagaaactaccatcatttattgaagaagcatcaaaatatgcgatatcttctacattgtcacatgggtatgattctacgatcctcagtactcattctcttcttcttctgaaagaagcacttatattctgccttgaagggagcaaatacaatattgctagaacgaaggatcttgaggatagcatcatgggaacttgtggaacaattttactgcaatggcttgaaagtgctgtggttgacggtaatgatgaagaaacattggctgagatccttcagattttccaaattattttgtcaagggcatctgacaaaaagccattaaaattcgctgaattgctagcatcatcatcatggctctgtgctaacaaccaaattctggcttctgttgagcaatacatcctcctcaatggtgggacctttccatatgaaatcaatggttccattatgcttacgcttctggtccatctttatgccttcatcagaggcctttcccatagctgcagcattccacacagtccagaagccgagaatacactattccacttaatcatacacaaggactgggatttgcttgtgattcgagtccattcggtagcaataaaatggctctttcagaagcaagaaattatggaaccactcgccttccagatgctaaagttttgtagaactttctgtgaagatgaaactgtcatgctttcaaacagcagtcagttggttgacatgcaaatgattgcggagcttgcactttctggagaaaccaccatctcgtctttgctggtgtccttgctagaccagatgctaaaggagggtacagaagatgagttattttcagttgtcagtgttatcgctgaaatcctcatgatctctccatgttcttccgatcaatttatatcatgtggtattatcggttcattccatggcatatattgcttaccatactcttcaaggagcagaacagtttgttcctatttgatctttaacatcttatgctcagcaaatgcatcaacatttggccaggaagatgaatggcttcctcttgttctaaaggtactcttattctgtctatttaacttgaacctcgtaagttacattcagataatattattattcgctggctattaatagcttcatgggatgcctattcggctaacttgtggatatagcaaagtaggttggcgtctaggtgtcggttgcttggctcagttctaacagttattggaatttatcagttcgggtattgattatacctctagtggccaagaacacaagatagtagttgggatactatgccttgttttacatcattcgtcaagcaactttcttattgagcctgcaaaagccataatattgaacagttctttggtttctttaacagatgttgtagtaaacaacgcttgtgttaaaggcccatctttatttcaacacaatcaggagacaacctttggagaattcctgattcttgtacttctattggtgttcttctctctaagaaggtatggggctgttgcttgcatgcttcattttatttgcttgggtctgcactaattgtggtctgcattttcacttttcagttttcataatactctataggcactaattgtagcctgtgttttcagtttgcataatctagaggcactaattgtagcctgtgttttcagtttgcatattctagaggcactaaattgtattgtttgttttcagtttgcatagcattctagaggtaagtattgactggcaggacttccttcagcattcagacgatgtccagtcattttctgttctcggtattccatgccatgatttatgccgtctcatgcacttcggttcaccttctattaagcttattgcttcacaatgcctgttggagttgctcacgagaatttcagatcaaaggtcatgtaataatgctgagttaagatgctctgtgggatatttgaagtccattattgcagtgacagagggattggtgttcagtgaagacagtaaagttgctggaaattgcagtgcctgtctctctgtgattttgggatgggagaaatttggaagccaagaaaaggtggcagtcagagaatctaaatggtttaggctaataatggaggaatttgttgtggccttgactgctcctggtttgacgtcgaaatctttctccagtcagcagaagtttgctgcgaatatggctgtttcgttgctcaggctgagccaagtgccagattggctgacatcgttgtttgatgggcatctgatatctggcatcgtggctaatctttctgctaggaatgttactgcagaaatcatcaatctcttcagtgagctcatggctaggaagtatctcagtcaagagcacattgttgatctacataacttgttgcaggtgtgcagaagccaggtctacgagggaagctccaaagcaccgttgccagagcaaagggttgaaaaagtcgcgagaagcaccaatgacgtgctcgcatctctctttggcctgatggtgaaccagtgcacagactctggcacggcgcaagcggagcagcagagactactgcatgcgattgacgtgttcttccaggagtcgggcaggagacaacagcaacatgctacagctcgacaagagacagtgccaggggattatggaccaagacagggcagcagggcccgtcgccccaaagagaagatatccggtccaggatggatccggatccggcactagtgagcctacgcctacgcctgcgctcgtgaccgatgccggccgtgcccaggttgctgctggcttgtgttcggagctcccacgcttgatttgtggggaattccggcgatcagctccgccgctcccatctcacgagtcacgaactacatccgcttccaaagaaacatgatatcttgaatcctaagtcatgaatcctgagtcagaaactctagtgaagtcgcaactactcgacgtgttttaagtttttaaggagccgtaaatttagctcttgtatttaacgagctcctcgcgaaccggaatgagctgaggaagcccaaaactgatgcccacaacaagcacaaagccaacagcccaacactaacaagaccctacgtttatctcttcctattgatttcaccctgaccctgcgccaacggcttgctgccagccatggtcttgtgctaatcgcttcttgtccggttcctacccatgcttagtgtgaccctagtgttgtctgcttcgacaccaataggtaacacgaacactaaacaagcttatccatggtcatcaagcagtctattaccttcccattcttcgtactgcatttataactcaagcttgatgaatacatgagtacgtatgtgtgttttgaattatattgtcgtctactgaataagtatatgctttttcttctcgtacatgagtatgcattttcttctcgtacattgacttca

SEQ ID NO: 83532 - DNA, 3915 bp, Zea Mays
cagctgcaacagtgtcggcttgtagccagccgaacacgcccttagtgaactcatgatacgttccttttgttgaaacctcgaaatcagtaaaataataaaacttctgctacagcgataccttttgccgtaaaaagtactgcagaggaactcgttaccccatggaatccgacggcgacacgtcgccacctcgcccgcctacgccggcgccagtgcgtgcctgcggcgcgggccacccggcatcgcactcgctgccgacctcggcgggcggccgtgtctgcctctcctgtgtcgtggcgctcctctcctccgcgggcaacgcctccacgccatcccaccacgtcgcgcacgcgctggccaacctctccctggcgctcgccgacccggcattcctcaggccgctccgcgccgcgcacccacacctcctcgcggcgccgctcgccgaggcgctcgagggcgccgccgaacgccgcgatgccgcgctcgccgcgcaggcgtgcgacgtcgcggccgacctcgccgccgtcgtgggcgccccggctgattcagagctcgtcgcccgccttgcccgcgtcctctcctccggctcactcgtcaagcacctccatacgggcatggcccctgaggtggagcgtgtggggcggacccagagtgtcagcgcggaggttgaagtcgttgtagtaccagcattgctccttactttagcaaagaaggagccctttgatcatttgctgatcagcaaccagagttctaacaaatgcatagaagcagagtccatgcagacggattatatgtccctaaatgcttctcttgttctattcgctgaggctgtcaaaggatctctgctatctactaacctagaagttcaggcagggacattggatttgatctttcatttcctgtcatctgatgcaaatatttgtgctctacttcaaactttgatcgatgaaaatgttgctgattacatatttgaggttctcaggttatcaggaaataatgatctgcttgtcatttcctctattcgggtactattactttttgcgagatcagaggaaaatttcaaagaaaagcttgccattggattttccactcttcttcctgttcttcactatgttgcagagataccatttcacccagtccagtcccatgttttacgacttgtttggatttgcatggccaattgttctggtatcctctcactgccccaagaagaacagatagcctgtactttgactgcaatcttgagaagaaatctcaatggtgaacttgacatgagttctgaaacttttattctggtttgctcaatattaatagagattctgaagtcacctcatgctcatgatattgagaaactaccatcatttattgaagaagcatcaaaatatgcgatatcttctacattgtcacatggggagcaaatacaatattgctagaacgaaggatcttgaggatagcatcatgggaacttgtggaacaattttactgcaatggcttgaaagtgctgtggttgacggtaatgatgaagaaacattggctgagatccttcagattttccaaattattttgtcaagggcatctgacaaaaagccattaaaattcgctgaattgctagcatcatcatcatggctctgtgctaacaaccaaattctggcttctgttgagcaatacatcctcctcaatggtgggacctttccatatgaaatcaatggttccattatgcttacgcttctggtccatctttatgccttcatcagaggcctttcccatagctgcagcattccacacagtccagaagccgagaatacactattccacttaatcatacacaaggactgggatttgcttgtgattcgagtccattcggtagcaataaaatggctctttcagaagcaagaaattatggaaccactcgccttccagatgctaaagttttgtagaactttctgtgaagatgaaactgtcatgctttcaaacagcagtcagttggttgacatgcaaatgattgcggagcttgcactttctggagaaaccaccatctcgtctttgctggtgtccttgctagaccagatgctaaaggagggtacagaagatgagttattttcagttgtcagtgttatcgctgaaatcctcatgatctctccatgttcttccgatcaatttatatcatgtgcaaatgcatcaacatttggccaggaagatgaatggcttcctcttgttctaaagcaaagtaggttggcgtctaggtgtcggttgcttggctcagttctaacagatgttgtagtaaacaacgcttgtgttaaaggcccatctttatttcaacacaatcaggagacaacctttggagaattcctgattcttgtacttctattggtgttcttctctctaagaagatcaaaggtcatgtaataatgctgagttaagatgctctgtgggatatttgaagtccattattgcagtgacagagggattggtgttcagtgaagacagtaaagttgctggaaattgcagtgcctgtctctctgtgattttgggatgggagaaatttggaagccaagaaaaggtggcagtcagagaatctaaatggtttaggctaataatggaggaatttgttgtggccttgactgctcctggtttgacgtcgaaatctttctccagtcagcagaagtttgctgcgaatatggctgtttcgttgctcaggctgagccaagtgccagattggctgacatcgttgtttgatgggcatctgatatctggcatcgtggctaatctttctgctaggaatgttactgcagaaatcatcaatctcttcagtgagctcatggctaggaagtatctcagtcaagagcacattgttgatctacataacttgttgcaggtgtgcagaagccaggtctacgagggaagctccaaagcaccgttgccagagcaaagggttgaaaaagtcgcgagaagcaccaatgacgtgctcgcatctctctttggcctgatggtgaaccagtgcacagactctggcacggcgcaagcggagcagcagagactactgcatgcgattgacgtgttcttccaggagtcgggcaggagacaacagcaacatgctacagctcgacaagagacagtgccaggggattatggaccaagacagggcagcagggcccgtcgccccaaagagaagatatccggtccaggatggatccggatccggcactagtgagcctacgcctacgcctgcgctcgtgaccgatgccggccgtgcccaggttgctgctggcttgtgttcggagctcccacgcttgatttgtggggaattccggcgatcagctccgccgctcccatctcacgagtcacgaactacatccgcttccaaagaaacatgatatcttgaatcctaagtcatgaatcctgagtcagaaactctagtgaagtcgcaactactcgacgtgttttaagtttttaaggagccgtaaatttagctcttgtatttaacgagctcctcgcgaaccggaatgagctgaggaagcccaaaactgatgcccacaacaagcacaaagccaacagcccaacactaacaagaccctacgtttatctcttcctattgatttcaccctgaccctgcgccaacggcttgctgccagccatggtcttgtgctaatcgcttcttgtccggttcctacccatgcttagtgtgaccctagtgttgtctgcttcgacaccaataggtaacacgaacactaaacaagcttatccatggtcatcaagcagtctattaccttcccattcttcgtactgcatttataactcaagcttgatgaatacatgagtacgtatgtgtgttttgaattatattgtcgtctactgaataagtatatgctttttcttctcgtacatgagtatgcattttcttctcgtacattgacttca

SEQ ID NO: 83533 - DNA, 4857 bp, Zea Mays
ccgaccgttgctcctctgggctgaattgcgcaccgaacactgacagtccggtgcaccagccgatcgttggagcattccacgtgctgcgcgaagattgcgcggccgaccgctggctcaccggacagtccggtgaattatagccacgtcgtccaattgcttttcccgagagcgacgagttcgccgaggatgcctcaccggacagtccggtgcaccaccggacagtctggtgaattatagcagtacgccgccgtcgattcccgagatcagcactttcaccggagaccagcctggcgcaccagacagtccggtgtgccagactgagctgaagtttggctgcacagagccaagtcttttcggtttcttttctttttcttttctcactgtttctagcacttaaagaacttcattagtattaaaaacaaatatactaagtctagaaacatacctcatgccttgatttgcacttttcaacccttgacacgttaggacttaaagaaacgtgttgggcacttaatcaacaaaacattatagaaattgtcaaggacacatttcccttttaattttttatatctctctttcacataagaaaaatacaatataagcaggtttatagctcattattttaattgctcttatgattatatgagcaaggaggcttacagcttgttcgctgcggcttgctgcggctgcaatccggctgcggctgcggcttctacagtatttttctctctatggattgcagctgcagcaatccaaacagctgcaacagtgtcggcttgtagccagccgaacacgcccttagtgaactcatgatacgttccttttgttgaaacctcgaaatcagtaaaataataaaacttctgctacagcgataccttttgccgtaaaaagtactgcagaggaactcgttaccccatggaatccgacggcgacacgtcgccacctcgcccgcctacgccggcgccagtgcgtgcctgcggcgcgggccacccggcatcgcactcgctgccgacctcggcgggcggccgtgtctgcctctcctgtgtcgtggcgctcctctcctccgcgggcaacgcctccacgccatcccaccacgtcgcgcacgcgctggccaacctctccctggcgctcgccgacccggcattcctcaggccgctccgcgccgcgcacccacacctcctcgcggcgccgctcgccgaggcgctcgagggcgccgccgaacgccgcgatgccgcgctcgccgcgcaggcgtgcgacgtcgcggccgacctcgccgccgtcgtgggcgccccggctgattcagagctcgtcgcccgccttgcccgcgtcctctcctccggctcactcgtcaagcacctccatacgggcatggcccctgaggtggagcgtgtggggcggacccagagtgtcagcgcggaggttgaagtcgttgtagtaccagcattgctccttactttagcaaagaaggagccctttgatcatttgctgatcagcaaccagagttctaacaaatgcatagaagcagagtccatgcagacggattatatgtccctaaatgcttctcttgttctattcgctgaggctgtcaaaggatctctgctatctactaacctagaagttcaggcagggacattggatttgatctttcatttcctgtcatctgatgcaaatatttgtgctctacttcaaactttgatcgatgaaaatgttgctgattacatatttgaggttctcaggttatcaggaaataatgatctgcttgtcatttcctctattcgggtactattactttttgcgagatcagaggaaaatttcaaagaaaagcttgccattggattttccactcttcttcctgttcttcactatgttgcagagataccatttcacccagtccagtcccatgttttacgacttgtttggatttgcatggccaattgttctggtatcctctcactgccccaagaagaacagatagcctgtactttgactgcaatcttgagaagaaatctcaatggtgaacttgacatgagttctgaaacttttattctggtttgctcaatattaatagagattctgaagtcacctcatgctcatgatattgagaaactaccatcatttattgaagaagcatcaaaatatgcgatatcttctacattgtcacatggggagcaaatacaatattgctagaacgaaggatcttgaggatagcatcatgggaacttgtggaacaattttactgcaatggcttgaaagtgctgtggttgacggtaatgatgaagaaacattggctgagatccttcagattttccaaattattttgtcaagggcatctgacaaaaagccattaaaattcgctgaattgctagcatcatcatcatggctctgtgctaacaaccaaattctggcttctgttgagcaatacatcctcctcaatggtgggacctttccatatgaaatcaatggttccattatgcttacgcttctggtccatctttatgccttcatcagaggcctttcccatagctgcagcattccacacagtccagaagccgagaatacactattccacttaatcatacacaaggactgggatttgcttgtgattcgagtccattcggtagcaataaaatggctctttcagaagcaagaaattatggaaccactcgccttccagatgctaaagttttgtagaactttctgtgaagatgaaactgtcatgctttcaaacagcagtcagttggttgacatgcaaatgattgcggagcttgcactttctggagaaaccaccatctcgtctttgctggtgtccttgctagaccagatgctaaaggagggtacagaagatgagttattttcagttgtcagtgttatcgctgaaatcctcatgatctctccatgttcttccgatcaatttatatcatgtgcaaatgcatcaacatttggccaggaagatgaatggcttcctcttgttctaaagcaaagtaggttggcgtctaggtgtcggttgcttggctcagttctaacagatgttgtagtaaacaacgcttgtgttaaaggcccatctttatttcaacacaatcaggagacaacctttggagaattcctgattcttgtacttctattggtgttcttctctctaagaagtttgcatagcattctagaggtaagtattgactggcaggacttccttcagcattcagacgatgtccagtcattttctgttctcggtattccatgccatgatttatgccgtctcatgcacttcggttcaccttctattaagcttattgcttcacaatgcctgttggagttgctcacgagaatttcagatcaaaggtcatgtaataatgctgagttaagatgctctgtgggatatttgaagtccattattgcagtgacagagggattggtgttcagtgaagacagtaaagttgctggaaattgcagtgcctgtctctctgtgattttgggatgggagaaatttggaagccaagaaaaggtggcagtcagagaatctaaatggtttaggctaataatggaggaatttgttgtggccttgactgctcctggtttgacgtcgaaatctttctccagtcagcagaagtttgctgcgaatatggctgtttcgttgctcaggctgagccaagtgccagattggctgacatcgttgtttgatgggcatctgatatctggcatcgtggctaatctttctgctaggaatgttactgcagaaatcatcaatctcttcagtgagctcatggctaggaagtatctcagtcaagagcacattgttgatctacataacttgttgcaggtgtgcagaagccaggtctacgagggaagctccaaagcaccgttgccagagcaaagggttgaaaaagtcgcgagaagcaccaatgacgtgctcgcatctctctttggcctgatggtgaaccagtgcacagactctggcacggcgcaagcggagcagcagagactactgcatgcgattgacgtgttcttccaggagtcgggcaggagacaacagcaacatgctacagctcgacaagagacagtgccaggggattatggaccaagacagggcagcagggcccgtcgccccaaagagaagatatccggtccaggatggatccggatccggcactagtgagcctacgcctacgcctgcgctcgtgaccgatgccggccgtgcccaggttgctgctggcttgtgttcggagctcccacgcttgatttgtggggaattccggcgatcagctccgccgctcccatctcacgagtcacgaactacatccgcttccaaagaaacatgatatcttgaatcctaagtcatgaatcctgagtcagaaactctagtgaagtcgcaactactcgacgtgttttaagtttttaaggagccgtaaatttagctcttgtatttaacgagctcctcgcgaaccggaatgagctgaggaagcccaaaactgatgcccacaacaagcacaaagccaacagcccaacactaacaagaccctacgtttatctcttcctattgatttcaccctgaccctgcgccaacggcttgctgccagccatggtcttgtgctaatcgcttcttgtccggttcctacccatgcttagtgtgaccctagtgttgtctgcttcgacaccaataggtaacacgaacactaaacaagcttatccatggtcatcaagcagtctattaccttcccattcttcgtactgcatttataactcaagcttgatgaatacatgagtacgtatgtgtgttttgaattatattgtcgtctactgaataagtatatgctttttcttctcgtacatgagtatgcattttcttctcgtacattgacttca

SEQ ID NO: 83534 - DNA, 2497 bp, Zea Mays
cccaaaaccccgagatgtgggctcatctcttccttatcgacgctgtggccaccgaaccgcccacgtcacccccttccgtcctcccccgagacaatccccacgcaaccgcgcaccggagcggcggagcctgacgagtctacacaagcggtggggggagcaaaatctgcgccagttcgcctcgcctacttatacactccgatcgccccctaagcaaagatggcaccaccatccatgtgtcttgcggcaaagggggtgcttcccttctcggcacttatttcaagtggtgttacacaaaggccagtgtcagtgaccgcttccttggagcacaaaaccagcgatgctagaaggaagttcctaaaacttgcgcttgggaatatcggagttggactgcccaccttgttgggtgttaagaaagctctcgctgatgagcaaggaatctcgtcctcgaggatgtcttattcaaggttccttgagtatcttgacaagggtagagtgaagaaggttgatttatttgagaatgggacaattgctatcgtggaggccatttctcctgagcttggcaaccgcgtgcagagagtccgtgtgcagcttcctggtctaagccaggagcttcttcagaagttgagggaaaagaacatcgattttgctgctcacagcaaccaggaggactctggttctcttctgttcaaccttattggaaatttggcattcccacttattcttatcggtggtctatttttactgtcaagaagggcacaaggtggccttggtggacccaatggccctggttttccccttggttttggtcaatctagggccaagtttcagatggaacccaacactggtgttacatttgatgatgttgctggtgtggatgaagcgaagcaagacttcatggaggtggttgagttcttgaagaaacctgaaaggttcactgctgttggtgctcgcattcctaaaggtgttctgcttgtcggtcctcctgggactggtaaaactttgcttgccaaggcaattgcaggagaggctggcgtaccatttttctcaatttcaggttctgagtttgtggagatgtttgttggtgttggtgcttccagagtacgtgaccttttcaagaaggccaaggagaacgctccttgcatagtgtttgtcgatgaaattgatgctgttggaaggcaaagaggtacaggtattggtggtggaaatgatgaaagggagcagactctaaatcaactactaactgagatggatggttttgagggcaacaccggaattattgttattgctgccactaaccgagctgacatcttggattccgctttacttagacctgggcgctttgacagacaggtgtctgttgatgttcctgatgtacgtggaaggacagagattctaaaagtgcatggtggcaacaagaaatttgattctgatgtttctctcgatgtcatagcaatgagaacacctgggttcagtggagcagacttggcaaaccttctgaatgaagcagccattctggctggacggcgggggaggacagcaatttcttcaaaagagatagatgattctattgacagaattgtggctggtatggaagggactgtgatgacagacgggaagagcaaaagtcttgttgcttaccatgaagtcgggcatgcaatttgcggaactttgacacctggccatgatcctgtccaaaaggttaccttaatcccaaggggtcaagctcgtggtcttacatggtttatcccgatggatgacccaacactcatctccaggcagcaactttttgccagaattgttggcggccttggtggtagagctgctgaggaggtgatatttggagagcctgaggtgaccactggagctgctggtgacttgcagcaaattactggcttagccaagcagatggtggtaacgttcggtatgtctgaaattggtccatggtctctgatggagggtggggcacagagtggggacgtcatcatgcgaatgatggcaaggaactccatgtcagagaagcttgcggaggacattgattcggcagtgaagcagttgtcagatgaggcctacgagatcgcattgaggcacattagaaacaacagggaggccatcgacaaaatcgttgaggtgctcattgagaaggagacactggccggagacgagttccgggcgattctttctgagtttgtggagatccctgtagagaaccgggttcccccagccacaccggcggccgccctccctgcctaaagtcaagtcttgtagggggtgaaatttgttgttgtaagatgttcatattttggattcttggtgtacactaattctacttcacctgccgggtttttggtagacgacatgtaacttgctcatggtgaactatagtaaaatgtaattagcttaaaaggcctggcgcaacattttcggtttctagcttctggcgagtgaattctcttgctcgtagattaacgagaaaattgcacggttcctacttcataaa

SEQ ID NO: 83535 - DNA, 1532 bp, Zea Mays
cgagtttttttagtttgtaaaaggaatcccgttaagtttatttatgctcaccaatttaagggcagaacttacggacctcaagctcttggttactcctgatcttctctaggcgactaggcacaattgccctctggcaaaatgccatcagtttatctttacatccctaacattatcgggtattttaggatcatcataaatttcattgcatttgcggtttgctattccaacaaggctctctttgctatcctgtacttcatcagctttgtccttgatggtgtggatggttggtttgcaaggaagttcaatcaagcatcaacctttggagctgtgttagacatggttacagatagggttagcactgcttgtttgttggcccttctctcccagttttacagacctggtttagtcttcttgatattgcttggattggatattacgagccactggtttcaaatgtacagttctttcttgtcaggtaagactagccacaaggatgtaaaacacacaggcaattggcttctgaaattatattatgggtacaggccattcatggccttctgctgtgtttcttgtgaggttttatatattttcctgtttctctttgctgatgaggagtcaacaagcttgcttagtgtatgcaaaggcatcctgaaccaaagtcccgtcgttatcttggtgtttgtttccactctagttggctgggcagtgaagcaagccaccaacgtcatccagatgaaaactgctgcggacgcatgcgtggtgtatgatctgaagcgcagcaaatgaagcatgaaggcagcttcacggtttagtatcgacatatccaagggaaaactctgcgagggggcgggctacgtcttgcgtgccttgacatctttctgatgatgcggtcatatgtgggaccaggggatgacatgccgtggccaatgcaaacaattgttttgtgaaagcagcggccgttaagttgttgtcagtgtgagagtggtgatgcgatcatgatcctttttacctagagtagctcccctttgtgttagcctgaacgatgttttgcaagccgcatgttccgaactctaggattatttggattacaaaacttacatattccatcctcaaggccagttccctcgagagttcgatagttacttatagtcgctggaataggcactagctactgttcgaatgatttcccttttgctccttaagcatcctttgggtcagctttatcgataaaatttctttttttatgtgacatccctttgcttagaaggggattgaatggaataggagaggattgaggaagaaataaactaatttatctctcaatctcttcgaatccctttctaactaaataaactgctttaaatgataaacaatacctctatcctaaaatataataattcgttttagattaattatataccaatggagtttgtatatatatctatattaattatcatttgaatgtatatgaacagaaaaaatgggctagaagtaactatattttaggagaacggaggaagtaccaagttaac

SEQ ID NO: 83536 - DNA, 1601 bp, Zea Mays
cccttctcttcccttctgtgcaaaatgtgcacctgaaccctaatttaacctatttggctatctgtattcggatcagatctgataaccactaggaatcccgttaagtttatttatgctcaccaatttaagggcagaacttacggacctcaagctcttggttactcctgatcttctctaggcgactaggcacaattgccctctggcaaaatgccatcagtttatctttacatccctaacattatcgggtattttaggatcatcataaatttcattgcatttgcggtttgctattccaacaaggctctctttgctatcctgtacttcatcagctttgtccttgatggtgtggatggttggtttgcaaggaagttcaatcaagcatcaacctttggagctgtgttagacatggttacagatagggttagcactgcttgtttgttggcccttctctcccagttttacagacctggtttagtcttcttgatattgcttggattggatattacgagccactggtttcaaatgtacagttctttcttgtcaggtaagactagccacaaggatgtaaaacacacaggcaattggcttctgaaattatattatgggtacaggccattcatggccttctgctgtgtttcttgtgaggttttatatattttcctgtttctctttgctgatgaggagtcaacaagcttgcttagtgtatgcaaaggcatcctgaaccaaagtcccgtcgttatcttggtgtttgtttccactctagttggctgggcagtgaagcaagccaccaacgtcatccagatgaaaactgctgcggacgcatgcgtggtgtatgatctgaagcgcagcaaatgaagcatgaaggcagcttcacggtttagtatcgacatatccaagggaaaactctgcgagggggcgggctacgtcttgcgtgccttgacatctttctgatgatgcggtcatatgtgggaccaggggatgacatgccgtggccaatgcaaacaattgttttgtgaaagcagcggccgttaagttgttgtcagtgtgagagtggtgatgcgatcatgatcctttttacctagagtagctcccctttgtgttagcctgaacgatgttttgcaagccgcatgttccgaactctaggattatttggattacaaaacttacatattccatcctcaaggccagttccctcgagagttcgatagttacttatagtcgctggaataggcactagctactgttcgaatgatttcccttttgctccttaagcatcctttgggtcagctttatcgataaaatttctttttttatgtgacatccctttgcttagaaggggattgaatggaataggagaggattgaggaagaaataaactaatttatctctcaatctcttcgaatccctttctaactaaataaactgctttaaatgataaacaatacctctatcctaaaatataataattcgttttagattaattatataccaatggagtttgtatatatatctatattaattatcatttgaatgtatatgaacagaaaaaatgggctagaagtaactatattttaggagaacggaggaagtaccaagttaac

SEQ ID NO: 83537 - DNA, 1920 bp, Zea Mays
ctgtttgccgttttctccctttacacgctcgattccccccgccgtttccacgggggccaggtgcctgcattactgggtccgggcctagcgtcagcgcaaccgaacacgccggcgaccgctgccgcccttctcccagctgcccaggtcttcgtcgggccctttgcctgcggcgtcggcgacgagcgcctgccacaccagggtattttaggatcatcataaatttcattgcatttgcggtttgctattccaacaaggctctctttgctatcctgtacttcatcagctttgtccttgatggtgtggatggttggtttgcaaggaagttcaatcaagcatcaacctttggagctgtgttagacatggttacagatagggttagcactgcttgtttgttggcccttctctcccagttttacagacctggtttagtcttcttgatattgcttggattggatattacgagccactggtttcaaatgtacaggtcagtttcctctaccattttgttcagtttttgcaagttcccagtttgttttctagtcagcacctaatcctgttctttaggtagtcaaggcaacagaattaatctgttagcaattacattttcaataattgcctgatggtttcattatgcatgcgttctattcaagagtttctcactttcaattattttttacttatttattagtccttcaattccaaattataagtcttcgtggcttttctagtacatagttttcaccttgtatctagacacaatatatatctagatatgtagcaaaagttatgtacctaaaagccagaaatggagtacttgctaactatgtaatgccatattttctatactagttctttcttgtcaggtaagactagccacaaggatgtaaaacacacaggcaattggcttctgaaattatattatgggtacaggccattcatggccttctgctgtgtttcttgtgaggttttatatattttcctgtttctctttgctgatgaggagtcaacaagcttgcttagtgtatgcaaaggcatcctgaaccaaagtcccgtcgttatcttggtgtttgtttccactctagttggctgggcagtgaagcaagccaccaacgtcatccagatgaaaactgctgcggacgcatgcgtggtgtatgatctgaagcgcagcaaatgaagcatgaaggcagcttcacggtttagtatcgacatatccaagggaaaactctgcgagggggcgggctacgtcttgcgtgccttgacatctttctgatgatgcggtcatatgtgggaccaggggatgacatgccgtggccaatgcaaacaattgttttgtgaaagcagcggccgttaagttgttgtcagtgtgagagtggtgatgcgatcatgatcctttttacctagagtagctcccctttgtgttagcctgaacgatgttttgcaagccgcatgttccgaactctaggattatttggattacaaaacttacatattccatcctcaaggccagttccctcgagagttcgatagttacttatagtcgctggaataggcactagctactgttcgaatgatttcccttttgctccttaagcatcctttgggtcagctttatcgataaaatttctttttttatgtgacatccctttgcttagaaggggattgaatggaataggagaggattgaggaagaaataaactaatttatctctcaatctcttcgaatccctttctaactaaataaactgctttaaatgataaacaatacctctatcctaaaatataataattcgttttagattaattatataccaatggagtttgtatatatatctatattaattatcatttgaatgtatatgaacagaaaaaatgggctagaagtaactatattttaggagaacggaggaagtaccaagttaac

SEQ ID NO: 83538 - DNA, 1727 bp, Zea Mays
ctgtttgccgttttctccctttacacgctcgattccccccgccgtttccacgggggccaggtgcctgcattactgggtccgggcctagcgtcagcgcaaccgaacacgccggcgaccgctgccgcccttctcccagctgcccaggtcttcgtcgggccctttgcctgcggcgtcggcgacgagcgcctgccacaccaggaatcccgttaagtttatttatgctcaccaatttaagggcagaacttacggacctcaagctcttggttactcctgatcttctctaggcgactaggcacaattgccctctggcaaaatgccatcagtttatctttacatccctaacattatcgggtattttaggatcatcataaatttcattgcatttgcggtttgctattccaacaaggctctctttgctatcctgtacttcatcagctttgtccttgatggtgtggatggttggtttgcaaggaagttcaatcaagcatcaacctttggagctgtgttagacatggttacagatagctcacattgtttttcttcagggttagcactgcttgtttgttggcccttctctcccagttttacagacctggtttagtcttcttgatattgcttggattggatattacgagccactggtttcaaatgtacagttctttcttgtcaggtaagactagccacaaggatgtaaaacacacaggcaattggcttctgaaattatattatgggtacaggccattcatggccttctgctgtgtttcttgtgaggttttatatattttcctgtttctctttgctgatgaggagtcaacaagcttgcttagtgtatgcaaaggcatcctgaaccaaagtcccgtcgttatcttggtgtttgtttccactctagttggctgggcagtgaagcaagccaccaacgtcatccagatgaaaactgctgcggacgcatgcgtggtgtatgatctgaagcgcagcaaatgaagcatgaaggcagcttcacggtttagtatcgacatatccaagggaaaactctgcgagggggcgggctacgtcttgcgtgccttgacatctttctgatgatgcggtcatatgtgggaccaggggatgacatgccgtggccaatgcaaacaattgttttgtgaaagcagcggccgttaagttgttgtcagtgtgagagtggtgatgcgatcatgatcctttttacctagagtagctcccctttgtgttagcctgaacgatgttttgcaagccgcatgttccgaactctaggattatttggattacaaaacttacatattccatcctcaaggccagttccctcgagagttcgatagttacttatagtcgctggaataggcactagctactgttcgaatgatttcccttttgctccttaagcatcctttgggtcagctttatcgataaaatttctttttttatgtgacatccctttgcttagaaggggattgaatggaataggagaggattgaggaagaaataaactaatttatctctcaatctcttcgaatccctttctaactaaataaactgctttaaatgataaacaatacctctatcctaaaatataataattcgttttagattaattatataccaatggagtttgtatatatatctatattaattatcatttgaatgtatatgaacagaaaaaatgggctagaagtaactatattttaggagaacggaggaagtaccaagttaac

SEQ ID NO: 83539 - DNA, 1541 bp, Zea Mays
ctgtttgccgttttctccctttacacgctcgattccccccgccgtttccacgggggccaggtgcctgcattactgggtccgggcctagcgtcagcgcaaccgaacacgccggcgaccgctgccgcccttctcccagctgcccaggtcttcgtcgggccctttgcctgcggcgtcggcgacgagcgcctgccacaccagggtattttaggatcatcataaatttcattgcatttgcggtttgctattccaacaaggctctctttgctatcctgtacttcatcagctttgtccttgatggtgtggatggttggtttgcaaggaagttcaatcaagcatcaacctttggagctgtgttagacatggttacagatagggttagcactgcttgtttgttggcccttctctcccagttttacagacctggtttagtcttcttgatattgcttggattggatattacgagccactggtttcaaatgtacaggtaagactagccacaaggatgtaaaacacacaggcaattggcttctgaaattatattatgggtacaggccattcatggccttctgctgtgtttcttgtgaggttttatatattttcctgtttctctttgctgatgaggagtcaacaagcttgcttagtgtatgcaaaggcatcctgaaccaaagtcccgtcgttatcttggtgtttgtttccactctagttggctgggcagtgaagcaagccaccaacgtcatccagatgaaaactgctgcggacgcatgcgtggtgtatgatctgaagcgcagcaaatgaagcatgaaggcagcttcacggtttagtatcgacatatccaagggaaaactctgcgagggggcgggctacgtcttgcgtgccttgacatctttctgatgatgcggtcatatgtgggaccaggggatgacatgccgtggccaatgcaaacaattgttttgtgaaagcagcggccgttaagttgttgtcagtgtgagagtggtgatgcgatcatgatcctttttacctagagtagctcccctttgtgttagcctgaacgatgttttgcaagccgcatgttccgaactctaggattatttggattacaaaacttacatattccatcctcaaggccagttccctcgagagttcgatagttacttatagtcgctggaataggcactagctactgttcgaatgatttcccttttgctccttaagcatcctttgggtcagctttatcgataaaatttctttttttatgtgacatccctttgcttagaaggggattgaatggaataggagaggattgaggaagaaataaactaatttatctctcaatctcttcgaatccctttctaactaaataaactgctttaaatgataaacaatacctctatcctaaaatataataattcgttttagattaattatataccaatggagtttgtatatatatctatattaattatcatttgaatgtatatgaacagaaaaaatgggctagaagtaactatattttaggagaacggaggaagtaccaagttaac

SEQ ID NO: 83540 - DNA, 1699 bp, Zea Mays
ccctgtttgccgttttctccctttacacgctcgattccccccgccgtttccacgggggccaggtgcctgcattactgggtccgggcctagcgtcagcgcaaccgaacacgccggcgaccgctgccgcccttctcccagctgcccaggtcttcgtcgggccctttgcctgcggcgtcggcgacgagcgcctgccacaccaggaatcccgttaagtttatttatgctcaccaatttaagggcagaacttacggacctcaagctcttggttactcctgatcttctctaggcgactaggcacaattgccctctggcaaaatgccatcagtttatctttacatccctaacattatcggatcatcataaatttcattgcatttgcggtttgctattccaacaaggctctctttgctatcctgtacttcatcagctttgtccttgatggtgtggatggttggtttgcaaggaagttcaatcaagcatcaacctttggagctgtgttagacatggttacagatagggttagcactgcttgtttgttggcccttctctcccagttttacagacctggtttagtcttcttgatattgcttggattggatattacgagccactggtttcaaatgtacagttctttcttgtcaggtaagactagccacaaggatgtaaaacacacaggcaattggcttctgaaattatattatgggtacaggccattcatggccttctgctgtgtttcttgtgaggttttatatattttcctgtttctctttgctgatgaggagtcaacaagcttgcttagtgtatgcaaaggcatcctgaaccaaagtcccgtcgttatcttggtgtttgtttccactctagttggctgggcagtgaagcaagccaccaacgtcatccagatgaaaactgctgcggacgcatgcgtggtgtatgatctgaagcgcagcaaatgaagcatgaaggcagcttcacggtttagtatcgacatatccaagggaaaactctgcgagggggcgggctacgtcttgcgtgccttgacatctttctgatgatgcggtcatatgtgggaccaggggatgacatgccgtggccaatgcaaacaattgttttgtgaaagcagcggccgttaagttgttgtcagtgtgagagtggtgatgcgatcatgatcctttttacctagagtagctcccctttgtgttagcctgaacgatgttttgcaagccgcatgttccgaactctaggattatttggattacaaaacttacatattccatcctcaaggccagttccctcgagagttcgatagttacttatagtcgctggaataggcactagctactgttcgaatgatttcccttttgctccttaagcatcctttgggtcagctttatcgataaaatttctttttttatgtgacatccctttgcttagaaggggattgaatggaataggagaggattgaggaagaaataaactaatttatctctcaatctcttcgaatccctttctaactaaataaactgctttaaatgataaacaatacctctatcctaaaatataataattcgttttagattaattatataccaatggagtttgtatatatatctatattaattatcatttgaatgtatatgaacagaaaaaatgggctagaagtaactatattttaggagaacggaggaagtaccaagttaac

SEQ ID NO: 83541 - DNA, 1737 bp, Zea Mays
aaaagaacgagagatacaaaaaagagaagtcgtgcgttcacaccctgtttgccgttttctccctttacacgctcgattccccccgccgtttccacgggggccaggtgcctgcattactgggtccgggcctagcgtcagcgcaaccgaacacgccggcgaccgctgccgcccttctcccagctgcccaggtcttcgtcgggccctttgcctgcggcgtcggcgacgagcgcctgccacaccaggaatcccgttaagtttatttatgctcaccaatttaagggcagaacttacggacctcaagctcttggttactcctgatcttctctaggcgactaggcacaattgccctctggcaaaatgccatcagtttatctttacatccctaacattatcgggtattttaggatcatcataaatttcattgcatttgcggtttgctattccaacaaggctctctttgctatcctgtacttcatcagctttgtccttgatggtgtggatggttggtttgcaaggaagttcaatcaagcatcaacctttggagctgtgttagacatggttacagatagggttagcactgcttgtttgttggcccttctctcccagttttacagacctggtttagtcttcttgatattgcttggattggatattacgagccactggtttcaaatgtacaggtaagactagccacaaggatgtaaaacacacaggcaattggcttctgaaattatattatgggtacaggccattcatggccttctgctgtgtttcttgtgaggttttatatattttcctgtttctctttgctgatgaggagtcaacaagcttgcttagtgtatgcaaaggcatcctgaaccaaagtcccgtcgttatcttggtgtttgtttccactctagttggctgggcagtgaagcaagccaccaacgtcatccagatgaaaactgctgcggacgcatgcgtggtgtatgatctgaagcgcagcaaatgaagcatgaaggcagcttcacggtttagtatcgacatatccaagggaaaactctgcgagggggcgggctacgtcttgcgtgccttgacatctttctgatgatgcggtcatatgtgggaccaggggatgacatgccgtggccaatgcaaacaattgttttgtgaaagcagcggccgttaagttgttgtcagtgtgagagtggtgatgcgatcatgatcctttttacctagagtagctcccctttgtgttagcctgaacgatgttttgcaagccgcatgttccgaactctaggattatttggattacaaaacttacatattccatcctcaaggccagttccctcgagagttcgatagttacttatagtcgctggaataggcactagctactgttcgaatgatttcccttttgctccttaagcatcctttgggtcagctttatcgataaaatttctttttttatgtgacatccctttgcttagaaggggattgaatggaataggagaggattgaggaagaaataaactaatttatctctcaatctcttcgaatccctttctaactaaataaactgctttaaatgataaacaatacctctatcctaaaatataataattcgttttagattaattatataccaatggagtttgtatatatatctatattaattatcatttgaatgtatatgaacagaaaaaatgggctagaagtaactatattttaggagaacggaggaagtaccaagttaac

SEQ ID NO: 83542 - DNA, 2677 bp, Zea Mays
caaaaaaaaaaaaaaaactcttcgtccctactcccctgcagagtgcagtgtgcagacacccgaggagccgagacagagaagcagtgaagggaacccgcgcgctttctcccgacgtgcaccggaaatggtggtcgtggacgcgtcggagttcggggcggagggcttcgacccgaagcggtggatcaacgcggcgctggacgcgcggcacccgtcggagcctctcgatcgcttcctcgccgacgccgaggagcgcctgcgttccgcggccgacgacgccgcggccgcgctcgagagggatagcggcgacgccctccgccgcgtcccgttggcatgccgcgacgcgctgcgcctccgcgacgacgccgtcgccctacgctcccacctcgcctccgtcctccagtccctctccctggctgagggctcatccgcagaatcaatagctgcactagcgcgtattgacactgtgaaacagcgcatggaagccgcatacacaacattgcaggatgctgctgggttagctcagttgagccagagtgttgaggatgtgttttctagtggcaatcttccaaaagctgcagaaaccctggcaactatgagacattgcttgtcagcagttggagaggttgccgagtttgcaaacgtcagaaaacaacttgaagtattggaagaaaggctagatgaaatggtgcagcctcgattagtagatgcactttctaatcgcaaggttgatgccgtgcaagatcttcgtggtatactgatccgtatcaataggttcaagtcactggaagtgcaatacactaagatccatgttaagcctctaaagaaactctgggatgattttgagctaaagcaaagatccagcaaggtgcttgactgctttccctgacgaatacaaatcacttgtaccaaaagtacttactgagaccatgagtgagttgaattcaagctttgtctctcgtataaatatagcaaccggggatgttattcctgaaaccagatctattgccaaaggtatattggatgttctatcaggtgacttaccaaaaagcaccaaattgcagaataagcatcttcaagcgctaattgaactgcacaatatgactggcacttttgctaggaacattcagtacttattttcagaatcagatcttgcagttgtgctgaatactttgaaagctatttattctccatatgaaacctttaaagcaaggtatgggcagatggagcgtgctatactctctgctgagatgacaagtatcgacatccgtggggccgtccctcgtggtgttggtgcacagggtatagagctgagcgaaactgtccgcagaatggaggaatccatcccagaaatgatagtactccttgaggcagctgtggagagatgcattagtctgactggtggttcagaagcagatgaactggtactggctcttgatgacgtcatgctgcagtacatatctaatctccaagaaacattgaagtccctgaggataatctgtggactggatagtgatgccttgaaaaaagatgcaggtttagagaaaaaggaagtacaacgattggtggatgtttctgaagaggaagaatggtctattgtccaaggtgctttgcaaattcttacagttgctgattgcctaactagcagaacctcagtctttgaagcttctttaagagctacacttgccaggattggaacaaacttttctgtttctggatttggctcaagcctggataaatcacctgcagcaactgctgatgagaatgcagacttgtcttttgctgggagggctgcgctggacattgcagctattcgcttaagtgatctgccagataagtctaagaagttcttaactgtgctagaacagtcaaaagatccaagattccatgctcttcctctcacatcacaaagagttgcagccttctcagacacagtaaatgaactcgtctatgatgtgctcatatctaaggttcggcagcgtctcagtgaggtcgcacgccttccaatctggtcatccgtggaggaacagggtggtcttcctcttccaagcttcagtgcctacccgcaagcatacgtgaccagcgttggggagtatctcctcactttaccacagcagctggagccactcgcggaaggtatctcaggcaatgaggctggcaacgatgaggcccagttctttgccaccgagtggatttttaaggtcgccgaaggtgccactgctttgttcatggagcagctccgaggaatccactacatcaccgaccgaggttcacagcagctcgctgctgacattgagtacctaaacaatgtcctctctgcgctctcgatgccaatccctccattcctgtctaccttccacgcctgcgtctccaccccgagggaccaggtccgtgatctgatcaaatctgatggtgcaagccagctcgacctccctactacccatctggtctgcaagatccggcggatcacattagattagtgaaatcgtcctaacttctccccctttccatgaggtttacctctgtaaaagcatgcattaccgcacgcttctgcgatcgtatgtttggcatgcgggcttgtagcttgttgcttcaccttttttttcttgccttgtaaccgtactgctggcacatagtgagaataatcctatatagaataattcattacttggagcctata

SEQ ID NO: 83543 - DNA, 1883 bp, Zea Mays
cttctgtctgcacgcgagcgagcgaagcgccccgaaacatccacatcggacatcgcgcacgcaacgcaaccgcagcgtcccatttcccctctccctccctggtcctcctcaaatcagctcagcgcctcagccttcaaccaaccaaccaaccaacccaactcgagccctcgacgagcacccgagagacacgagagtgaaggaaagaggaaaaagaagaagactacagccaaaaccctatctcactccggcgcgccaccggccgatggtttcgatgaacaccacgccgaatccgcttgactccgccgccggcagcgccgccgtcgccggcggaagcgtggacgagggaggaggaggaggcggcaggaagaagcggatgcgcggggcggtagcggcggcgatggtgccgccgccgatggcggtcccgctgccggccgcggcgcccgcggcgggggaggaggttcggaaggtcaggaagccgtacaccatcaccaaatcccgggagagctggacggagccggagcacgataagttcctcgaggccctgcagctttttgatcgtgattggaagaagattgaagcatatgtcggctcgaagactgttatacagataaggagccatgcacagaagtacttcttgaaggttcagaagaatggcacaggcgagcatctgcccccacccaggccaaaacggaaggcagctcatccatatccccagaaatcatctaaaaatgtttctcaaactattttattacaagaacaacctactcagcgggagcaaggttctgtcatgcctatggatactgctactgtgataaacacaaatgcgaatgtggcagtggcagtggcagtgccttcctgggacaatactcttgctcaatctctcagtgctggtcttgttccaggtgcaacaaataactgttcaagtagcatagagagtccatctggtacttggccaacttctgaagcagttgagcaagaaattgtggttccatcactccatgctatgccagattttgcccgagtatacagcttcctaggaagcatatttgatcctgatacaagtgggcatttgcagaggttaaaagtgatggatccaattgatattcaaacggtactactacttatgagaaatctttccacgaaccttaggagtcctgactttgagcaacatgttcgccatgactttgcccagcaagtttatgctgactaattcaatgtatatgggtcacagagcctgctcaggcagactttctgggtgctattctatggtggtggggaccatgttaaacctgaaggcatggaaaatcatggatctcctcagagtggccatcttccattcctggtaacaagtgaatgagagcacactggcaatttgtggtcgaagctttggttgtttccacgagacacattcttgtgtgttctcagcaatcgagttgtggacggctggtctggcaatttatgaatgccatgtctgccaatctgtatagcttccaataatggtctgaccctagactagttttgttttccacgttcatgtagatagctagttttgtgtgctcatgcaattttttactgggtggagcctagatcgatatgtttttgttgtatcacttgtgcacgcgtgtatgtaagtatgtggaaccttgtaatgcttgaggtacttgagagtcttcggttaagacaaagcatatatgcgcaataatcaggagatcaccatcgtcgactatataatgagaagtttttttagttgtggacctatctaaaactgccctctactgaagttgcatgcgtggatatccttatgtttgttgattaatgatagtatgctactaattggtcagttacgtatctgggtatgcttcggtctcaactctcaagtgatc

SEQ ID NO: 83544 - DNA, 1611 bp, Zea Mays
ttcatcttcatcaaacaaaaaaatgtactcaagaaatatttcaaggaagattatctcaaaaccagtatgtcgcggaccattcagacccttgccccggaccatccggagtaccaaagatcagatcggacaagaactatgtaaaatctaacatatgaactatgaacagttcaaaaaaagagagtatcgtccggcaccctgtgtcactgtgtggaccgttcacccattgaagaataagaccaacccgaaggtgccgggttcgataaaatgatttttggcgtccacgtgagccgttcggaggcacgactagaccatccacaacaggctttatctaacatatgaagatgcatctattgcgattatagtcgttgatatagtcgttgtaactaactattgcaatccagccgttgatcttgcagggacgtactgtttggactaggagcgcagattgtccacgtgtggtagaaaagtggcaacgactaggaagtagttggagactataaataaaaccacaaccacccccttcaatgacatacaagcttacaaaactctcattcattgcaaagatcaagacttcactttcaagccacactcaaaagcctcagaactcctccaagtgccataattgtgattttgtaatctttagtgattagcaccttggagagactctagagagtgtgtgaccttgagttttcttgttgttctttgtaagctagcaagagacatctaagtgtgtgatgatccttgtgggatctaagtgacccaagattgagaagaagcactcatccggtctaagtgaccgtttgagatagggaaaggattgaaagagacccgccctacgtggactccttaacagggagtagattctttgaaaccaaacctcaggaaacaaatcgctcgtattcattgtgttaaccgttactttgtgatttgattcttcctctcccctctcttgttctcttgcttgcaattgatctcatatcaatttgagttgcacccaagtaattctgcaatcattagtgcaactcttgacaagaagaacacctctctcgcactctgattgtcttcatttccattctaatgctaacccgaggtagaagttgtgtttaagttcgtaaatttcagattttgcctattcaccccccctctaggcaactttcaaatctacctcctgttgggggccttcatcttctgaaggtcctcgaaaacacgactaacatgttttccagtataatatactatcacatgaagcttcggctttgggatgaaggtgtacatgatttgaaaggtgcaacctggaagaaggatgaactagttccaaagttgtggacgaaggagcttcggcttagcgtaaagacgacgatggagaatgaaaccgacttaaaagggaaaagacagcttagccctcgacaacttactttttagctaataataaatgtcagggacataaatgtaattttacccaggctatgtcatgtgcctataaatagatgaacagtaacatcgtactgttctcgctgacttgtaatcactcgcacgccactcttggattcttaccttctgtcaagccgaaggtacaaatgtaattcaatatcattaatgtttgttcatgat

SEQ ID NO: 83545 - DNA, 1482 bp, Zea Mays
aaagtacttaaaatatatgctgcaaggccggtgttcgtcatcgtcttcggccaaactctcaacaacagatatttatatataacgagcgcagctagctagctagagcctgaaagaattgagaagctaaggatagaggcgaagctaggctgcgaaccactggatcaagaggagctagctaggcagcgagaatgagagggtttgagagaaaaggggtccggcagtacaaccggtcagaggtgccgaggatgcggtggacggaggagctgcaccggcagttcgtcgaggccgtcgagtgcctcggtggccaggacgaagcaactccgaagcgaattcttcagctgatgggcgcgaagggagttagcatatctcatatcaagagccatcttcagatgtacagagcctccatctccagcagcagcagtacccatcatcagcccagcctccagaagtcgacatcaaccgcagcgagcaacaacaagcgcgtgttcttcacgcgtgaagattgtgcgtcacaggaaggcaacgctccagcttcagacaagaacatctataccaccacggtccgtggttgcggccagtactcatcaccgtaccaaataccgtcgctacagcaagtgttcagatgctgggaacaaaagagagggcgtgttgcttggaactccgacgtgctaacaacagagaagggggtgattattaggccaagtcacactaggaagcacgagacgcagcagcacacgggatgcgacctcacgctgtcgatcgggctgtgggaggacgcgagcagcagcgacgacgccgacggctcgagctccatcagcgaggagctgctgcctgctccggcagcgggcggcgctcgccgcgtcgccgccgtagtgaaggaggaggaggagagcaagccggcggctctgaacctggacctgaccatctcgtcgtcctggctggcctgacgacgtacgccggcggacggctggtggcgttatgcgtacgtggccggcgtaggtacaaatacgtacatactatacgcggactcttgcagatcgagcagcagactgtgtgatcagggcatcggtactaggactactgtatattttcgtgtcgtcctgcccactccgttctagccactctctttttttttttcttattagatcatctgtacaacattttcgggtccgttcgattaggaacggccgcctgggcttcagacgacggtgggtgaggaatttctgcggccctttttccttgtccggggagaaggcgctgtatacctcagttcctcacatgtcatcgtctgatcgattgagcatatacttagtatgttattagttctggcagctatatatttcagtgaatgacagaggacagatatgtttatatatatagtcttttatttttgctagcagcagctgtatatttcagtcaacaactagcaaaagtcatccagtacagtacgtccaacaaaatcaagtagttggttgatagttc

SEQ ID NO: 83546 - DNA, 1518 bp, Zea Mays
gtgagcatgtttgactggactaggcagcaagcaaaagtacttaaaatatatgctgcaaggccggtgttcgtcatcgtcttcggccaaactctcaacaacagatatttatatataacgagcgcagctagctagctagagcctgaaagaattgagaagctaaggatagaggcgaagctaggctgcgaaccactggatcaagaggagctagctaggcagcgagaatgagagggtttgagagaaaaggggtccggcagtacaaccggtcagaggtgccgaggatgcggtggacggaggagctgcaccggcagttcgtcgaggccgtcgagtgcctcggtggccaggacgaagcaactccgaagcgaattcttcagctgatgggcgcgaagggagttagcatatctcatatcaagagccatcttcagatgtacagagcctccatctccagcagcagcagtacccatcatcagcccagcctccagaagtcgacatcaaccgcagcgagcaacaacaagcgcgtgttcttcacgcgtgaagattgtgcgtcacaggaaggcaacgctccagcttcagacaagaacatctataccaccacggtccgtggttgcggccagtactcatcaccgtaccaaatcagaccgtcgctacagcaagtgttcagatgctgggaacaaaagagagggcgtgttgcttggaactccgacgtgctaacaacagagaagggggtgattattaggccaagtcacactaggaagcacgagacgcagcagcacacgggatgcgacctcacgctgtcgatcgggctgtgggaggacgcgagcagcagcgacgacgccgacggctcgagctccatcagcgaggagctgctgcctgctccggcagcgggcggcgctcgccgcgtcgccgccgtagtgaaggaggaggaggagagcaagccggcggctctgaacctggacctgaccatctcgtcgtcctggctggcctgacgacgtacgccggcggacggctggtggcgttatgcgtacgtggccggcgtaggtacaaatacgtacatactatacgcggactcttgcagatcgagcagcagactgtgtgatcagggcatcggtactaggactactgtatattttcgtgtcgtcctgcccactccgttctagccactctctttttttttttcttattagatcatctgtacaacattttcgggtccgttcgattaggaacggccgcctgggcttcagacgacggtgggtgaggaatttctgcggccctttttccttgtccggggagaaggcgctgtatacctcagttcctcacatgtcatcgtctgatcgattgagcatatacttagtatgttattagttctggcagctatatatttcagtgaatgacagaggacagatatgtttatatatatagtcttttatttttgctagcagcagctgtatatttcagtcaacaactagcaaaagtcatccagtacagtacgtccaacaaaatcaagtagttggttgatagttc

SEQ ID NO: 83547 - DNA, 1126 bp, Zea Mays
cgattccatggtcatcgtttttacagaaacgtccctaaacttatgtctaattaaaacccacggtccaacttatctgtttccaccgtcccgctgaacccgcacccaacagaaacgcgcagctttcctaacgcgcgcagagccgccttctcaacctcctcccggacggcacgctctccgcagcttcctcgccatctcatccacccataccgcgtgcagcttcttcaacctctccctccctccgatatctcgtctcccatcctacggcggagccctcggggacaaccacgagtgcctaagatcccgtcctctgcgttgaccatcgagggatcgccatggcgttgagggcgtcccccgtgtcgcatcgcatggcgccgaccgccgagggccgaggcagcgccactgccgctgttcgcgcggaggaggatggcccgtggggtgtaagtggccatggcgtccaccaccatcaacaggtgagcacagtggatccctcgcctctcgctgtcttcctgacctacagttcgaggcaagtcgcggcgccgtcgaccccttcgcgggtgccagagttactggacttggattatgcctcagcagttagcaggatctgctgacagaaagcagttggcgatggagcaactgctgtaagagagaagtgatcaggatccatatggccggccttggattgtccagccgtcttccatgtcgccccgcacaccatctttagattgttttgccagtgctggtgcgcagggagccgtaactgcaggtcatttcggaagatgccattctttggacattgaaaagaagcatgttaatttgatagatgagtagtcacaaaagctaatatccagtgggtagtttgatggaaaggaactagacagggcatctgagttgggccaggaagctgaaatgtcttttactgagatggtaatatatggtatacgcctatagaagctacaaagccatggaaagaccagaacataccttgttggaacagtcccaaatcttcgagtgcttgttgtgatgtctatggacattggacagtgataaatgatgacgcaactgacatacatccgcttatctagaaaacaaagggagggaaaatataaacagaacagtaagaaacgag

SEQ ID NO: 83548 - DNA, 1716 bp, Zea Mays
agttaactattttaacttcaggttacttgagatataccatcacactgaaatttcccctgctttccaagtttcatgtttagaaaggttttctccatttgtgtgtacaatacattcaaccatgctacttcctactccctccgtattttttatttatcacgttttagtttagcacacgacaaaatattcgaaaacggaggtaatattattttccagattgtttttttatagtcttttttaccatctgtaccatttacaaagctataaatttgaccaagtttcatgtttagaaaggttttctccatttgtttctacagtacattcaaccatgctattattttccatattgttttcctgtataatatttttttaccatctgtagtacttataaagctatgaatttgacagatctaaaacatcacaacacttcatgaaagcgatcaaatggccacgctccacacctgaaatcaatgccatgtcattaataagttgattggtgcttaatgaaccaccttccctgcctttccatcctcttcaaacagaacaaaatctcatttaatccatcttatatctaagaaatatcctctcctgtgtggcttagggagtttgggtccttctctagactctagactgatgtatgagccgcctcgctgagccagtacatggtttaagaggcaccacattatttgttgctttagctatgaaaactggatttcattagcaagtttggcgactcacgttcagattgtagcttaggagtataagtttataggactagaggtatctcttagcaaaagttcaaattaagctggcacttcaggcatgtagacttgcagaacatgtagtctggtttttttcttttggaaagtagggtgcaatgttgcattaacttttttgagaagtcacttggtgtaggatgacaacaaatgaacctcgtattgttttcattttagttattcagtgtgtgatcgtgcaaggatctgctgacagaaagcagttggcgatggagcaactgctgtaagagagaagtgatcaggatccatatggccggccttggattgtccagccgtcttccatgtcgccccgcacaccatctttagattgttttgccagtgctggtgcgcagggagccgtaactgcaggtcatttcggaagatgccattctttggacattgaaaagaagcatgttaatttgatagatgagtagtcacaaaagctaatatccagtgggtagtttgatggaaaggaactagacaggtaaccctatttttccaaccagtggtgcgctttcgtttccatataaccgttgtgcgttaatattttatcaaataatttatataccgtcgcaacgcatatatattctactagtataactttatttttcagctctgtttgtgaaggagttgacttggtcgcagacgttatggtagaagtgtttgacaaaagagcccggccaactgaatttcctaagcctgagggctgatactgagtttggaccggcgataactgggcattttcaaaaatgtttggaacaaaactcttgggtgaattgtgaaatcaaaattttgagtgtacaatttcagaaaagaaaaaattcgcccccagcgaaaaccagggaatttccgaaatgtcgggaattctagttcaaaagcaaatagggttttaaaaagcggtataattcatattaaaatgccaatttcggaaatatatatatttcgg

SEQ ID NO: 83549 - DNA, 1264 bp, Zea Mays
acccaacagaaacgcgcagctttcctaacgcgcgcagagccgccttctcaacctcctcccggacggcacgctctccgcagcttcctcgccatctcatccacccataccgcgtgcagcttcttcaacctctccctccctccgatatctcgtctcccatcctacggcggagccctcggggacaaccacgagtgcctaagatcccgtcctctgcgttgaccatcgagggatcgccatggcgttgagggcgtcccccgtgtcgcatcgcatggcgccgaccgccgagggccgaggcagcgccactgccgctgttcgcgcggaggaggatggcccgtggggtgtaagtggccatggcgtccaccaccatcaacaggtgagcacagtggatccctcgcctctcgctgtcttcctgacctacagttcgaggcaagtcgcggcgccgtcgaccccttcgcgggtgccagagttactggacttggattatgcctcagcagttagcagttattcagtgtgtgatcgtgcaaggatctgctgacagaaagcagttggcgatggagcaactgctgtaagagagaagtgatcaggatccatatggccggccttggattgtccagccgtcttccatgtcgccccgcacaccatctttagattgttttgccagtgctggtgcgcagggagccgtaactgcaggtcatttcggaagatgccattctttggacattgaaaagaagcatgttaatttgatagatgagtagtcacaaaagctaatatccagtgggtagtttgatggaaaggaactagacaggtaaccctatttttccaaccagtggtgcgctttcgtttccatataaccgttgtgcgttaatattttatcaaataatttatataccgtcgcaacgcatatatattctactagtataactttatttttcagctctgtttgtgaaggagttgacttggtcgcagacgttatggtagaagtgtttgacaaaagagcccggccaactgaatttcctaagcctgagggctgatactgagtttggaccggcgataactgggcattttcaaaaatgtttggaacaaaactcttgggtgaattgtgaaatcaaaattttgagtgtacaatttcagaaaagaaaaaattcgcccccagcgaaaaccagggaatttccgaaatgtcgggaattctagttcaaaagcaaatagggttttaaaaagcggtataattcatattaaaatgccaatttcggaaatatatatatttcgg

SEQ ID NO: 83550 - DNA, 1240 bp, Zea Mays
acccaacagaaacgcgcagctttcctaacgcgcgcagagccgccttctcaacctcctcccggacggcacgctctccgcagcttcctcgccatctcatccacccataccgcgtgcagcttcttcaacctctccctccctccgatatctcgtctcccatcctacggcggagccctcggggacaaccacgagtgcctaagatcccgtcctctgcgttgaccatcgagggatcgccatggcgttgagggcgtcccccgtgtcgcatcgcatggcgccgaccgccgagggccgaggcagcgccactgccgctgttcgcgcggaggaggatggcccgtggggtgtaagtggccatggcgtccaccaccatcaacaggtgagcacagtggatccctcgcctctcgctgtcttcctgacctacagttcgaggcaagtcgcggcgccgtcgaccccttcgcgggtgccagagttactggacttggattatgcctcagcagttagcaggatctgctgacagaaagcagttggcgatggagcaactgctgtaagagagaagtgatcaggatccatatggccggccttggattgtccagccgtcttccatgtcgccccgcacaccatctttagattgttttgccagtgctggtgcgcagggagccgtaactgcaggtcatttcggaagatgccattctttggacattgaaaagaagcatgttaatttgatagatgagtagtcacaaaagctaatatccagtgggtagtttgatggaaaggaactagacaggtaaccctatttttccaaccagtggtgcgctttcgtttccatataaccgttgtgcgttaatattttatcaaataatttatataccgtcgcaacgcatatatattctactagtataactttatttttcagctctgtttgtgaaggagttgacttggtcgcagacgttatggtagaagtgtttgacaaaagagcccggccaactgaatttcctaagcctgagggctgatactgagtttggaccggcgataactgggcattttcaaaaatgtttggaacaaaactcttgggtgaattgtgaaatcaaaattttgagtgtacaatttcagaaaagaaaaaattcgcccccagcgaaaaccagggaatttccgaaatgtcgggaattctagttcaaaagcaaatagggttttaaaaagcggtataattcatattaaaatgccaatttcggaaatatatatatttcgg

SEQ ID NO: 83551 - DNA, 1491 bp, Zea Mays
cccgattcctgacgtccgagcgcggcacggcggcagtcgcgggagccccaaactcgagcgcggcgacccaagcgctggcctctaccctttctccctcgactcgttttcccggctggcctgctaccgcggatccggcctcaaacatcgccgcccctgcccccgcttcgttgtcttccctgacgaccctccccacacggccacaccgtctactgctgctgctgaccaccgtacacgcggggaagaatcagactgccaaacgattcactccactgaattaaaagacaaaggttgggccggtccactaacagtctaccactcataggcaggacaacggcatggcacatccgaggccgtggttttcctaagcccattcctcgctcaacagcagctgagcagattaggcatgcatgttcttcgatgccgctcgggttggggcgaattgcgtcatactgcactcaccgctctgggccttccaggtcctccctgccatgcatgtcgggcgcttgcgatgcaataacctcagcaaacaggctgattgggaagcacctgcgtgctggcagggtggatgctgtgcgggaggtgttcgacaaaatgccgcagcgggacatcgtgtcctggaactccctcatggctgtgtatgcccgttctggggtgcatgacagtgcagttactgcgttcctcaagatgagacgtgaggggttctgcgcagaccacacctccttctccactgtgctgtcggcctgcgcaaggatggagactctagctctagggaggtgcatccatgggcttgcgaccaagaccagatcttcgttgaacgtgtttgtggggtcctccttgatcacgatgtatgccaactgtggggtgtatagctgcctggagtggattgtggatgatgtcgacagtccaaacctggccttatggaatgctctcatatcaggtcttgtggtgaaccatagggtagaggatgctcgcagggtattcgatcagatgccagagcacaatgttgtgtcctggactgtgatgatcaaaggatattttactgtgcatgaggtggggcgggcattggagctgtttaaccttatgcctacaaagaattctgtgtcatggtgcgtcatgatcggaggccttgtcaaccacaagcgattcagagaagttaatgaactattcaacactttgatgagctgtagagaaatagtgacaaatgcaatcctcgttaagattgttaatgcctgtgctggtttgaaaagtattggaggaggcaggtgtgtccatgggtttgctgtgaagtctgggtttatccatgaccacatcatcgaggcatcattagttgtgatgtactgtaactccttagatattgatgaggcacagttagaattttgtaaaatggaaagaaagcatgttggctcatgcaagatcgatgaggctagaaagattttttattctatggatggcagagataagatctcgtggaatttgatggtcgatggctat

SEQ ID NO: 83552 - DNA, 1440 bp, Zea Mays
cccgattcctgacgtccgagcgcggcacggcggcagtcgcgggagccccaaactcgagcgcggcgacccaagcgctggcctctaccctttctccctcgactcgttttcccggctggcctgctaccgcggatccggcctcaagtcgggtgcaaaacatcgccgcccctgcccccgcttcgttgtcttccctgacgaccctccccacacggccacaccgtctactgctgctgctgaccaccgtacacgcggggaagaatcagactgccaaacggcaggacaacggcatggcacatccgaggccgtggttttcctaagcccattcctcgctcaacagcagctgagcagattaggcatgcatgttcttcgatgccgctcgggttggggcgaattgcgtcatactgcactcaccgctctgggccttccaggtcctccctgccatgcatgtcgggcgcttgcgatgcaataacctcagcaaacaggctgattgggaagcacctgcgtgctggcagggtggatgctgtgcgggaggtgttcgacaaaatgccgcagcgggacatcgtgtcctggaactccctcatggctgtgtatgcccgttctggggtgcatgacagtgcagttactgcgttcctcaagatgagacgtgaggggttctgcgcagaccacacctccttctccactgtgctgtcggcctgcgcaaggatggagactctagctctagggaggtgcatccatgggcttgcgaccaagaccagatcttcgttgaacgtgtttgtggggtcctccttgatcacgatgtatgccaactgtggggtgtatagctgcctggagtggattgtggatgatgtcgacagtccaaacctggccttatggaatgctctcatatcaggtcttgtggtgaaccatagggtagaggatgctcgcagggtattcgatcagatgccagagcacaatgttgtgtcctggactgtgatgatcaaaggatattttactgtgcatgaggtggggcgggcattggagctgtttaaccttatgcctacaaagaattctgtgtcatggtgcgtcatgatcggaggccttgtcaaccacaagcgattcagagaagttaatgaactattcaacactttgatgagctgtagagaaatagtgacaaatgcaatcctcgttaagattgttaatgcctgtgctggtttgaaaagtattggaggaggcaggtgtgtccatgggtttgctgtgaagtctgggtttatccatgaccacatcatcgaggcatcattagttgtgatgtactgtaactccttagatattgatgaggcacagttagaattttgtaaaatggaaagaaagcatgttggctcatgcaagatcgatgaggctagaaagattttttattctatggatggcagagataagatctcgtggaatttgatggtcgatggctat

SEQ ID NO: 83553 - DNA, 2104 bp, Zea Mays
gccgcctcccgattcctgacgtccgagcgcggcacggcggcagtcgcgggagccccaaactcgagcgcggcgacccaagcgctggcctctaccctttctccctcgactcgttttcccggctggcctgctaccgcggatccggcctcaagtcgggtgcaaaacatcgccgcccctgcccccgcttcgttgtcttccctgacgaccctccccacacggccacaccgtctactgctgctgctgaccaccgtacacgcggggaagaatcagactgccaaacggttaactttctcccgtgttgcttctttgaaaatctagcttaccaaggaatccagcttggaattgaagcctgggcaaactaagttgttcgaaacaggacctatcacatgcaattaaaatttacaaactactagcatatctaattaaaatgtctatatcagcttgtccacatcagtatgccatacaatctactagcattaatttataatagtgtattttttatataagcaattatatatattctaatttttatcgtaaatcatctgtaattcctatagcagcgtgcatcgtatgattagtttactctaaaaacgaggcgtgggacatcgggcgattggatgagagagacaaaattgttgatagggaaaaacgaagtggcactagccatcaaaggaagcgtgttgagattttggtgactgatgtgacgatatatgtcatgatttttgtttcctgctaggagcatgtatatgtggaggcatcttcattaaccagatcctaaatatttattcttcaataaaaatactatatgggtatctataaccttgatgaatcaagtaaaatggtaatatgaaactaactgctgcttataattccagattcactccactgaattaaaagacaaaggttgggccggtccactaacagtctaccactcataggcaggacaacggcatggcacatccgaggccgtggttttcctaagcccattcctcgctcaacagcagctgagcagattaggcatgcatgttcttcgatgccgctcgggttggggcgaattgcgtcatactgcactcaccgctctgggccttccaggtcctccctgccatgcatgtcgggcgcttgcgatgcaataacctcagcaaacaggctgattgggaagcacctgcgtgctggcagggtggatgctgtgcgggaggtgttcgacaaaatgccgcagcgggacatcgtgtcctggaactccctcatggctgtgtatgcccgttctggggtgcatgacagtgcagttactgcgttcctcaagatgagacgtgaggggttctgcgcagaccacacctccttctccactgtgctgtcggcctgcgcaaggatggagactctagctctagggaggtgcatccatgggcttgcgaccaagaccagatcttcgttgaacgtgtttgtggggtcctccttgatcacgatgtatgccaactgtggggtgtatagctgcctggagtggattgtggatgatgtcgacagtccaaacctggccttatggaatgctctcatatcaggtcttgtggtgaaccatagggtagaggatgctcgcagggtattcgatcagatgccagagcacaatgttgtgtcctggactgtgatgatcaaaggatattttactgtgcatgaggtggggcgggcattggagctgtttaaccttatgcctacaaagaattctgtgtcatggtgcgtcatgatcggaggccttgtcaaccacaagcgattcagagaagttaatgaactattcaacactttgatgagctgtagagaaatagtgacaaatgcaatcctcgttaagattgttaatgcctgtgctggtttgaaaagtattggaggaggcaggtgtgtccatgggtttgctgtgaagtctgggtttatccatgaccacatcatcgaggcatcattagttgtgatgtactgtaactccttagatattgatgaggcacagttagaattttgtaaaatggaaagaaagcatgttggctcatgcaagatcgatgaggctagaaagattttttattctatggatggcagagataagatctcgtggaatttgatggtcgatggctat

SEQ ID NO: 83554 - DNA, 1510 bp, Zea Mays
gccgcctcccgattcctgacgtccgagcgcggcacggcggcagtcgcgggagccccaaactcgagcgcggcgacccaagcgctggcctctaccctttctccctcgactcgttttcccggctggcctgctaccgcggatccggcctcaagtcgggtgcaaaacatcgccgcccctgcccccgcttcgttgtcttccctgacgaccctccccacacggccacaccgtctactgctgctgctgaccaccgtacacgcggggaagaatcagactgccaaacgattcactccactgaattaaaagacaaaggttgggccggtccactaacagtctaccactcataggcaggacaacggcatggcacatccgaggccgtggttttcctaagcccattcctcgctcaacagcagctgagcagattaggcatgcatgttcttcgatgccgctcgggttggggcgaattgcgtcatactgcactcaccgctctgggccttccaggtcctccctgccatgcatgtcgggcgcttgcgatgcaataacctcagcaaacaggctgattgggaagcacctgcgtgctggcagggtggatgctgtgcgggaggtgttcgacaaaatgccgcagcgggacatcgtgtcctggaactccctcatggctgtgtatgcccgttctggggtgcatgacagtgcagttactgcgttcctcaagatgagacgtgaggggttctgcgcagaccacacctccttctccactgtgctgtcggcctgcgcaaggatggagactctagctctagggaggtgcatccatgggcttgcgaccaagaccagatcttcgttgaacgtgtttgtggggtcctccttgatcacgatgtatgccaactgtggggtgtatagctgcctggagtggattgtggatgatgtcgacagtccaaacctggccttatggaatgctctcatatcaggtcttgtggtgaaccatagggtagaggatgctcgcagggtattcgatcagatgccagagcacaatgttgtgtcctggactgtgatgatcaaaggatattttactgtgcatgaggtggggcgggcattggagctgtttaaccttatgcctacaaagaattctgtgtcatggtgcgtcatgatcggaggccttgtcaaccacaagcgattcagagaagttaatgaactattcaacactttgatgagctgtagagaaatagtgacaaatgcaatcctcgttaagattgttaatgcctgtgctggtttgaaaagtattggaggaggcaggtgtgtccatgggtttgctgtgaagtctgggtttatccatgaccacatcatcgaggcatcattagttgtgatgtactgtaactccttagatattgatgaggcacagttagaattttgtaaaatggaaagaaagcatgttggctcatgcaagatcgatgaggctagaaagattttttattctatggatggcagagataagatctcgtggaatttgatggtcgatggctat

SEQ ID NO: 83555 - DNA, 2958 bp, Zea Mays
ctcctagcaagcaccaagcaggaggcgggctacgaaccctcctgaattgtaggtcggtgctgtggccccgtggcgaagggatgttgtttcccttcctgtatttgtcctcgcctcgccaaccggacaggaggcgggacaggcgcccagcctctgtcacgggcgttttcgccgcataatcccacgggttccgcgtttcaacccatttccttcgcctttccccttcgccctccattctccgcccaccgtttcctcgggtctgccacgctacgccacgcccatgaacctgtggacggacgacaacgcctccatgatggaggccttcatggcctccgccgacctccccgcctacccctggggggcgccggccgggggcggcaacccgccgccgccgcagatgccgccggcgatggcgatggcgccggggttcaaccaggacacgctgcagcagcggctgcaggccatgatcgaggggtccagggagacctggacctacgccatcttctggcagtcctccctggacgccgccaccggcgcgtcgctgctaggctggggcgacggctactacaagggctgcgacgacgacaagcgcaggcaccgcccgccgctcacgcccgccgcgcaggccgagcaggagcaccgcaagcgcgtgctccgcgagctcaactccctcatctccggcggcgcctccgccgcgcccgcgcccgcgcccgacgaggccgtcgaggaggaggtcaccgacaccgagtggttcttcctcgtctccatgacgcagtccttcctcaacggctcgggcctccccggccaggcgctcttcgcgggccaccacacctggatcgccgccggcctctcctccgcgccgtgcgaccgcgcgcgccaggcctacaacttcggcctccgcaccatggtctgcttccccgtcggcacgggcgtgctcgagctcggctccaccgacgtcgtgttccagaccgccgagaccatggccaagatccgctcgctcttcgggggcgggccggggggtggctcgtggccgcccgtgcagccccaggcggcgccgcagcagcagcacgccgccgaagccgaccaggcggcggagacggacccatccgtgctgtggctcgccgacgcgccggtcgtggacatcaaggattcctactcgcacccgtcggcggccgagatctccgtctccaaaccgcctccgcctccgcctccgccgcagattcacttcgagaacgggagcacgagcacgctcacggagaaccccagcccctccgtgcacgcgccgccagccccgccggcgccaccgcagcggcagcagcagaatcagggcccgttccgccgggagctcaacttctcggatttcgcgtccaatccttccttggcggcggccccgccgttcttcaagcccgagtccggcgagatcctcagcttcggcgtcgacagcaacgcccagaggaacccgtcgccggcgcctcccgccagcctcaccaccgctcccggcagcctattctcgcagtcgcagcacacggcgaccgccgcggcgaacgacgcgaagaacaacaacaacaacaacaagcgttcgatggaagccacctccctggcgagcaacaccaaccaccacccggcggcggcggcgaacgagggcatgctgtccttctcgtcggcgccgaccgcgcggccgtcggcaggcacgggcgcgccggccaagtcggagtccgaccactcggacctggacgcgtccgtgcgcgaggtggagagcagccgcgtcgtggcgccgccgccggaggcggagaagcggccgcggaagcgcgggcggaagcccgcgaacgggcgcgaggagccgctgaaccacgtggaggcggagcggcagcggcgggagaagctgaaccagcgcttctacgcgctgcgcgccgtggtgcccaacgtgtccaagatggacaaggcgtcgctgctcggcgacgccatctcctacatcaacgagctccgcggcaagctgacgtcgctggagtcggacagggagacgctgcaggcccaggtcgaggcgctcaagaaggagcgcgacgcgcggccgcacccgcaccccgctgccgggctcggcgggcacgacgccggcgggccgcgctgccacgcggtagagatcgacgccaagatcctggggctggaggccatgatccgcgtgcagtgccacaagcgcaaccacccgtcggcgcggctgatgacggcgctccgcgagctcgacctggacgtgtaccacgccagcgtctccgtcgtcaaggacctcatgatccagcaggtcgccgtcaagatggccagccgcatgtactcgcaggaccagctcagcgccgcgctctacagccgccttgcggagcccgggtctgtcatgggcaggtaatcaggcaggagagctcatcagctcgcctgtgcctgccggatagggacgataccgatacactgctacccaccacggggactgtcatcgcggtcaccatggttacaaaacacacacacgcacgataggccttagagattcaggaggtggaggacggcggcgacgatgatgatgctggtgttgttgaaaactctagaaggatggatggatgatgacacctagcttccggctgctgttcatcatcctcttgtgtttttgctagtagcctggtaattagcaggattaagcagccgtcaagcgtcacccccgttgttgttaattaagtacctgttgttgtgagctgtgacgacgatggatcgaccgatgttttagcgttggttgaatccaaagctgtatataggatgtatgtattattacagcaggaattcgcttgcaactgaagagtccgttttttttattcaagtacagcacgtggtctttgtttggttttggtgaaaacattcgagggatcgatgtcgctgtatcttgaccgatgttctatgcatctttatttgatgtgcgttcccattagc

SEQ ID NO: 83556 - DNA, 2754 bp, Zea Mays
cctcaacctttctcctctgaatccaagctgcctgaggtgaccgttcaggctttgggacatttactagaagaggagcatccagtcatggctgtatctgataacaaggaaagtgagaaacaaataccacgtccaccaccatgtccttcaggagaacagcaaaaacctaaggacgatggtgatctttcagatgattcccctagtaactctactaaccaaagtgatcatattgatggtgaacatcattacaacattccaatatatcgtccgtacaagtacgatccatatcgatttatgtgtagaagagagagaagaaaccactggaatgatgactatccatatatgtgtggctttcaaaacccatggaatcccaagacttcccttcatactgatgattattggagtccttggccctctcctgagcctgaccagagaatggaaagatacaattcagggagttgttggtcttggccctctccagaaccagactgtgagaaggaaaggtacactgtggctgctgggttatccaatcctcatttgtggacatgttttcttaattgtgtactccaatgtatggttcacactgttcctcttctattgaagcttcggaaagctgatcatccagatccatgtcctcgtgtttctattggattctgttgttattgctccctaaaacatcatgtcgatgaatgtatgaggctctctggtagttctttctaccctgagattttcgttaatcacctgaaatcaatttcatcaaattttaggagtggagtacaacaagatgcgcaggagttcctccgctgtttgcttgataaattggatgaggactccattgctcccaggttctctgaagaatcctcttcctctgaagaatcttcttctactgaagaaggtagtgtcgtaaaagaaatattcagtgggtgcctgaaaagccagctgcgatgcccagagtgcaatcattattcagataaatctgaaccttttctcgatctaagcttggatttgaacatggtggagactctaatggatgctttacaatcctttacaaatactgagttaatcaaagactttatgtgtgatggatgcaaatctcgtgttaacctggagaagcacttcaagatagagcaggcacctgaagtgcttgtaattcatctcaagcgattcactaattttgagtctaagattcgggacaaggttaagttcccaatagagctggatataaactcctttatgagttcttcggatgatacactgcagaagtacgatttgtatggagttgtagaacacctcggtgcatatggcagcggtcactatgtttgttatatccggtcatctgaagctgattggtacaaatttaatgatgacaaggtctgcaaatgttctgtggctagcgctttggacagcgcagcatatcttcttttctatgtgaagcaaggttcatccccgtggttctctaccttactcgagaaagaagacaagtgtccactggctggttctgtaagcttggaagaacaaggcgaaactgctcccttcaacaaagaagggcaggcccggtacaacaatgagagttgtcttgttgagtcaccgggtccacatttgtggagaaaagacttgcctcaatttatccattcctcagaccccactcatgcatctagcactgggtctgccaacaaagaagaggaggcggcatcttctcatgggcaaggcaaaattgctcgcaataacaaagaagaggcgacaacttctcttgagcaaagaaatggatctactttgctggacttatctgaacagttacaaaggaatggaaatgtcaataccttgtcggatgcatcagacaaactggaagaaggctgcaggatgggtgaaacgtcaacgggaacacaagggcctagctgtctgattggatcaggcgacaagaatggccatgccgatgggtgttgggagccatcaggtaagatgaaagatgtcagcccaggggggtcactgaacaagaaggaagcgaaaccaatgacatgtggatctgtagaagttgaagttgatcatgcagttacacagggaggctctcctcggaatgagaacaattgccactcacttcaactttcacataagcacaaagacaactgtgacttcttagaagttgatcatgcagttacacagggagtctctcctcagatcaatgagaacaattgccacgtactccaacttccacatgatcgcagagacaacttctgtcgcaggagtctctccttgcaagtagatgaaatcgggggttgctgtggagcaccatctacggggatgggcgcctcaaactcagagaacgaaagagtagagcccatatccaacgagttgagagacgacaacagagacactagttgtggggaagaacgcagaggaagaggaggcggcgagagtaagaagcggaagtctgccaatggtggtcggtccaaggcattaaggaagcgcatgaagaggacacaccgtaccgtagcaaggcatttcgctttctgtaggtggagagcagtggcaggtacagtatggaaatcgaagacgaggcgaaggtgacgtcggttggctggcgactgaccagcaactattccacggcgcctataggtagaagaaccggcaggggcttttgtaatgcacacaagtatctcggatagagtttagggataaaatgagcaagaacagagtggaggaatggggaagtcacggttgatgtccatgggactttgggcacttttttgcatctttttt

SEQ ID NO: 83557 - DNA, 5425 bp, Zea Mays
atggtggtgcgacgcggcgccggagctcggcgaggaggagggttcggcggcgacgttggggaagatgcagcgagccggatatgcatgggtggcgcggcgctgagggctgtatttttactttctgcaaatgatgcaaggcagaccttgcttgtgccggtgttcatttcaataacacagttgcccgctgcttgtttgattgctaacataacgagcactgtgactgacggtcgtgaaattagagtaggggattgtgctctttttcgggctgtcggtgctcctccgttcattggattgatacgttggattgagaaaaaggaagaagcacatcccaaattacgtgttagttggctttatagacctaccgacgtgaagcttaacaaggatatacaactcagcgctgccccaaacgagatcttctactctttccaccaggacgaagcatctgctgtttctctactgcatccttgcaaagttgcctttttacgtaaaggtgttgaactaccagctggaatttcatcatttgtatgttggcgcgtgtacgatatagacaacaagtgcttatggtggcttactgacaaggactatattaatgaagaagtaaatcgacttctacacagaacaaggctagaaatgcgtgccgcattgcaatcaggtggacgctctccaaagcgtttaaatggtccatcagcttcccaacaactgaagactgcttcagttggtacgcaaaatggtggtttgtctaaaggaaagaagagagatagaagtgaacagggagttgatccagctaagcgggatcgggatcatctacttaaggttgacgagagtgagcctggaaactttaacttggatgatattaagtctgaaatatcaaagataacagaaaaaggtgggcttccaaatgcagaagcagttgaaaagcttgtacatcttatgcaacttgatcgaactgagcagaagatagaccttagtggtcgggttatacttgctgatgttattgcggctacagagagtcctgattgcctcggcagatttgtgcaatcaaggggccttcccgtgttggacagttggcttcaagaggcccacaaagggaagtctggtgatgggactagtcctaaagaagcagataagcctattgacgaacttctctcggccctgcttcgtgcattagctaaattgcctattaatctcagtgcattgcaaagttgtagcattgggaaatctgtcaatcatcttcgtagccataaaaatctggagattcagaagaaagctaagtgtcttgttgagaactggaagaagcgtgttgatgctgagatgaagtcaaatgatgtgaaacctttagtttcaggtcaatctgtttcctggtcaggaaaagcaggtttccaagaaatttcaaatgctggtaccaaacgaggtggttcaagtgagaacagtccaaaaaatccagtgcccactctttcatcatcaaaaattttgactgataagcctgggggcacagatgctgaagcgaagttgaaccctggggtatctgccttgtcaaattcacaacacgtgcaaccgacaaatgttactaccaatttgaaggatcagccctgcaaatcaactggtggaactggtcctgagctgcctactgtaaaagaggagaaaagcagcagttcaagccaatcaccgaacaacagccagtcaatatctagtgagccatcgaaggatgcaagaagttcaactgctgcttctggtggtgctagcaaaacttctgaaagttcttcacgaagccatcgaaaggcaaacaatggtcttgtttcagggaacctgaaggaagcttctgtaggaagatctgtctcccttgatcgatcattgctacaggacaagtcatctcaaactggaacagcttctgaaaaaggagttgatatgccacctgatcatggaaataatcatagattgattgttcgctttccaaatcctggtcgtagtcctgctaatagtgcaagtgctggatcttttgatggcccatctgtaactggggatagagcttcatctcctgtggttgcagataggcatgatcagactgagcgctgggtgaaagggaagactgaaaattctcggcctcatttagcatctgatgctaacacagagtcttggcacagcaacgacggagctgctggttcagaggaaggtgataaatcgccgtgtgctatattagatgatgacaacagcaggacacccgacgattctgttaaggatgcacatgcatcacgagttgcatgctcgtcacatatgaatgaaaaagatgtcagtgaaactaaggtgggaactctgttcagcccaatgaatgctcttattgaaatcaagtactctgaagctagtcattcacggcaagctggagatgacgcagctatgaatcttcttgctagtgtggcaggggaaatatctaaatctgaattggtttccccagtttcttcacccagaagttcttctgcaaagaaattggcccgtgagagtgacaacattggaaaggttaaagtagaaagtgacatgggcccatcacatccagggcaagcagatgctaagaaaggtgccatggggaaggaagtaaaaaatgatgcttgtttggtttcaatggatgaacaacgccaaactacgccatctcctgagctaccatattcaaaagcagttgtatcttcagctaagattgaaacccatgaagttgaagccaagattgcaaacaaatgcaactctcagcatgcttcaattgattccaaaggtgaaagtcaggatgcctgtactgcccatgggaatgttgaagatggcagtacagacaaggatggtgccatggaatctgcattgggcagccagtgtagcttggttgtttccagtagaaattcaagattggttcatgctggggaatctgcattgtctgctgctgacaaacaggcacagggtttgttaaaatcaactaatcataagcagcttctgagtgtatcggacaacccaggagcctttgatagacgtgacagtatggctggcaaattagatttgatggctgcagaggtgagaaaaactgatgtcctgggcaatagtagcatagtgcagaacgaggctgaaaagaaggaacatgcttcttcctttttgcctgatgttcccaaactagttgtagcagcagcatctccagttggtgtggcaaatgtgaataaggagattaaagaatcaaaagacagttcaagtgaatccaatagccatgtaaaatctgaaggtgtcaattctcatcaaagcgagcaaagtgcaaagcagagttcaaagaaatccagtgatggtgtgagtggaaaagaggacgaaaaagaagaccatgtcttatcagacgaaggttcttctctagccgctaacaccaagtcaaatgctacagccaagcttgatttcgacttgaatgaaggaatacctggagatgatgggcatcagtctgagccaactatctcgcctgttgtatgttcttcagcaatccatttaactgggattttgccattcacttcgcctattacaactgggttgcagccagcttcagttacagtagctgcaccagctaaaggaccctttgttcctccagaaaacctgctaagagcaaagccggagattgggtggaaaggttcagcagctacaagtgcatttcgtcctgccgaaccaaggaagattttggagatgcctgttgctgcacgcgacatttcagtttctcatgctgctggtaagcagtctcgtcccacgcttggttttgatttgaatgttgccgatgatcaagctcttgaggaagatatcccacagagttctgcacaaactacctgttctgaatctggaaatacgagaagtcgagatggctcttcacgaagcgctggtattgaatttgatctgaacagagctgatgaagttgcagataatggccaatttgtgccaagtgcttcgcacagagttgaagtgccattgttgtcaacaagatcgttacatggagttttctctaatgctggcctgaatagctcgagggactttgatcttaatagtggaccaggtcttgatgatgttggcactgaagctgcaccaaagagcctaccttctaaaaatacaagcagtattcaattcctaccacaagttcctgttaggatgaatagtgctgccatgagtaatatatcaccatggcttgcctctgccagcccttgtggtccagtagctatacaatcttttttaccaactagagaacagccatacccaattgaggcagcagctggggcccaaaggatcattgcgcctacagctgatgctggccaattcggaggtgatccctgcaggcctccagttgtttcaacgtctccagcgatggtttatcatccgcctgcatatcagtatccaggattcccttttcctcccagtgttcaccttcaaacaccggcattttcaattggatcagcaacatttaataattctgcatctccaggagttccatactttccaactgtctccccttcttttgttgggccagctggagcgttaactccccaacatttaaggcagtttgctataaaccttgctgagggtagcagcagcagtggacgagacagtaatcgtaaatgggaaagtcagggccttgatcttaactcaggccctggaagtatagatttagaaggaaaggatgaacgggtacctttaccagtcagacaaaatttgatcccacccccacacggctttgtggaggatcaaggaagaatctaccagatgccagttgtaggaacaaagagaaaggaacctgatggcagctgggactcagaaaggtctacatacaagcaattatcatggcaatgatggctctgaagatcattctgcaccggactggtctgcgacgagcatgtacctgcatgtagaacttgggcggtgtgttcttcagtcactgcactatacttgggggattggggattcagcccatgacgatgatgtgggatcgaggaaacgaaaacttgctgtaattgttgtagattttttccctagctgttaggcttttggttctaatttactcaggagggggtatggctgcggaggaggaatctttgtgattctgagctctggggctattgtaattagaccgtccgctctgtgtttgttggtgatatactattgatcacatgctgcagctttacattacataagaatttagatgtgaccttgttccttgctggggaagcgttacgtcagctgaccatatgaacactggtgcaacgaacagctcgagttgctacgccatgtatctttggattgcagtgcagctgtatgtataagaattctagcagatcagcaagctatatttttttgctgtttttttttgtccatctgcatctgatttagtcttgactcttgatgctctttctttaaactatttgtcggaagtgatgaccag

SEQ ID NO: 83558 - DNA, 5894 bp, Zea Mays
gttctcatggtcatgaccctgacctgcaaggacaagtcgagacgagacatcatctcttctctctccccatctctcgacccgacctcgctcgccgtctctgttgtgccctgcccctgtcccttttctctctccgcctccgccccacctcggatcgagtccaagccgccgagcccactccgctgacccagagcctggaaacccccaatcgagcccgaccggagcccgtcgattccgccggattcgagctcccgccgggtgaggcggtccgcccgaatcggccgattggactcgaattcgggtggtccggatgcgcgcagagcggaggctcgcggatctagggtttcggagggcctagggttagtgccggtgatctggtgatggtggtgcgacgcggcgccggagctcggcgaggaggagggttcggcggcgacgttggggaagatgcagcgagccggatatgcatgggtggcgcggcgctgaggggtgtgacgtcaggaggcggcgtctcgttcggctcatgtggccagcggcacgcgtagaggcagaagctccaccaccaccggcacaaggaccagctacttctccttctggttcatctgttcccccgtctcggacgacttctcttccgcccgaatcggcggcgcagcaggagtgcatcgatcttcctcgcccagtgtcacccggttcctttgtaaaggacggtcgtgaaattagagtaggggattgtgctctttttcgggctgtcggtgctcctccgttcattggattgatacgttggattgagaaaaaggaagaagcacatcccaaattacgtgttagttggctttatagacctaccgacgtgaagcttaacaaggatatacaactcagcgctgccccaaacgagatcttctactctttccaccaggacgaagcatctgctgtttctctactgcatccttgcaaagttgcctttttacgtaaaggtgttgaactaccagctggaatttcatcatttgtatgttggcgcgtgtacgatatagacaacaagtgcttatggtggcttactgacaaggactatattaataaacggcaggaagaagtaaatcgacttctacacagaacaaggctagaaatgcgtgccgcattgcaatcaggtggacgctctccaaagcgtttaaatggtccatcagcttcccaacaactgaagactgcttcagttggtacgcaaaatggtggtttgtctaaaggaaagaagagagatagaagtgaacagggagttgatccagctaagcgggatcgggatcatctacttaaggttgacgagagtgagcctggaaactttaacttggatgatattaagtctgaaatatcaaagataacagaaaaaggtgggcttccaaatgcagaagcagttgaaaagcttgtacatcttatgcaacttgatcgaactgagcagaagatagaccttagtggtcgggttatacttgctgatgttattgcggctacagagagtcctgattgcctcggcagatttgtgcaatcaaggggccttcccgtgttggacagttggcttcaagaggcccacaaagggaagtctggtgatgggactagtcctaaagaagcagataagcctattgacgaacttctctcggccctgcttcgtgcattagctaaattgcctattaatctcagtgcattgcaaagttgtagcattgggaaatctgtcaatcatcttcgtagccataaaaatctggagattcagaagaaagctaagtgtcttgttgagaactggaagaagcgtgttgatgctgagatgaagtcaaatgatgtgaaacctttagtttcaggtcaatctgtttcctggtcaggaaaagcaggtttccaagaaatttcaaatgctggtaccaaacgaggtggttcaagtgagaacagtccaaaaaatccagtgcccactctttcatcatcaaaaattttgactgataagcctgggggcacagatgctgaagcgaagttgaaccctggggtatctgccttgtcaaattcacaacacgtgcaaccgacaaatgttactaccaatttgaaggatcagccctgcaaatcaactggtggaactggtcctgagctgcctactgtaaaagaggagaaaagcagcagttcaagccaatcaccgaacaacagccagtcaatatctagtgagccatcgaaggatgcaagaagttcaactgctgcttctggtggtgctagcaaaacttctgaaagttcttcacgaagccatcgaaaggcaaacaatggtcttgtttcagggaacctgaaggaagcttctgtaggaagatctgtctcccttgatcgatcattgctacaggacaagtcatctcaaactggaacagcttctgaaaaaggagttgatatgccacctgatcatggaaataatcatagattgattgttcgctttccaaatcctggtcgtagtcctgctaatagtgcaagtgctggatcttttgatggcccatctgtaactggggatagagcttcatctcctgtggttgcagataggcatgatcagactgagcgctgggtgaaagggaagactgaaaattctcggcctcatttagcatctgatgctaacacagagtcttggcacagcaacgacggagctgctggttcagaggaaggtgataaatcgccgtgtgctatattagatgatgacaacagcaggacacccgacgattctgttaaggatgcacatgcatcacgagttgcatgctcgtcacatatgaatgaaaaagatgtcagtgaaactaaggtgggaactctgttcagcccaatgaatgctcttattgaaatcaagtactctgaagctagtcattcacggcaagctggagatgacgcagctatgaatcttcttgctagtgtggcaggggaaatatctaaatctgaattggtttccccagtttcttcacccagaagttcttctgcaaagaaattggcccgtgagagtgacaacattggaaaggttaaagtagaaagtgacatgggcccatcacatccagggcaagcagatgctaagaaaggtgccatggggaaggaagtaaaaaatgatgcttgtttggtttcaatggatgaacaacgccaaactacgccatctcctgagctaccatattcaaaagcagttgtatcttcagctaagattgaaacccatgaagttgaagccaagattgcaaacaaatgcaactctcagcatgcttcaattgattccaaaggtgaaagtcaggatgcctgtactgcccatgggaatgttgaagatggcagtacagacaaggatggtgccatggaatctgcattgggcagccagtgtagcttggttgtttccagtagaaattcaagattggttcatgctggggaatctgcattgtctgctgctgacaaacaggcacagggtttgttaaaatcaactaatcataagcagcttctgagtgtatcggacaacccaggagcctttgatagacgtgacagtatggctggcaaattagatttgatggctgcagaggtgagaaaaactgatgtcctgggcaatagtagcatagtgcagaacgaggctgaaaagaaggaacatgcttcttcctttttgcctgatgttcccaaactagttgtagcagcagcatctccagttggtgtggcaaatgtgaataaggagattaaagaatcaaaagacagttcaagtgaatccaatagccatgtaaaatctgaaggtgtcaattctcatcaaagcgagcaaagtgcaaagcagagttcaaagaaatccagtgatggtgtgagtggaaaagaggacgaaaaagaagaccatgtcttatcagacgaaggttcttctctagccgctaacaccaagtcaaatgctacagccaagcttgatttcgacttgaatgaaggaatacctggagatgatgggcatcagtctgagccaactatctcgcctgttgtatgttcttcagcaatccatttaactgggattttgccattcacttcgcctattacaactgggttgcagccagcttcagttacagtagctgcaccagctaaaggaccctttgttcctccagaaaacctgctaagagcaaagccggagattgggtggaaaggttcagcagctacaagtgcatttcgtcctgccgaaccaaggaagattttggagatgcctgttgctgcacgcgacatttcagtttctcatgctgctggtaagcagtctcgtcccacgcttggttttgatttgaatgttgccgatgatcaagctcttgaggaagatatcccacagagttctgcacaaactacctgttctgaatctggaaatacgagaagtcgagatggctcttcacgaagcgctggtattgaatttgatctgaacagagctgatgaagttgcagataatggccaatttgtgccaagtgcttcgcacagagttgaagtgccattgttgtcaacaagatcgttacatggagttttctctaatgctggcctgaatagctcgagggactttgatcttaatagtggaccaggtcttgatgatgttggcactgaagctgcaccaaagagcctaccttctaaaaatacaagcagtattcaattcctaccacaagttcctgttaggatgaatagtgctgccatgagtaatatatcaccatggcttgcctctgccagcccttgtggtccagtagctatacaatcttttttaccaactagagaacagccatacccaattgaggcagcagctggggcccaaaggatcattgcgcctacagctgatgctggccaattcggaggtgatccctgcaggcctccagttgtttcaacgtctccagcgatggtttatcatccgcctgcatatcagtatccaggattcccttttcctcccagtgttcaccttcaaacaccggcattttcaattggatcagcaacatttaataattctgcatctccaggagttccatactttccaactgtctccccttcttttgttgggccagctggagcgttaactccccaacatttaaggcagtttgctataaaccttgctgagggtagcagcagcagtggacgagacagtaatcgtaaatgggaaagtcagggccttgatcttaactcaggccctggaagtatagatttagaaggaaaggatgaacgggtacctttaccagtcagacaaaatttgatcccacccccacacggctttgtggaggatcaaggaagaatctaccagatgccagttgtaggaacaaagagaaaggaacctgatggcagctgggactcagaaaggtctacatacaagcaattatcatggcaatgatggctctgaagatcattctgcaccggactggtacctgcatgtagaacttgggcggtgtgttcttcagtcactgcactatacttgggggattggggattcagcccatgacgatgatgtgggatcgaggaaacgaaaacttgctgtaattgttgtagattttttccctagctgttaggcttttggttctaatttactcaggagggggtatggctgcggaggaggaatctttgtgattctgagctctggggctattgtaattagaccgtccgctctgtgtttgttggtgatatactattgatcacatgctgcagctttacattacataagaatttagatgtgaccttgttccttgctggggaagcgttacgtcagctgaccatatgaacactggtgcaacgaacagctcgagttgctacgccatgtatctttggattgcagtgcagctgtatgtataagaattctagcagatcagcaagctatatttttttgctgtttttttttgtccatctgcatctgatttagtcttgactcttgatgctctttctttaaactatttgtcggaagtgatgaccag

SEQ ID NO: 83559 - DNA, 5900 bp, Zea Mays
gttctcatggtcatgaccctgacctgcaaggacaagtcgagacgagacatcatctcttctctctccccatctctcgacccgacctcgctcgccgtctctgttgtgccctgcccctgtcccttttctctctccgcctccgccccacctcggatcgagtccaagccgccgagcccactccgctgacccagagcctggaaacccccaatcgagcccgaccggagcccgtcgattccgccggattcgagctcccgccgggtgaggcggtccgcccgaatcggccgattggactcgaattcgggtggtccggatgcgcgcagagcggaggctcgcggatctagggtttcggagggcctagggttagtgccggtgatctggtgatggtggtgcgacgcggcgccggagctcggcgaggaggagggttcggcggcgacgttggggaagatgcagcgagccggatatgcatgggtggcgcggcgctgaggggtgtgacgtcaggaggcggcgtctcgttcggctcatgtggccagcggcacgcgtagaggcagaagctccaccaccaccggcacaaggaccagctacttctccttctggttcatctgttcccccgtctcggacgacttctcttccgcccgaatcggcggcgcagcaggagtgcatcgatcttcctcgcccagtgtcacccggttcctttgtaaaggacggtcgtgaaattagagtaggggattgtgctctttttcgggctgtcggtgctcctccgttcattggattgatacgttggattgagaaaaaggaagaagcacatcccaaattacgtgttagttggctttatagacctaccgacgtgaagcttaacaaggatatacaactcagcgctgccccaaacgagatcttctactctttccaccaggacgaagcatctgctgtttctctactgcatccttgcaaagttgcctttttacgtaaaggtgttgaactaccagctggaatttcatcatttgtatgttggcgcgtgtacgatatagacaacaagtgcttatggtggcttactgacaaggactatattaatgaagaagtaaatcgacttctacacagaacaaggctagaaatgcgtgccgcattgcaatcaggtggacgctctccaaagcgtttaaatggtccatcagcttcccaacaactgaagactgcttcagttggtacgcaaaatggtggtttgtctaaaggaaagaagagagatagaagtgaacagggagttgatccagctaagcgggatcgggatcatctacttaaggttgacgagagtgagcctggaaactttaacttggatgatattaagtctgaaatatcaaagataacagaaaaaggtgggcttccaaatgcagaagcagttgaaaagcttgtacatcttatgcaacttgatcgaactgagcagaagatagaccttagtggtcgggttatacttgctgatgttattgcggctacagagagtcctgattgcctcggcagatttgtgcaatcaaggggccttcccgtgttggacagttggcttcaagaggcccacaaagggaagtctggtgatgggactagtcctaaagaagcagataagcctattgacgaacttctctcggccctgcttcgtgcattagctaaattgcctattaatctcagtgcattgcaaagttgtagcattgggaaatctgtcaatcatcttcgtagccataaaaatctggagattcagaagaaagctaagtgtcttgttgagaactggaagaagcgtgttgatgctgagatgaagtcaaatgatgtgaaacctttagtttcaggtcaatctgtttcctggtcaggaaaagcaggtttccaagaaatttcaaatgctggtaccaaacgaggtggttcaagtgagaacagtccaaaaaatccagtgcccactctttcatcatcaaaaattttgactgataagcctgggggcacagatgctgaagcgaagttgaaccctggggtatctgccttgtcaaattcacaacacgtgcaaccgacaaatgttactaccaatttgaaggatcagccctgcaaatcaactggtggaactggtcctgagctgcctactgtaaaagaggagaaaagcagcagttcaagccaatcaccgaacaacagccagtcaatatctagtgagccatcgaaggatgcaagaagttcaactgctgcttctggtggtgctagcaaaacttctgaaagttcttcacgaagccatcgaaaggcaaacaatggtcttgtttcagggaacctgaaggaagcttctgtaggaagatctgtctcccttgatcgatcattgctacaggacaagtcatctcaaactggaacagcttctgaaaaaggagttgatatgccacctgatcatggaaataatcatagattgattgttcgctttccaaatcctggtcgtagtcctgctaatagtgcaagtgctggatcttttgatggcccatctgtaactggggatagagcttcatctcctgtggttgcagataggcatgatcagactgagcgctgggtgaaagggaagactgaaaattctcggcctcatttagcatctgatgctaacacagagtcttggcacagcaacgacggagctgctggttcagaggaaggtgataaatcgccgtgtgctatattagatgatgacaacagcaggacacccgacgattctgttaaggatgcacatgcatcacgagttgcatgctcgtcacatatgaatgaaaaagatgtcagtgaaactaaggtgggaactctgttcagcccaatgaatgctcttattgaaatcaagtactctgaagctagtcattcacggcaagctggagatgacgcagctatgaatcttcttgctagtgtggcaggggaaatatctaaatctgaattggtttccccagtttcttcacccagaagttcttctgcaaagaaattggcccgtgagagtgacaacattggaaaggttaaagtagaaagtgacatgggcccatcacatccagggcaagcagatgctaagaaaggtgccatggggaaggaagtaaaaaatgatgcttgtttggtttcaatggatgaacaacgccaaactacgccatctcctgagctaccatattcaaaagcagttgtatcttcagctaagattgaaacccatgaagttgaagccaagattgcaaacaaatgcaactctcagcatgcttcaattgattccaaaggtgaaagtcaggatgcctgtactgcccatgggaatgttgaagatggcagtacagacaaggatggtgccatggaatctgcattgggcagccagtgtagcttggttgtttccagtagaaattcaagattggttcatgctggggaatctgcattgtctgctgctgacaaacaggcacagggtttgttaaaatcaactaatcataagcagcttctgagtgtatcggacaacccaggagcctttgatagacgtgacagtatggctggcaaattagatttgatggctgcagaggtgagaaaaactgatgtcctgggcaatagtagcatagtgcagaacgaggctgaaaagaaggaacatgcttcttcctttttgcctgatgttcccaaactagttgtagcagcagcatctccagttggtgtggcaaatgtgaataaggagattaaagaatcaaaagacagttcaagtgaatccaatagccatgtaaaatctgaaggtgtcaattctcatcaaagcgagcaaagtgcaaagcagagttcaaagaaatccagtgatggtgtgagtggaaaagaggacgaaaaagaagaccatgtcttatcagacgaaggttcttctctagccgctaacaccaagtcaaatgctacagccaagcttgatttcgacttgaatgaaggaatacctggagatgatgggcatcagtctgagccaactatctcgcctgttgtatgttcttcagcaatccatttaactgggattttgccattcacttcgcctattacaactgggttgcagccagcttcagttacagtagctgcaccagctaaaggaccctttgttcctccagaaaacctgctaagagcaaagccggagattgggtggaaaggttcagcagctacaagtgcatttcgtcctgccgaaccaaggaagattttggagatgcctgttgctgcacgcgacatttcagtttctcatgctgctggtaagcagtctcgtcccacgcttggttttgatttgaatgttgccgatgatcaagctcttgaggaagatatcccacagagttctgcacaaactacctgttctgaatctggaaatacgagaagtcgagatggctcttcacgaagcgctggtattgaatttgatctgaacagagctgatgaagttgcagataatggccaatttgtgccaagtgcttcgcacagagttgaagtgccattgttgtcaacaagatcgttacatggagttttctctaatgctggcctgaatagctcgagggactttgatcttaatagtggaccaggtcttgatgatgttggcactgaagctgcaccaaagagcctaccttctaaaaatacaagcagtattcaattcctaccacaagttcctgttaggatgaatagtgctgccatgagtaatatatcaccatggcttgcctctgccagcccttgtggtccagtagctatacaatcttttttaccaactagagaacagccatacccaattgaggcagcagctggggcccaaaggatcattgcgcctacagctgatgctggccaattcggaggtgatccctgcaggcctccagttgtttcaacgtctccagcgatggtttatcatccgcctgcatatcagtatccaggattcccttttcctcccagtgttcaccttcaaacaccggcattttcaattggatcagcaacatttaataattctgcatctccaggagttccatactttccaactgtctccccttcttttgttgggccagctggagcgttaactccccaacatttaaggcagtttgctataaaccttgctgagggtagcagcagcagtggacgagacagtaatcgtaaatgggaaagtcagggccttgatcttaactcaggccctggaagtatagatttagaaggaaaggatgaacgggtacctttaccagtcagacaaaatttgatcccacccccacacggctttgtggaggatcaaggaagaatctaccagatgccagttgtaggaacaaagagaaaggaacctgatggcagctgggactcagaaaggtctacatacaagcaattatcatggcaatgatggctctgaagatcattctgcaccggactggtctgcgacgagcatgtacctgcatgtagaacttgggcggtgtgttcttcagtcactgcactatacttgggggattggggattcagcccatgacgatgatgtgggatcgaggaaacgaaaacttgctgtaattgttgtagattttttccctagctgttaggcttttggttctaatttactcaggagggggtatggctgcggaggaggaatctttgtgattctgagctctggggctattgtaattagaccgtccgctctgtgtttgttggtgatatactattgatcacatgctgcagctttacattacataagaatttagatgtgaccttgttccttgctggggaagcgttacgtcagctgaccatatgaacactggtgcaacgaacagctcgagttgctacgccatgtatctttggattgcagtgcagctgtatgtataagaattctagcagatcagcaagctatatttttttgctgtttttttttgtccatctgcatctgatttagtcttgactcttgatgctctttctttaaactatttgtcggaagtgatgaccag

SEQ ID NO: 83560 - DNA, 5917 bp, Zea Mays
cctgcattgttctcatggtcatgaccctgacctgcaaggacaagtcgagacgagacatcatctcttctctctccccatctctcgacccgacctcgctcgccgtctctgttgtgccctgcccctgtcccttttctctctccgcctccgccccacctcggatcgagtccaagccgccgagcccactccgctgacccagagcctggaaacccccaatcgagcccgaccggagcccgtcgattccgccggattcgagctcccgccgggtgaggcggtccgcccgaatcggccgattggactcgaattcgggtggtccggatgcgcgcagagcggaggctcgcggatctagggtttcggagggcctagggttagtgccggtgatctggtgatggtggtgcgacgcggcgccggagctcggcgaggaggagggttcggcggcgacgttggggaagatgcagcgagccggatatgcatgggtggcgcggcgctgaggggtgtgacgtcaggaggcggcgtctcgttcggctcatgtggccagcggcacgcgtagaggcagaagctccaccaccaccggcacaaggaccagctacttctccttctggttcatctgttcccccgtctcggacgacttctcttccgcccgaatcggcggcgcagcaggagtgcatcgatcttcctcgcccagtgtcacccggttcctttgtaaaggacggtcgtgaaattagagtaggggattgtgctctttttcgggctgtcggtgctcctccgttcattggattgatacgttggattgagaaaaaggaagaagcacatcccaaattacgtgttagttggctttatagacctaccgacgtgaagcttaacaaggatatacaactcagcgctgccccaaacgagatcttctactctttccaccaggacgaagcatctgctgtttctctactgcatccttgcaaagttgcctttttacgtaaaggtgttgaactaccagctggaatttcatcatttgtatgttggcgcgtgtacgatatagacaacaagtgcttatggtggcttactgacaaggactatattaataaacggcaggaagaagtaaatcgacttctacacagaacaaggctagaaatgcgtgccgcattgcaatcaggtggacgctctccaaagcgtttaaatggtccatcagcttcccaacaactgaagactgcttcagttggtacgcaaaatggtggtttgtctaaaggaaagaagagagatagaagtgaacagggagttgatccagctaagcgggatcgggatcatctacttaaggttgacgagagtgagcctggaaactttaacttggatgatattaagtctgaaatatcaaagataacagaaaaaggtgggcttccaaatgcagaagcagttgaaaagcttgtacatcttatgcaacttgatcgaactgagcagaagatagaccttagtggtcgggttatacttgctgatgttattgcggctacagagagtcctgattgcctcggcagatttgtgcaatcaaggggccttcccgtgttggacagttggcttcaagaggcccacaaagggaagtctggtgatgggactagtcctaaagaagcagataagcctattgacgaacttctctcggccctgcttcgtgcattagctaaattgcctattaatctcagtgcattgcaaagttgtagcattgggaaatctgtcaatcatcttcgtagccataaaaatctggagattcagaagaaagctaagtgtcttgttgagaactggaagaagcgtgttgatgctgagatgaagtcaaatgatgtgaaacctttagtttcaggtcaatctgtttcctggtcaggaaaagcaggtttccaagaaatttcaaatgctggtaccaaacgaggtggttcaagtgagaacagtccaaaaaatccagtgcccactctttcatcatcaaaaattttgactgataagcctgggggcacagatgctgaagcgaagttgaaccctggggtatctgccttgtcaaattcacaacacgtgcaaccgacaaatgttactaccaatttgaaggatcagccctgcaaatcaactggtggaactggtcctgagctgcctactgtaaaagaggagaaaagcagcagttcaagccaatcaccgaacaacagccagtcaatatctagtgagccatcgaaggatgcaagaagttcaactgctgcttctggtggtgctagcaaaacttctgaaagttcttcacgaagccatcgaaaggcaaacaatggtcttgtttcagggaacctgaaggaagcttctgtaggaagatctgtctcccttgatcgatcattgctacaggacaagtcatctcaaactggaacagcttctgaaaaaggagttgatatgccacctgatcatggaaataatcatagattgattgttcgctttccaaatcctggtcgtagtcctgctaatagtgcaagtgctggatcttttgatggcccatctgtaactggggatagagcttcatctcctgtggttgcagataggcatgatcagactgagcgctgggtgaaagggaagactgaaaattctcggcctcatttagcatctgatgctaacacagagtcttggcacagcaacgacggagctgctggttcagaggaaggtgataaatcgccgtgtgctatattagatgatgacaacagcaggacacccgacgattctgttaaggatgcacatgcatcacgagttgcatgctcgtcacatatgaatgaaaaagatgtcagtgaaactaaggtgggaactctgttcagcccaatgaatgctcttattgaaatcaagtactctgaagctagtcattcacggcaagctggagatgacgcagctatgaatcttcttgctagtgtggcaggggaaatatctaaatctgaattggtttccccagtttcttcacccagaagttcttctgcaaagaaattggcccgtgagagtgacaacattggaaaggttaaagtagaaagtgacatgggcccatcacatccagggcaagcagatgctaagaaaggtgccatggggaaggaagtaaaaaatgatgcttgtttggtttcaatggatgaacaacgccaaactacgccatctcctgagctaccatattcaaaagcagttgtatcttcagctaagattgaaacccatgaagttgaagccaagattgcaaacaaatgcaactctcagcatgcttcaattgattccaaaggtgaaagtcaggatgcctgtactgcccatgggaatgttgaagatggcagtacagacaaggatggtgccatggaatctgcattgggcagccagtgtagcttggttgtttccagtagaaattcaagattggttcatgctggggaatctgcattgtctgctgctgacaaacaggcacagggtttgttaaaatcaactaatcataagcagcttctgagtgtatcggacaacccaggagcctttgatagacgtgacagtatggctggcaaattagatttgatggctgcagaggtgagaaaaactgatgtcctgggcaatagtagcatagtgcagaacgaggctgaaaagaaggaacatgcttcttcctttttgcctgatgttcccaaactagttgtagcagcagcatctccagttggtgtggcaaatgtgaataaggagattaaagaatcaaaagacagttcaagtgaatccaatagccatgtaaaatctgaaggtgtcaattctcatcaaagcgagcaaagtgcaaagcagagttcaaagaaatccagtgatggtgtgagtggaaaagaggacgaaaaagaagaccatgtcttatcagacgaaggttcttctctagccgctaacaccaagtcaaatgctacagccaagcttgatttcgacttgaatgaaggaatacctggagatgatgggcatcagtctgagccaactatctcgcctgttgtatgttcttcagcaatccatttaactgggattttgccattcacttcgcctattacaactgggttgcagccagcttcagttacagtagctgcaccagctaaaggaccctttgttcctccagaaaacctgctaagagcaaagccggagattgggtggaaaggttcagcagctacaagtgcatttcgtcctgccgaaccaaggaagattttggagatgcctgttgctgcacgcgacatttcagtttctcatgctgctggtaagcagtctcgtcccacgcttggttttgatttgaatgttgccgatgatcaagctcttgaggaagatatcccacagagttctgcacaaactacctgttctgaatctggaaatacgagaagtcgagatggctcttcacgaagcgctggtattgaatttgatctgaacagagctgatgaagttgcagataatggccaatttgtgccaagtgcttcgcacagagttgaagtgccattgttgtcaacaagatcgttacatggagttttctctaatgctggcctgaatagctcgagggactttgatcttaatagtggaccaggtcttgatgatgttggcactgaagctgcaccaaagagcctaccttctaaaaatacaagcagtattcaattcctaccacaagttcctgttaggatgaatagtgctgccatgagtaatatatcaccatggcttgcctctgccagcccttgtggtccagtagctatacaatcttttttaccaactagagaacagccatacccaattgaggcagcagctggggcccaaaggatcattgcgcctacagctgatgctggccaattcggaggtgatccctgcaggcctccagttgtttcaacgtctccagcgatggtttatcatccgcctgcatatcagtatccaggattcccttttcctcccagtgttcaccttcaaacaccggcattttcaattggatcagcaacatttaataattctgcatctccaggagttccatactttccaactgtctccccttcttttgttgggccagctggagcgttaactccccaacatttaaggcagtttgctataaaccttgctgagggtagcagcagcagtggacgagacagtaatcgtaaatgggaaagtcagggccttgatcttaactcaggccctggaagtatagatttagaaggaaaggatgaacgggtacctttaccagtcagacaaaatttgatcccacccccacacggctttgtggaggatcaaggaagaatctaccagatgccagttgtaggaacaaagagaaaggaacctgatggcagctgggactcagaaaggtctacatacaagcaattatcatggcaatgatggctctgaagatcattctgcaccggactggtctgcgacgagcatgtacctgcatgtagaacttgggcggtgtgttcttcagtcactgcactatacttgggggattggggattcagcccatgacgatgatgtgggatcgaggaaacgaaaacttgctgtaattgttgtagattttttccctagctgttaggcttttggttctaatttactcaggagggggtatggctgcggaggaggaatctttgtgattctgagctctggggctattgtaattagaccgtccgctctgtgtttgttggtgatatactattgatcacatgctgcagctttacattacataagaatttagatgtgaccttgttccttgctggggaagcgttacgtcagctgaccatatgaacactggtgcaacgaacagctcgagttgctacgccatgtatctttggattgcagtgcagctgtatgtataagaattctagcagatcagcaagctatatttttttgctgtttttttttgtccatctgcatctgatttagtcttgactcttgatgctctttctttaaactatttgtcggaagtgatgaccag

SEQ ID NO: 83561 - DNA, 5930 bp, Zea Mays
cttgactttcgcatcgtgtggagtgcactggcttcacatgaacggcgtcgccgcgcaggcacagaaggtcccctgcggctgcggtcactgtgcatggtcgaatttgcccatcctgcattgttctcatggtcatgaccctgacctgcaaggacaagtcgagacgagacatcatctcttctctctccccatctctcgacccgacctcgctcgccgtctctgttgtgccctgcccctgtcccttttctctctccgcctccgccccacctcggatcgagtccaagccgccgagcccactccgctgacccagagcctggaaacccccaatcgagcccgaccggagcccgtcgattccgccggattcgagctcccgccgggtgaggcggtccgcccgaatcggccgattggactcgaattcgggtggtccggatgcgcgcagagcggaggctcgcggatctagggtttcggagggcctagggttagtgccggtgatctggtgatggtggtgcgacgcggcgccggagctcggcgaggaggagggttcggcggcgacgttggggaagatgcagcgagccggatatgcatgggtggcgcggcgctgagggctgtatttttactttctgcaaatgatgcaaggcagaccttgcttgtgccggtgttcatttcaataacacagttgcccgctgcttgtttgattgctaacataacgagcactgtgactgacggtcgtgaaattagagtaggggattgtgctctttttcgggctgtcggtgctcctccgttcattggattgatacgttggattgagaaaaaggaagaagcacatcccaaattacgtgttagttggctttatagacctaccgacgtgaagcttaacaaggatatacaactcagcgctgccccaaacgagatcttctactctttccaccaggacgaagcatctgctgtttctctactgcatccttgcaaagttgcctttttacgtaaaggtgttgaactaccagctggaatttcatcatttgtatgttggcgcgtgtacgatatagacaacaagtgcttatggtggcttactgacaaggactatattaataaacggcaggaagaagtaaatcgacttctacacagaacaaggctagaaatgcgtgccgcattgcaatcaggtggacgctctccaaagcgtttaaatggtccatcagcttcccaacaactgaagactgcttcagttggtacgcaaaatggtggtttgtctaaaggaaagaagagagatagaagtgaacagggagttgatccagctaagcgggatcgggatcatctacttaaggttgacgagagtgagcctggaaactttaacttggatgatattaagtctgaaatatcaaagataacagaaaaaggtgggcttccaaatgcagaagcagttgaaaagcttgtacatcttatgcaacttgatcgaactgagcagaagatagaccttagtggtcgggttatacttgctgatgttattgcggctacagagagtcctgattgcctcggcagatttgtgcaatcaaggggccttcccgtgttggacagttggcttcaagaggcccacaaagggaagtctggtgatgggactagtcctaaagaagcagataagcctattgacgaacttctctcggccctgcttcgtgcattagctaaattgcctattaatctcagtgcattgcaaagttgtagcattgggaaatctgtcaatcatcttcgtagccataaaaatctggagattcagaagaaagctaagtgtcttgttgagaactggaagaagcgtgttgatgctgagatgaagtcaaatgatgtgaaacctttagtttcaggtcaatctgtttcctggtcaggaaaagcaggtttccaagaaatttcaaatgctggtaccaaacgaggtggttcaagtgagaacagtccaaaaaatccagtgcccactctttcatcatcaaaaattttgactgataagcctgggggcacagatgctgaagcgaagttgaaccctggggtatctgccttgtcaaattcacaacacgtgcaaccgacaaatgttactaccaatttgaaggatcagccctgcaaatcaactggtggaactggtcctgagctgcctactgtaaaagaggagaaaagcagcagttcaagccaatcaccgaacaacagccagtcaatatctagtgagccatcgaaggatgcaagaagttcaactgctgcttctggtggtgctagcaaaacttctgaaagttcttcacgaagccatcgaaaggcaaacaatggtcttgtttcagggaacctgaaggaagcttctgtaggaagatctgtctcccttgatcgatcattgctacaggacaagtcatctcaaactggaacagcttctgaaaaaggagttgatatgccacctgatcatggaaataatcatagattgattgttcgctttccaaatcctggtcgtagtcctgctaatagtgcaagtgctggatcttttgatggcccatctgtaactggggatagagcttcatctcctgtggttgcagataggcatgatcagactgagcgctgggtgaaagggaagactgaaaattctcggcctcatttagcatctgatgctaacacagagtcttggcacagcaacgacggagctgctggttcagaggaaggtgataaatcgccgtgtgctatattagatgatgacaacagcaggacacccgacgattctgttaaggatgcacatgcatcacgagttgcatgctcgtcacatatgaatgaaaaagatgtcagtgaaactaaggtgggaactctgttcagcccaatgaatgctcttattgaaatcaagtactctgaagctagtcattcacggcaagctggagatgacgcagctatgaatcttcttgctagtgtggcaggggaaatatctaaatctgaattggtttccccagtttcttcacccagaagttcttctgcaaagaaattggcccgtgagagtgacaacattggaaaggttaaagtagaaagtgacatgggcccatcacatccagggcaagcagatgctaagaaaggtgccatggggaaggaagtaaaaaatgatgcttgtttggtttcaatggatgaacaacgccaaactacgccatctcctgagctaccatattcaaaagcagttgtatcttcagctaagattgaaacccatgaagttgaagccaagattgcaaacaaatgcaactctcagcatgcttcaattgattccaaaggtgaaagtcaggatgcctgtactgcccatgggaatgttgaagatggcagtacagacaaggatggtgccatggaatctgcattgggcagccagtgtagcttggttgtttccagtagaaattcaagattggttcatgctggggaatctgcattgtctgctgctgacaaacaggcacagggtttgttaaaatcaactaatcataagcagcttctgagtgtatcggacaacccaggagcctttgatagacgtgacagtatggctggcaaattagatttgatggctgcagaggtgagaaaaactgatgtcctgggcaatagtagcatagtgcagaacgaggctgaaaagaaggaacatgcttcttcctttttgcctgatgttcccaaactagttgtagcagcagcatctccagttggtgtggcaaatgtgaataaggagattaaagaatcaaaagacagttcaagtgaatccaatagccatgtaaaatctgaaggtgtcaattctcatcaaagcgagcaaagtgcaaagcagagttcaaagaaatccagtgatggtgtgagtggaaaagaggacgaaaaagaagaccatgtcttatcagacgaaggttcttctctagccgctaacaccaagtcaaatgctacagccaagcttgatttcgacttgaatgaaggaatacctggagatgatgggcatcagtctgagccaactatctcgcctgttgtatgttcttcagcaatccatttaactgggattttgccattcacttcgcctattacaactgggttgcagccagcttcagttacagtagctgcaccagctaaaggaccctttgttcctccagaaaacctgctaagagcaaagccggagattgggtggaaaggttcagcagctacaagtgcatttcgtcctgccgaaccaaggaagattttggagatgcctgttgctgcacgcgacatttcagtttctcatgctgctggtaagcagtctcgtcccacgcttggttttgatttgaatgttgccgatgatcaagctcttgaggaagatatcccacagagttctgcacaaactacctgttctgaatctggaaatacgagaagtcgagatggctcttcacgaagcgctggtattgaatttgatctgaacagagctgatgaagttgcagataatggccaatttgtgccaagtgcttcgcacagagttgaagtgccattgttgtcaacaagatcgttacatggagttttctctaatgctggcctgaatagctcgagggactttgatcttaatagtggaccaggtcttgatgatgttggcactgaagctgcaccaaagagcctaccttctaaaaatacaagcagtattcaattcctaccacaagttcctgttaggatgaatagtgctgccatgagtaatatatcaccatggcttgcctctgccagcccttgtggtccagtagctatacaatcttttttaccaactagagaacagccatacccaattgaggcagcagctggggcccaaaggatcattgcgcctacagctgatgctggccaattcggaggtgatccctgcaggcctccagttgtttcaacgtctccagcgatggtttatcatccgcctgcatatcagtatccaggattcccttttcctcccagtgttcaccttcaaacaccggcattttcaattggatcagcaacatttaataattctgcatctccaggagttccatactttccaactgtctccccttcttttgttgggccagctggagcgttaactccccaacatttaaggcagtttgctataaaccttgctgagggtagcagcagcagtggacgagacagtaatcgtaaatgggaaagtcagggccttgatcttaactcaggccctggaagtatagatttagaaggaaaggatgaacgggtacctttaccagtcagacaaaatttgatcccacccccacacggctttgtggaggatcaaggaagaatctaccagatgccagttgtaggaacaaagagaaaggaacctgatggcagctgggactcagaaaggtctacatacaagcaattatcatggcaatgatggctctgaagatcattctgcaccggactggtctgcgacgagcatgtacctgcatgtagaacttgggcggtgtgttcttcagtcactgcactatacttgggggattggggattcagcccatgacgatgatgtgggatcgaggaaacgaaaacttgctgtaattgttgtagattttttccctagctgttaggcttttggttctaatttactcaggagggggtatggctgcggaggaggaatctttgtgattctgagctctggggctattgtaattagaccgtccgctctgtgtttgttggtgatatactattgatcacatgctgcagctttacattacataagaatttagatgtgaccttgttccttgctggggaagcgttacgtcagctgaccatatgaacactggtgcaacgaacagctcgagttgctacgccatgtatctttggattgcagtgcagctgtatgtataagaattctagcagatcagcaagctatatttttttgctgtttttttttgtccatctgcatctgatttagtcttgactcttgatgctctttctttaaactatttgtcggaagtgatgaccag

SEQ ID NO: 83562 - DNA, 391 bp, Zea Mays
ggcacagaaggaggtcccctgcggctgcggtcactgtgcatggtcgaatttgcccctttgctctcatccctggcctgccaggacaagtcgagacgagacatcatcccctctctccccatctctcgacccgacctccctcgccgtctctgctgtgccctgcccctgtccctgctcacccagctgcgatctctctccctctcgctgaatccataaatttctctctctccgcctccgccccacctcggatcgggtccaagccgcggagcccactccgctgacccagcccccagacccccaatcgagcccgaccggagcccgtcgattccaccggattcgagctcccgccgggtgaggcggttcgcccgaatcgaccgattggactcgaattcaa

SEQ ID NO: 83563 - DNA, 4689 bp, Zea Mays
ccgagtccaaatttctaaagcactcccagtactggtctctctcctcgcctctcctcttgtcgtcctctgctcctccgcggcgttgctgcttcctcgccacgccatacctgcgcgaacccctcccaatccgatcccctctcgtcttcgtttccttcccctcgccggactccgtctttcgccctagtatggaagagagctgaggctgttcggtgcccacgtcgggagttagggccggaggtgtggccgatcggcggggacggagtgagtgtaatgagcgggccacaggagcgtaacatgagggatctgtacaatcgcactcgccacaaagattttccggctctagaggaatcagccgaagggcgcagcggaggacgcccgtcgggatcggagcaacgggaactcgcctctaagatggaggacaaggctgtggtaaggaaaagattggtatcaagcaataacactcatgccaaagtagaatctggcacctgtaatgtctgttatgccccttgctcctcttgtttacacccacatattcgggttgtggattcgaatgttgaatgtgcatcctctcagacatgctccacaaggaggctgttaaatgaaaacacaagactacctagagcagaataccttgaagacagcaactcatgtgttactggtatatcagcagaaggcaaacttcatgtggataagaaaaaattatcaacttctgcatccagtcgagatttgactgctaaagattataaagtcaacagcatggctaaccacagcaaactaagaaaccaatgtattgatgaatcaaagaaaggatctgatggtcgtgacatgcatcctagctcatctggtagattttcccctgtagattcttctgttatgacaaaaaagatgctgcgaacccagtcttctgtcagtgcattgagcagattatctcctaacaggcaagctcatgaatttgggaaagcactggataatttatctcatcaaccttgtgagaaggcttctcttttgaagaataatgaacaactacgatgtgggcaattgaacccttgtatagctggtgaaaacaatcatggcacactggcaggctacagtaataggcatgcggacaaagatgttttctcattgaaggatctagacaatggtaccttgtgctcaaaagatgaaatccaagaacatggtggcatccattctaatgatgatgttaagaagaatgtgtgtggcgaacaagctttggatcaagattgttcaagggatatatccagtgacagaaagttgaatatacaacatgatgtgacagactgtgggaattcagaaggtttgatagatgttaatgtttgtgatatatgtggagatgttggtagagagtatcttttagctacatgcaccagatgccttgagggagcagagcatatttactgcatgcgagtgaagttggaaaaagttccagttggtgaatggttttgtgaagaatgccagcttaaggaagatcagaacaatacaagtaactatggtatctcggtggttaatgtgacagaaggaaagaaccaaaggacagaaagtcgaagcaagcctaagacattgcaaattgttgtgcctgattttgatgctctggaagtcacacacagcgcattgacagctgatcggtgtgatggtaacagtaaaaggttgcatttagcttcgactgatacacaaacacggcaactaaaggataccaccccagctgctcaaaggttggatgtgaagaacaaaaaatcattaagtgttacaaaccgtaacaaactgcaagttcttacatctgatttagacacacgaccacacaattatggaacatcaacatctggagtctataccaataaaagtcaaagttcagaatttttgttaaaccacaaaaagctgcgagtttctactgacatgcagtcgccactctcaagcgaaggcctacggagtccaccaatatcatgcaagagacatgcagagagtatgtcgtcccctaagcctaggatcgtcaaggcgggtacccttggaaaacaagatgtcatctctcgtgcgaactcatttaagaaatctaacaagggaggtttaagttcagttgataatattccagtgagaactacccaggctgtcaaaagttctgactctcagacattgtcacggtcatattccttggggaacatggtgaatgctaaagctccagttccttcaccaagaggctttttatccaagcagctatccttcaacagcaccaacaacggaccaaaggtcaaacagttggctgatggggtgtctagcaagttaagacctgcagaacattccccaagagatcctagagataagaaatccatcaaaaagattgtacaatcaggatccttcaaacacgagggttcagattccatagttgctggatcatcaaaaaaaaagcaaacatttcatttgtctcaagatgaaaaaccaggagtactgaaggtaataaaggaaaataatttaacagaaagaagggcttcatttagcttgaaaaaacgaaacattccttcatctccaaggcctgacagctgtatgaagtcaggggaaagaaaaaatgatcaggatatttcaaggtctggaacaagcatacttaaaagtagcaaaaaacctggatatgctgaaaagaagcagaacaatgatttgtccagaagtgataatggcaaggaagatgttaccgtgcatccaaaaacaatggaagtttctggtaaagatgcttacgtagtgaagacatctgatccaccagttcaaccccaatgtgccaaaaaggatagaccaaatgatgttgaggatgacgatttactcatttcagtgaataatgttaacatagcgccaaatgagcatgccgaggtggttcccacaacatttgctgccatgacttatgaatcagatttgcaagatgttccaagagaaagcacctctgatgattcagctccaaaagtggtatgttgccaacaaaagcttttggaaaacacaggagatgattctggtaaaatcgtagaggtggttcaagattcaggagatatattgtctgtgactccacatggtcttcagatggcacacaatctatacccccctgacaataaattgcataaaccagatttgaagaaggaagcttttgctgatcaatcttccgctcttgggaattgtttaaaagattttgttattccagagcagtcttacatctggcagggtgggtttgaggtttcaggacatggaaactcccctgaaatgttcgatgggtttcaagcttacttgtctacttgcgcctcatccaaagtacgtgaagtaggtgaacaattacctgacaaaattcagctagcagaagtcccacggcattcctcatggccactgcaatttaatgaagtaaatccaactgaagataatattgctctttttttctttgctaaagatgttgaaagttatgaaagggcatatggaaaactcttggataacatgcttcttggtgatttgtctcttaaagcaaatattggtggcactgaacttctcattttcccatccgataaattgccagagaggattcaacgttggaatggtttacctttcttttggggcattttttatgcccggaaagcaagtagtccactagagcttcctacaaataattgtccattagaacaaatcaatgaacctgttatccagcatgatattggttcgcctaaggcacatcagcctttgggtatagatttgaatgagtgccctaatgattatatatctgatctgtctctttcacttggatcagagagtgagaagtctggtgcatctttagatcgtaatattgtattagagtccaaacgtgaggatagaagtctgaatgcaagtgaaatacatcatgaagaaactgcaggcacaagacaaattataccggggcatccttctgttgcttcctgtggaactaatcttcccacaatctcaacaggaggtcatgacatgattcaggattatctggctgctgctaaaggtagcacaggaacaccaggtggaaacaaaatggagaaaacagatcagaatgaaactctgttccgtttttcgcagcaactaggtgcaactagatcaatctcacatgagatagaacttaataaacatggtcttttgccctcgcactgtcatttgagtggatcaaagatatgtgatgatcaaaccaaatcaactccaaattcagatatgggtcctttggattttgacatcaccaacaaaaggcagaagacttatgggaaacactcttgcatttttggagatgcaatgacacctatgaaatgcttgtccaagatacatcccttaccggctggacaggataatccatgcgatgttttacagcattgtcatcggggcccttcagatcctgcctctcttaaaaaacctttacctgatcatttcatccacgttctttcatctgacgacgaagattccccagaacctagtactagcttaaataaggcatcatcgaaggcagatgagggctcctccattttatgctcactttccctatccatggtggcaacgaagcgtaatctttctggttcagatattgtagatgatgaaccactgtctctctctcttgggctccctagtgttgtcggtgggagagcagatcaggagatgaagcaattcctgccggagaagccagaggaacggagcatttggataaag

SEQ ID NO: 83564 - DNA, 5012 bp, Zea Mays
ctctctcctcgcctctcctcttgtcgtcctctgctcctccgcggcgttgctgcttcctcgccacgccatacctgcgcgaacccctcccaatccgatcccctctcgtcttcgtttccttcccctcgccggactccgtctttcgccctagtatggaagagagctgaggctgttcggtgcccacgtcgggagttagggccggaggtgtggccgatcggcggggacggagtgagtgtaatgagcgggccacaggagcgtaacatgagggatctgtacaatcgcactcgccacaaagattttccggctctagaggaatcagccgaagggcgcagcggaggacgcccgtcgggatcggagcaacgggaactcgcctctaagatggaggacaaggctgtggtaaggaaaagattggtatcaagcaataacactcatgccaaagtagaatctggcacctgtaatgtctgttatgccccttgctcctcttgtttacacccacatattcgggttgtggattcgaatgttgaatgtgcatcctctcagacatgctccacaaggtcagaagtaaaaaacaattcactcgttcgtaatgagaaagggctttgtagtaaaggagaaaacgatgatgagtttagtgcaacctcaggtcatgtttccgactctgtggttgcaagagcatccattgcagacgattcatcagaggttaacatgccatcaaaacgcaggaggctgttaaatgaaaacacaagactacctagagcagaataccttgaagacagcaactcatgtgttactggtatatcagcagaaggcaaacttcatgtggataagaaaaaattatcaacttctgcatccagtcgagatttgactgctaaagattataaagtcaacagcatggctaaccacagcaaactaagaaaccaatgtattgatgaatcaaagaaaggatctgatggtcgtgacatgcatcctagctcatctggcaagctcatgaatttgggaaagcactggataatttatctcatcaaccttgtgagaaggcttctcttttgaagaataatgaacaactacgatgtgggcaattgaacccttgtatagctggtgaaaacaatcatggcacactggcaggctacagtaataggcatgcggacaaagatgttttctcattgaaggatctagacaatggtaccttgtgctcaaaagatgaaatccaagaacatggtggcatccattctaatgatgatgttaagaagaatgtgtgtggcgaacaagctttggatcaagattgttcaagggatatatccagtgacagaaagttgaatatacaacatgatgtgacagactgtgggaattcagaaggtttgatagatgttaatgtttgtgatatatgtggagatgttggtagagagtatcttttagctacatgcaccagatgccttgagggagcagagcatatttactgcatgcgagtgaagttggaaaaagttccagttggtgaatggttttgtgaagaatgccagcttaaggaagatcagaacaatacaagtaactatggtatctcggtggttaatgtgacagaaggaaagaaccaaaggacagaaagtcgaagcaagcctaagacattgcaaattgttgtgcctgattttgatgctctggaagtcacacacagcgcattgacagctgatcggtgtgatggtaacagtaaaaggttgcatttagcttcgactgatacacaaacacggcaactaaaggataccaccccagctgctcaaaggttggatgtgaagaacaaaaaatcattaagtgttacaaaccgtaacaaactgcaagttcttacatctgatttagacacacgaccacacaattatggaacatcaacatctggagtctataccaataaaagtcaaagttcagaatttttgttaaaccacaaaaagctgcgagtttctactgacatgcagtcgccactctcaagcgaaggcctacggagtccaccaatatcatgcaagagacatgcagagagtatgtcgtcccctaagcctaggatcgtcaaggcgggtacccttggaaaacaagatgtcatctctcgtgcgaactcatttaagaaatctaacaagggaggtttaagttcagttgataatattccagtgagaactacccaggctgtcaaaagttctgactctcagacattgtcacggtcatattccttggggaacatggtgaatgctaaagctccagttccttcaccaagaggctttttatccaagcagctatccttcaacagcaccaacaacggaccaaaggtcaaacagttggctgatggggtgtctagcaagttaagacctgcagaacattccccaagagatcctagagataagaaatccatcaaaaagattgtacaatcaggatccttcaaacacgagggttcagattccatagttgctggatcatcaaaaaaaaagcaaacatttcatttgtctcaagatgaaaaaccaggagtactgaaggtaataaaggaaaataatttaacagaaagaagggcttcatttagcttgaaaaaacgaaacattccttcatctccaaggcctgacagctgtatgaagtcaggggaaagaaaaaatgatcaggatatttcaaggtctggaacaagcatacttaaaagtagcaaaaaacctggatatgctgaaaagaagcagaacaatgatttgtccagaagtgataatggcaaggaagatgttaccgtgcatccaaaaacaatggaagtttctggtaaagatgcttacgtagtgaagacatctgatccaccagttcaaccccaatgtgccaaaaaggatagaccaaatgatgttgaggatgacgatttactcatttcagtgaataatgttaacatagcgccaaatgagcatgccgaggtggttcccacaacatttgctgccatgacttatgaatcagatttgcaagatgttccaagagaaagcacctctgatgattcagctccaaaagtggtatgttgccaacaaaagcttttggaaaacacaggagatgattctggtaaaatcgtagaggtggttcaagattcaggagatatattgtctgtgactccacatggtcttcagatggcacacaatctatacccccctgacaataaattgcataaaccagatttgaagaaggaagcttttgctgatcaatcttccgctcttgggaattgtttaaaagattttgttattccagagcagtcttacatctggcagggtgggtttgaggtttcaggacatggaaactcccctgaaatgttcgatgggtttcaagcttacttgtctacttgcgcctcatccaaagtacgtgaagtaggtgaacaattacctgacaaaattcagctagcagaagtcccacggcattcctcatggccactgcaatttaatgaagtaaatccaactgaagataatattgctctttttttctttgctaaagatgttgaaagttatgaaagggcatatggaaaactcttggataacatgcttcttggtgatttgtctcttaaagcaaatattggtggcactgaacttctcattttcccatccgataaattgccagagaggattcaacgttggaatggtttacctttcttttggggcattttttatgcccggaaagcaagtagtccactagagcttcctacaaataattgtccattagaacaaatcaatgaacctgttatccagcatgatattggttcgcctaaggcacatcagcctttgggtatagatttgaatgagtgccctaatgattatatatctgatctgtctctttcacttggatcagagagtgagaagtctggtgcatctttagatcgtaatattgtattagagtccaaacgtgaggatagaagtctgaatgcaagtgaaatacatcatgaagaaactgcaggcacaagacaaattataccggggcatccttctgttgcttcctgtggaactaatcttcccacaatctcaacaggaggtcatgacatgattcaggattatctggctgctgctaaaggtagcacaggaacaccaggtggaaacaaaatggagaaaacagatcagaatgaaactctgttccgtttttcgcagcaactaggtgcaactagatcaatctcacatgagatagaacttaataaacatggtcttttgccctcgcactgtcatttgagtggatcaaagatatgtgatgatcaaaccaaatcaactccaaattcagatatgggtcctttggattttgacatcaccaacaaaaggcagaagacttatgggaaacactcttgcatttttggagatgcaatgacacctatgaaatgcttgtccaagatacatcccttaccggctggacaggataatccatgcgatgttttacagcattgtcatcggggcccttcagatcctgcctctcttaaaaaacctttacctgatcatttcatccacgttctttcatctgacgacgaagattccccagaacctagtactagcttaaataaggcatcatcgaaggcagatgagggctcctccattttatgctcactttccctatccatggtggcaacgaagcgtaatctttctggttcagatattgtagatgatgaaccactgtctctctctcttgggctccctagtgttgtcggtgggagagcagatcaggagatgaagcaattcctgccggagaagccaggcataaacacttaatgcccctttagatttgcgagtgtacagttttgtgcagctgtatggagtttagacagggtagaagtatggtatagctgttaaattatgaatatttttcatttttttctctctcactgttatatgcatctgctgccgttgttagtgataatggtgtgatgatgttactatctgccatatctatgagatatatggtgttagtttcttgagatattatgggtatgacataaaaggatagatcaaaatgtgaatgtttgtgaattcattttgtcatggtttaacttgcattttctatcc

SEQ ID NO: 83565 - DNA, 2508 bp, Zea Mays
aaacgaaagaaagccggaggtggggaggcttggtgttgcgggcgcacctacctaccggatccccacccggcaacccctgtgtactgccgcgcttctctcggtgccctgcctcgtgcctcctactcccaccttcatcaggagctcagtctgcggctgctgctccattccacactaccccgcgctggactggagtcgagttgagctcacgctctcgcacactcgcactcccattcccactggccagattgatcttgcttcgctaatcatcctagatctccattcccgcccatgggatgcttccagtcgaaggtggcggggcccctgccgcccaacgacgccgccgctctccccgccgacaagcctgcagatcctgaggcggcgaatggcggcgccgacggggaaggcgacggtgacgacaaggaggctgtgaagcgcgcggtgccggtgttcagggagtttgctctggccgagctgcgcgccgccaccaagggattcagcgccgacctcatcgtctccgagagcggcgagaaggcgcccaacgccgtctaccgcggccgcctcgacggcgggcggctcatcgccgtcaagcgcttctcgcgcctctcctggcctgacccgcagcagttcctcgcggaggcggcgggcgttgggaaggtgcggcacaagcgcctcgtcaacctcattggctgctgcgccgagggtgacgagaggctgcttgtcgccgagtacatgcccaacgacaccctgtccaagcatctcttccactgggataagcagccgttaccatgggaaatgaggctgagggttgcatatttcattgcgcaagctctcgaccattgcaatgctgagaacaggaaaatctatcatgatttgaatgcttatagggtactttttgatgaggaaggtgatccccgcttgtcaagttttggattaatgaagaacagccgtgatgggaaaagttatagcactaacctggcttacactccaccagagtttctacgaactggcagagtaattccggagagtgtgatctatagctatggaactgtcctgttggatcttttgagcggaaaacacattcctcctagtcatgccctagatttaataaggggaaagaatatactgttgctgatggattcctccttagaagggcagtatgctaatgaagatgcttcgaaattggttgatcttgcatcaaagtgtctgcaatttgaatctagggatagaccgaacataaagtatcttctgtcttctgttggtcctcttcagaatcaaaaggaggttgcatcacatgtgttcatgggtattacaaaagccacatcagtactgccaaccatttgttctccactcagaaaggcctgcactggtatggatctttcagcggtgcatgatattttgctcaaaacaggttataaagatgatgagggtgcagaaaacgagcaagtgcaagagatgctgaacacaaagaagtttggtgacattgcatttagagacaaggattttaagactgcaattgactactactccaagctagttgcgatgatgtcgacgccttcagctacggtttttgtcaggcgcagtttttcctacttgatgaatgggcaagcagagctcgctctacgggacgcaatgcaagcccaggtctgcatgcccgagtggcctacggccttctacctccaggccctggctctttcaaagctcggcatggaaaccgatgcccaggacatgctcaacgatggcgccacgtttgaggccaagaagcagaacggctggcgcagttaggagccgacgacgaacaaagtctctcttccaacgactccgtgccgttgccctttgagagaagaaggtacaatggcgagtctcctccaaatcagttcactgggacacgcctgttgcactactagtagtgggattgaaacgcactgttttatcgtgcaatctcctctcgaatgtcggtaacgagtgatgatcatgatcaggggtggaaaaataggtcagggcctttgaacgcatagcgtactcttccgtgggttgcgctttgtgttgctggcgatggtggcaggatctgcctgattgttgcaactgcagttgtaattaaagggatgctttctaacaccttctggttttacgtggaatctttgggccccagagcacatgagcggtgtgcaaaaagccgagttcattgtgattagctacgaagaataaactagagccgtcgggattccattcgattcagccatatttatatgcggtgttatctttttttccctttttttatgatcaattctgtttgtttcttgaatcttgatcggccgagtcgattcagacagccagttgcacatccaccgatttggtttcaaagcagcaggttaggttagagtagctaagctatttgagttgtattgctaataattagctagaccattagctggcccgttctaattctctctagttttagcggttaactattggtttgaggtttgctaattgtcgtaaagaacttgcaca

SEQ ID NO: 83566 - DNA, 2543 bp, Zea Mays
aaacgaaagaaagccggaggtggggaggcttggtgttgcgggcgcacctacctaccggatccccacccggcaacccctgtgtactgccgcgcttctctcggtgccctgcctcgtgcctcctactcccaccttcatcaggagctcagtctgcggctgctgctccattccacactaccccgcgctggactggagtcgagttgagctcacgctctcgcacactcgcactcccattcccactggccagattgatcttgcttcgctaatcatcctagatctccattcccgcccatgggatgcttccagtcgaaggtggcggggcccctgccgcccaacgacgccgccgctctccccgccgacaagcctgcagatcctgaggcggcgaatggcggcgccgacggggaaggcgacggtgacgacaaggaggctgtgaagcgcgcggtgccggtgttcagggagtttgctctggccgagctgcgcgccgccaccaagggattcagcgccgacctcatcgtctccgagagcggcgagaaggcgcccaacgccgtctaccgcggccgcctcgacggcgggcggctcatcgccgtcaagcgcttctcgcgcctctcctggcctgacccgcagcagttcctcgcggaggcggcgggcgttgggaaggtgcggcacaagcgcctcgtcaacctcattggctgctgcgccgagggtgacgagaggctgcttgtcgccgagtacatgcccaacgacaccctgtccaagcatctcttccactgggataagcagccgttaccatgggaaatgaggctgagggttgcatatttcattgcgcaagctctcgaccattgcaatgctgagaacaggaaaatctatcatgatttgaatgcttatagggtactttttgatgaggtacacaacaggaaggtgatccccgcttgtcaagttttggattaatgaagaacagccgtgatgggaaaagttatagcactaacctggcttacactccaccagagtttctacgaactggcagagtaattccggagagtgtgatctatagctatggaactgtcctgttggatcttttgagcggaaaacacattcctcctagtcatgccctagatttaataaggggaaagaatatactgttgctgatggattcctccttagaagggcagtatgctaatgaagatgcttcgaaattggttgatcttgcatcaaagtgtctgcaatttgaatctagggatagaccgaacataaagtatcttctgtcttctgttggtcctcttcagaatcaaaaggaggttgcatcacatgtgttcatgggtattacaaaagccacatcagtactgccaaccatttgttctccactcagaaaggcctgcactggtatggatctttcagcggtgcatgatattttgctcaaaacaggttataaagatgatgagggtgcagaaaacgagctatcctttcaagaatggacccagcaagtgcaagagatgctgaacacaaagaagtttggtgacattgcatttagagacaaggattttaagactgcaattgactactactccaagctagttgcgatgatgtcgacgccttcagctacggtttttgtcaggcgcagtttttcctacttgatgaatgggcaagcagagctcgctctacgggacgcaatgcaagcccaggtctgcatgcccgagtggcctacggccttctacctccaggccctggctctttcaaagctcggcatggaaaccgatgcccaggacatgctcaacgatggcgccacgtttgaggccaagaagcagaacggctggcgcagttaggagccgacgacgaacaaagtctctcttccaacgactccgtgccgttgccctttgagagaagaaggtacaatggcgagtctcctccaaatcagttcactgggacacgcctgttgcactactagtagtgggattgaaacgcactgttttatcgtgcaatctcctctcgaatgtcggtaacgagtgatgatcatgatcaggggtggaaaaataggtcagggcctttgaacgcatagcgtactcttccgtgggttgcgctttgtgttgctggcgatggtggcaggatctgcctgattgttgcaactgcagttgtaattaaagggatgctttctaacaccttctggttttacgtggaatctttgggccccagagcacatgagcggtgtgcaaaaagccgagttcattgtgattagctacgaagaataaactagagccgtcgggattccattcgattcagccatatttatatgcggtgttatctttttttccctttttttatgatcaattctgtttgtttcttgaatcttgatcggccgagtcgattcagacagccagttgcacatccaccgatttggtttcaaagcagcaggttaggttagagtagctaagctatttgagttgtattgctaataattagctagaccattagctggcccgttctaattctctctagttttagcggttaactattggtttgaggtttgctaattgtcgtaaagaacttgcaca

SEQ ID NO: 83567 - DNA, 2482 bp, Zea Mays
aaacgaaagaaagccggaggtggggaggcttggtgttgcgggcgcacctacctaccggatccccacccggcaacccctgtgtactgccgcgcttctctcggtgccctgcctcgtgcctcctactcccaccttcatcaggagctcagtctgcggctgctgctccattccacactaccccgcgctggactggagtcgagttgagctcacgctctcgcacactcgcactcccattcccactggccagattgatcttgcttcgctaatcatcctagatctccattcccgcccatgggatgcttccagtcgaaggtggcggggcccctgccgcccaacgacgccgccgctctccccgccgacaagcctgcagatcctgaggcggcgaatggcggcgccgacggggaaggcgacggtgacgacaaggaggctgtgaagcgcgcggtgccggtgttcagggagtttgctctggccgagctgcgcgccgccaccaagggattcagcgccgacctcatcgtctccgagagcggcgagaaggcgcccaacgccgtctaccgcggccgcctcgacggcgggcggctcatcgccgtcaagcgcttctcgcgcctctcctggcctgacccgcagcagttcctcgcggaggcggcgggcgttgggaaggtgcggcacaagcgcctcgtcaacctcattggctgctgcgccgagggtgacgagaggctgcttgtcgccgagtacatgcccaacgacaccctgtccaagcatctcttccactgggataagcagccgttaccatgggaaatgaggctgagggttgcatatttcattgcgcaagctctcgaccattgcaatgctgagaacaggaaaatctatcatgatttgaatgcttatagggtactttttgatgaggaaggtgatccccgcttgtcaagttttggattaatgaagaacagccgtgatgggaaaagttatagcactaacctggcttacactccaccagagtttctacgaactggcagagtaattccggagagtgtgatctatagctatggaactgtcctgttggatcttttgagcggaaaacacattcctcctagtcatgccctagatttaataaggggaaagaatatactgttgctgatggattcctccttagaagggcagtatgctaatgaagatgcttcgaaattggttgatcttgcatcaaagtgtctgcaatttgaatctagggatagaccgaacataaagtatcttctgtcttctgttggtcctcttcagaatcaaaaggaggttgcatcacatgtgttcatgggtattacaaaagccacatcagtactgccaaccatttgttctccactcagaaaggcctgcactggtatggatctttcagcggtgcatgatattttgctcaaaacaggttataaagatgatgagggtgcagaaaacgagctatcctttcaagaatggacccagcaagtgcaagagatgctgaacacaaagaagtttggtgacattgcatttagagacaaggattttaagactgcaattgactactactccaagtttttcctacttgatgaatgggcaagcagagctcgctctacgggacgcaatgcaagcccaggtctgcatgcccgagtggcctacggccttctacctccaggccctggctctttcaaagctcggcatggaaaccgatgcccaggacatgctcaacgatggcgccacgtttgaggccaagaagcagaacggctggcgcagttaggagccgacgacgaacaaagtctctcttccaacgactccgtgccgttgccctttgagagaagaaggtacaatggcgagtctcctccaaatcagttcactgggacacgcctgttgcactactagtagtgggattgaaacgcactgttttatcgtgcaatctcctctcgaatgtcggtaacgagtgatgatcatgatcaggggtggaaaaataggtcagggcctttgaacgcatagcgtactcttccgtgggttgcgctttgtgttgctggcgatggtggcaggatctgcctgattgttgcaactgcagttgtaattaaagggatgctttctaacaccttctggttttacgtggaatctttgggccccagagcacatgagcggtgtgcaaaaagccgagttcattgtgattagctacgaagaataaactagagccgtcgggattccattcgattcagccatatttatatgcggtgttatctttttttccctttttttatgatcaattctgtttgtttcttgaatcttgatcggccgagtcgattcagacagccagttgcacatccaccgatttggtttcaaagcagcaggttaggttagagtagctaagctatttgagttgtattgctaataattagctagaccattagctggcccgttctaattctctctagttttagcggttaactattggtttgaggtttgctaattgtcgtaaagaacttgcaca

SEQ ID NO: 83568 - DNA, 2964 bp, Zea Mays
aaacgaaagaaagccggaggtggggaggcttggtgttgcgggcgcacctacctaccggatccccacccggcaacccctgtgtactgccgcgcttctctcggtgccctgcctcgtgcctcctactcccaccttcatcaggagctcagtctgcggctgctgctccattccacactaccccgcgctggactggagtcgagttgagctcacgctctcgcacactcgcactcccattcccactggccagattgatcttgcttcgctaatcatcctagatctccattcccgcccatgggatgcttccagtcgaaggtggcggggcccctgccgcccaacgacgccgccgctctccccgccgacaagcctgcagatcctgaggcggcgaatggcggcgccgacggggaaggcgacggtgacgacaaggaggctgtgaagcgcgcggtgccggtgttcagggagtttgctctggccgagctgcgcgccgccaccaagggattcagcgccgacctcatcgtctccgagagcggcgagaaggcgcccaacgccgtctaccgcggccgcctcgacggcgggcggctcatcgccgtcaagcgcttctcgcgcctctcctggcctgacccgcagcagttcctcgcggaggcggcgggcgttgggaaggtgcggcacaagcgcctcgtcaacctcattggctgctgcgccgagggtgacgagaggctgcttgtcgccgagtacatgcccaacgacaccctgtccaagcatctcttccactgggataagcagccgttaccatgggaaatgaggctgagggttgcatatttcattgcgcaagctctcgaccattgcaatgctgagaacaggaaaatctatcatgatttgaatgcttatagggtactttttgatgaggaaggtgatccccgcttgtcaagttttggattaatgaagaacagccgtgatgggaaaagttatagcactaacctggcttacactccaccagagtttctacgaactggcagagtaattccggagagtgtgatctatagctatggaactgtcctgttggatcttttgagcggaaaacacattcctcctagtcatgccctagatttaataaggggaaagaatatactgttgctgatggattcctccttagaagggcagtatgctaatgaagatgcttcgaaattggttgatcttgcatcaaagtgtctgcaatttgaatctagggatagaccgaacataaagtatcttctgtcttctgttggtcctcttcagaatcaaaaggaggttgcatcacatgtgttcatgggtattacaaaagccacatcagtactgccaaccatttgttctccactcagaaaggcctgcactggtatggatctttcagcggtgcatgatattttgctcaaaacaggttataaagatgatgagggtgcagaaaacgaggtaactaatagtcaaatttacatctgacttgtgccatcgatttgtgatcaattttcctcagtcccctcttccgttttgattcatttttccacttgactcaattgataactttttcataaaggtttatttgttgattgttttcttgtcgtaactctgtgttctttccactccgaccctttcatcattgcatggttagaaaaaataagaaacaccgcgggtcaattagaatgtgaaatgtgtacatgtgacgttttctcttggctatgcacagaagtggacttatataaattgcagcatgacttgtttaatctgaaaggcaaataattttgcatggataaccacacattttatcagtatttaattcagaagattgtaatgccgactggactttggacttgtcttcacatatcattttgtgagcaaaaatctgatctatcctttcaagaatggacccagcaagtgcaagagatgctgaacacaaagaagtttggtgacattgcatttagagacaaggattttaagactgcaattgactactactccaagctagttgcgatgatgtcgacgccttcagctacggtttttgtcaggcgcagtttttcctacttgatgaatgggcaagcagagctcgctctacgggacgcaatgcaagcccaggtctgcatgcccgagtggcctacggccttctacctccaggccctggctctttcaaagctcggcatggaaaccgatgcccaggacatgctcaacgatggcgccacgtttgaggccaagaagcagaacggctggcgcagttaggagccgacgacgaacaaagtctctcttccaacgactccgtgccgttgccctttgagagaagaaggtacaatggcgagtctcctccaaatcagttcactgggacacgcctgttgcactactagtagtgggattgaaacgcactgttttatcgtgcaatctcctctcgaatgtcggtaacgagtgatgatcatgatcaggggtggaaaaataggtcagggcctttgaacgcatagcgtactcttccgtgggttgcgctttgtgttgctggcgatggtggcaggatctgcctgattgttgcaactgcagttgtaattaaagggatgctttctaacaccttctggttttacgtggaatctttgggccccagagcacatgagcggtgtgcaaaaagccgagttcattgtgattagctacgaagaataaactagagccgtcgggattccattcgattcagccatatttatatgcggtgttatctttttttccctttttttatgatcaattctgtttgtttcttgaatcttgatcggccgagtcgattcagacagccagttgcacatccaccgatttggtttcaaagcagcaggttaggttagagtagctaagctatttgagttgtattgctaataattagctagaccattagctggcccgttctaattctctctagttttagcggttaactattggtttgaggtttgctaattgtcgtaaagaacttgcaca

SEQ ID NO: 83569 - DNA, 1886 bp, Zea Mays
aaacgaaagaaagccggaggtggggaggcttggtgttgcgggcgcacctacctaccggatccccacccggcaacccctgtgtactgccgcgcttctctcggtgccctgcctcgtgcctcctactcccaccttcatcaggagctcagtctgcggctgctgctccattccacactaccccgcgctggactggagtcgagttgagctcacgctctcgcacactcgcactcccattcccactggccagattgatcttgcttcgctaatcatcctagatctccattcccgcccatgggatgcttccagtcgaaggtggcggggcccctgccgcccaacgacgccgccgctctccccgccgacaagcctgcagatcctgaggcggcgaatggcggcgccgacggggaaggcgacggtgacgacaaggaggctgtgaagcgcgcggtgccggtgttcagggagtttgctctggccgagctgcgcgccgccaccaagggattcagcgccgacctcatcgtctccgagagcggcgagaaggcgcccaacgccgtctaccgcggccgcctcgacggcgggcggctcatcgccgtcaagcgcttctcgcgcctctcctggcctgacccgcagcagttcctcgcggaggcggcgggcgttgggaaggtgcggcacaagcgcctcgtcaacctcattggctgctgcgccgagggtgacgagaggctgcttgtcgccgagtacatgcccaacgacaccctgtccaagcatctcttccactgggataagcagccgttaccatgggaaatgaggctgagggttgcatatttcattgcgcaagctctcgaccattgcaatgctgagaacaggaaaatctatcatgatttgaatgcttatagggtactttttgatgaggtgatccccgcttgtcaagttttggattaatgaagaacagccgtgatgggaaaagttatagcactaacctggcttacactccaccagagtttctacgaactggcagagtaattccggagagtgtgatctatagctatggaactgtcctgttggatcttttgagcggaaaacacattcctcctagtcatgccctagatttaataaggggaaagaatatactgttgctgatggattcctccttagaagggcagtatgctaatgaagatgcttcgaaattggttgatcttgcatcaaagtgtctgcaatttgaatctagggatagaccgaacataaagtatcttctgtcttctgttggtcctcttcagaatcaaaaggaggttgcatcacatgtgttcatgggtattacaaaagccacatcagtactgccaaccatttgttctccactcagaaaggcctgcactggtatggatctttcagcggtgcatgatattttgctcaaaacaggttataaagatgatgagggtgcagaaaacgaggtaactaatagtcaaatttacatctgacttgtgccatcgatttgtgatcaattttcctcagtcccctcttccgttttgattcatttttccacttgactcaattgataactttttcataaaggtttatttgttgattgttttcttgtcgtaactctgtgttctttccactccgaccctttcatcattgcatggttagaaaaaataagaaacaccgcgggtcaattagaatgtgaaatgtgtacatgtgacgttttctcttggctatgcacagaagtggacttatataaattgcagcatgacttgtttaatctgaaaggcaaataattttgcatggataaccacacattttatcagtatttaattcagaagattgtaatgccgactggactttggacttgtcttcacatatcattttgtgagcaaaaatctgatgtatgctttcaaatgttt

SEQ ID NO: 83570 - DNA, 1953 bp, Zea Mays
agttgttgctgcgggctcgttactgaacagagatgtatagtgaggctagtagtgaaatcccttcacaggcagctattgcaaattctaggaggaagacaaagatagtatgcaccataggtccctcaaccaacactcgtgagatgatttggaagcttgcagagactggaatgaatgtagcacgccttaatatgtcccatggtgaccaccagtcacaccagaaggttatcaatttggtcaaggagtacaatgcacagaacactgatggaaatgttattgccatcatgctggacactaagggtcctgaagttagaagtggggatgttccagagccaattatgctcagtgaagggcaagagttcaatttcacaattaaaagaggggtgagcactgaagacactgtcagcgtgaactatgatgacttcataaatgatgttgaagctggtgacatactgttagtggatggaggaatgatgtcgcttgctgtgaagtctaaaacagctgatacagtcaagtgtgaagtagttgacggcggggaattgaaatcaaggcgccacctaaatgttcgtggaaaaagtgctactttgccatctatcactggattgggaagacataaaatttggtgtcgaaaacggtgttgatttctatgcagtttcctttgtgaaggatgccaaagttatccatgaattaaaggactacctaaaaggtgttaatgcggatatacatgtcattccaaaaattgaaagtgcagactcaataccaaatctgcagtccattattgctgcttcagatggggcaatggtggcacgtggagaccttggtgctgaacttccgattgaggatgttcctttgctacaggcagagattgttcaaacatgtcgaaacatggagaaaccagttattgtcgccacaaatatgttggaaagcatgattgaccatcctactccaactagggcagaagtttctgacatagctattgcagtcagggaaggtgctgatgccatcatgttatctggtgaaactgctcatggaaagtacccactaaaggcagtcaaggtgatgcacactgtggccctcagaacagaatccagcatttataacccaactacttcccctagtgttatagcatctgcacagggtctacagaacgaggagttttccccaagccagctaagtaaaatgtttggatcccatgcaactatgatggccaacacccttcggacaccaatcattgtatttacgcagacaggctccatggctgtcctcctgagccactatcgtccctcgtctacaatatttgcgtttacaaacgaggaacgagtgaagctacggctagcactctaccagggggtcatccctattcacatggagttctctgacgacgcagaagaaactttctccagagcaattagcagcttgctgaaagcacaatatgtgaagaagggagactacgtcactcttgttcagagcggagtgacttcaatctggagagaggaatccactcacaacatccaagtgaggagagctcaggtctgatgtgctggtaggaatcagtcgccggagaagttttgatagcgccgctagaagtgttatcatcatcatcaccatcatatgcgagtaattttaatgttttaccaggagattgctacgtcgagttgtatgttgtgtcgaattcacgtgtagactctggatctttaactctgtattcgttcattttcacttgtttcacactggagtgctataagttcacgcttactgcctttgcttttgcttttgctttcttgtgaaacttgattttagtttcttgttacaaaaggagctagcactaacagcgtgttaaattttgtaaaacggggccttcttgctccgagaactgctcagttaaaactgttgcaataataatgatatcgtccatgcaaggcgacaacatgcctggccagaaggccgaagtcagaa

SEQ ID NO: 83571 - DNA, 1954 bp, Zea Mays
atatcagttgttgctgcgggctcgttactgaacagagatgtatagtgaggctagtagtgaaatcccttcacaggcagctattgcaaattctaggaggaagacaaagatagtatgcaccataggtccctcaaccaacactcgtgagatgatttggaagcttgcagagactggaatgaatgtagcacgccttaatatgtcccatggtgaccaccagtcacaccagaaggttatcaatttggtcaaggagtacaatgcacagaacactgatggaaatgttattgccatcatgctggacactaagggtcctgaagttagaagtggggatgttccagagccaattatgctcagtgaagggcaagagttcaatttcacaattaaaagaggggtgagcactgaagacactgtcagcgtgaactatgatgacttcataaatgatgttgaagctggtgacatactgttagtggatggaggaatgatgtcgcttgctgtgaagtctaaaacagctgatacagtcaagtgtgaagtagttgacggcggggaattgaaatcaaggcgccacctaaatgttcgtggaaaaagtgctactttgccatctatcactgagaaggattgggaagacataaaatttggtgtcgaaaacggtgttgatttctatgcagtttcctttgtgaaggatgccaaagttatccatgaattaaaggactacctaaaaggtgttaatgcggatatacatgtcattccaaaaattgaaagtgcagactcaataccaaatctgcagtccattattgctgcttcagatggggcaatggtggcacgtggagaccttggtgctgaacttccgattgaggatgttcctttgctacaggcagagattgttcaaacatgtcgaaacatggagaaaccagttattgtcgccacaaatatgttggaaagcatgattgaccatcctactccaactagggcagaagtttctgacatagctattgcagtcagggaaggtgctgatgccatcatgttatctggtgaaactgctcatggaaagtacccactaaaggcagtcaaggtgatgcacactgtggccctcagaacagaatccagcatttataacccaactacttcccctagtgttatagcatctgcacagaacgaggagttttccccaagccagctaagtaaaatgtttggatcccatgcaactatgatggccaacacccttcggacaccaatcattgtatttacgcagacaggctccatggctgtcctcctgagccactatcgtccctcgtctacaatatttgcgtttacaaacgaggaacgagtgaagctacggctagcactctaccagggggtcatccctattcacatggagttctctgacgacgcagaagaaactttctccagagcaattagcagcttgctgaaagcacaatatgtgaagaagggagactacgtcactcttgttcagagcggagtgacttcaatctggagagaggaatccactcacaacatccaagtgaggagagctcaggtctgatgtgctggtaggaatcagtcgccggagaagttttgatagcgccgctagaagtgttatcatcatcatcaccatcatatgcgagtaattttaatgttttaccaggagattgctacgtcgagttgtatgttgtgtcgaattcacgtgtagactctggatctttaactctgtattcgttcattttcacttgtttcacactggagtgctataagttcacgcttactgcctttgcttttgcttttgctttcttgtgaaacttgattttagtttcttgttacaaaaggagctagcactaacagcgtgttaaattttgtaaaacggggccttcttgctccgagaactgctcagttaaaactgttgcaataataatgatatcgtccatgcaaggcgacaacatgcctggccagaaggccgaagtcagaa

SEQ ID NO: 83572 - DNA, 2414 bp, Zea Mays
gagccttccaagttccaagctccggctctctcgggcgttggaaccgaggactggaggcatcgtgtggaccgcgccctgcacaccttgagcgtgggcctgcctcctccatctccctctgcggcgtataaagaagcgacccacggccaccgccacggcctcgccggaatatcatacgaaaaccctcgcggcggggagagcgctttccctcccacacactcgcgccgcagcatccgcagtccgcacctgcctgcctccacgacttgtcgtgctcgtgcgctactctcctcgagtgcggcgcgggagcacggggacatctaatggcggccgcggcggagatcggtggtttcacggcggccgcgctcaggccgcttgcgcacccagccccggcggcggcgcctaggagggcggtggcggcgcagtcgctgcggacgaccgccaccgagacgctgacggcggatctcgccgccagcacggccaacggcgcggtgcatgctcagatgtatagtgaggctagtagtgaaatcccttcacaggcagctattgcaaattctaggaggaagacaaagatagtatgcaccataggtccctcaaccaacactcgtgagatgatttggaagcttgcagagactggaatgaatgtagcacgccttaatatgtcccatggtgaccaccagtcacaccagaaggttatcaatttggtcaaggagtacaatgcacagaacactgatggaaatgttattgccatcatgctggacactaagggtcctgaagttagaagtggggatgttccagagccaattatgctcagtgaagggcaagagttcaatttcacaattaaaagaggggtgagcactgaagacactgtcagcgtgaactatgatgacttcataaatgatgttgaagctggtgacatactgttagtggatggaggaatgatgtcgcttgctgtgaagtctaaaacagctgatacagtcaagtgtgaagtagttgacggcggggaattgaaatcaaggcgccacctaaatgttcgtggaaaaagtgctactttgccatctatcactgagaaggattgggaagacataaaatttggtgtcgaaaacggtgttgatttctatgcagtttcctttgtgaaggatgccaaagttatccatgaattaaaggactacctaaaaggtgttaatgcggatatacatgtcattccaaaaattgaaagtgcagactcaataccaaatctgcagtccattattgctgcttcagatggggcaatggtggcacgtggagaccttggtgctgaacttccgattgaggatgttcctttgctacaggcagagattgttcaaacatgtcgaaacatggagaaaccagttattgtcgccacaaatatgttggaaagcatgattgaccatcctactccaactagggcagaagtttctgacatagctattgcagtcagggaaggtgctgatgccatcatgttatctggtgaaactgctcatggaaagtacccactaaaggcagtcaaggtgatgcacactgtggccctcagaacagaatccagcatttataacccaactacttcccctagtgttatagcatctgcacagaacgaggagttttccccaagccagctaagtaaaatgtttggatcccatgcaactatgatggccaacacccttcggacaccaatcattgtatttacgcagacaggctccatggctgtcctcctgagccactatcgtccctcgtctacaatatttgcgtttacaaacgaggaacgagtgaagctacggctagcactctaccagggggtcatccctattcacatggagttctctgacgacgcagaagaaactttctccagagcaattagcagcttgctgaaagcacaatatgtgaagaagggagactacgtcactcttgttcagagcggagtgacttcaatctggagagaggaatccactcacaacatccaagtgaggagagctcaggtctgatgtgctggtaggaatcagtcgccggagaagttttgatagcgccgctagaagtgttatcatcatcatcaccatcatatgcgagtaattttaatgttttaccaggagattgctacgtcgagttgtatgttgtgtcgaattcacgtgtagactctggatctttaactctgtattcgttcattttcacttgtttcacactggagtgctataagttcacgcttactgcctttgcttttgcttttgctttcttgtgaaacttgattttagtttcttgttacaaaaggagctagcactaacagcgtgttaaattttgtaaaacggggccttcttgctccgagaactgctcagttaaaactgttgcaataataatgatatcgtccatgcaaggcgacaacatgcctggccagaaggccgaagtcagaa

SEQ ID NO: 83573 - DNA, 2435 bp, Zea Mays
gttcgtgccagctagcagagccttccaagttccaagctccggctctctcgggcgttggaaccgaggactggaggcatcgtgtggaccgcgccctgcacaccttgagcgtgggcctgcctcctccatctccctctgcggcgtataaagaagcgacccacggccaccgccacggcctcgccggaatatcatacgaaaaccctcgcggcggggagagcgctttccctcccacacactcgcgccgcagcatccgcagtccgcacctgcctgcctccacgacttgtcgtgctcgtgcgctactctcctcgagtgcggcgcgggagcacggggacatctaatggcggccgcggcggagatcggtggtttcacggcggccgcgctcaggccgcttgcgcacccagccccggcggcggcgcctaggagggcggtggcggcgcagtcgctgcggacgaccgccaccgagacgctgacggcggatctcgccgccagcacggccaacggcgcggtgcatgctcagatgtatagtgaggctagtagtgaaatcccttcacaggcagctattgcaaattctaggaggaagacaaagatagtatgcaccataggtccctcaaccaacactcgtgagatgatttggaagcttgcagagactggaatgaatgtagcacgccttaatatgtcccatggtgaccaccagtcacaccagaaggttatcaatttggtcaaggagtacaatgcacagaacactgatggaaatgttattgccatcatgctggacactaagggtcctgaagttagaagtggggatgttccagagccaattatgctcagtgaagggcaagagttcaatttcacaattaaaagaggggtgagcactgaagacactgtcagcgtgaactatgatgacttcataaatgatgttgaagctggtgacatactgttagtggatggaggaatgatgtcgcttgctgtgaagtctaaaacagctgatacagtcaagtgtgaagtagttgacggcggggaattgaaatcaaggcgccacctaaatgttcgtggaaaaagtgctactttgccatctatcactggattgggaagacataaaatttggtgtcgaaaacggtgttgatttctatgcagtttcctttgtgaaggatgccaaagttatccatgaattaaaggactacctaaaaggtgttaatgcggatatacatgtcattccaaaaattgaaagtgcagactcaataccaaatctgcagtccattattgctgcttcagatggggcaatggtggcacgtggagaccttggtgctgaacttccgattgaggatgttcctttgctacaggcagagattgttcaaacatgtcgaaacatggagaaaccagttattgtcgccacaaatatgttggaaagcatgattgaccatcctactccaactagggcagaagtttctgacatagctattgcagtcagggaaggtgctgatgccatcatgttatctggtgaaactgctcatggaaagtacccactaaaggcagtcaaggtgatgcacactgtggccctcagaacagaatccagcatttataacccaactacttcccctagtgttatagcatctgcacagggtctacagaacgaggagttttccccaagccagctaagtaaaatgtttggatcccatgcaactatgatggccaacacccttcggacaccaatcattgtatttacgcagacaggctccatggctgtcctcctgagccactatcgtccctcgtctacaatatttgcgtttacaaacgaggaacgagtgaagctacggctagcactctaccagggggtcatccctattcacatggagttctctgacgacgcagaagaaactttctccagagcaattagcagcttgctgaaagcacaatatgtgaagaagggagactacgtcactcttgttcagagcggagtgacttcaatctggagagaggaatccactcacaacatccaagtgaggagagctcaggtctgatgtgctggtaggaatcagtcgccggagaagttttgatagcgccgctagaagtgttatcatcatcatcaccatcatatgcgagtaattttaatgttttaccaggagattgctacgtcgagttgtatgttgtgtcgaattcacgtgtagactctggatctttaactctgtattcgttcattttcacttgtttcacactggagtgctataagttcacgcttactgcctttgcttttgcttttgctttcttgtgaaacttgattttagtttcttgttacaaaaggagctagcactaacagcgtgttaaattttgtaaaacggggccttcttgctccgagaactgctcagttaaaactgttgcaataataatgatatcgtccatgcaaggcgacaacatgcctggccagaaggccgaagtcagaa

SEQ ID NO: 83574 - DNA, 699 bp, Zea Mays
gcgccagagccgcggcggtcgcgccagcactcgaggcgcgcccaggcctcccaggcgccgtcggccgcggggcggaggatgagccacgcgcccaggttggaccggctcacgcggtccgtgcccggcgacgacacgaatggcgtcaccatggacgccatcgccacgggggaccccttcaggtcgtgcaccgtcaccgaccaccccttgcgctccttggccgacgcggcgtcgcgctcacgccgcatcccgggcctgcgcaggtcgctgttgctgcggcacccgaacttgcatgtgaacatgggctgcctcatgctgccgcgcacctgcagcacctgcgggctgcactccggctcgccgtcgaactcgaagacgaaccgcgggtccggctccgcgcgcacggtgaggcagagctccgccgccgacgggctgcccttcccggcccgcttcccgatggagatccagccgctgtgcagcacggcgggcttggcctcggcgcccttgaggtcgagcgggaccgtagccttcccgagcagccccccggagctgacgccacaggcactccccttccggccggcgtagaccgacaccttcaggctagcctcccctgccccgcgccgcgacgagaagagcgagggcttcccgtcgaaccactccaggtcagccttggacaggtggaacgcggcggcgagggccccggac

SEQ ID NO: 83575 - DNA, 600 bp, Zea Mays
ttttaatgaggaatgcagcttcaacatataatatcctgaacgaggagggcaggccggtggcagctgcagttcttccctatggagtcacttgttaatgttttatcttctataccagttgggcaggcgttctctctttataatcgataaccaactgagctttgtttcgttcgtgctgtttcttggaagttctatatctgtcatgcatgtccaaagtagagttgtctatcttcctgcttttctacttcctctagcaagcccagatgcacagactgttggtatgttttggttgccgagggtacaatcatacatacaggcgaaacacttgccactctgctacgaactgggacgtgcgcccgcctggcgactggcgaggaccacggagtcacggacccggctgttttgccttctgttgatcgtcctaatttcagggctcaggcaggcagacgcgatgggatcctacgtggtaggagtactcgccagttcagatctcgcgggttaatatttactgtcacgtcatgttgtatcactatcgaccatatactataaattatgtaattgatttttgtcagtgtttatctgtgtttatctactgtaatgctc

SEQ ID NO: 83576 - DNA, 748 bp, Zea Mays
tattaattcaacagtcagcccttatttgtggttggtgtgcaaacattttgtcaagagatctttattcttggttgcggaagacacgtccagctggtcagtcctgagctgcggatgttcattcggtcaactggaatgaaactagaagcagttgattcgaggaatgcagcttcaacatataatatcctgaacgaggagggcaggccggtggcagctgcagttcttccctatggagtcacttgttaatgttttatcttctataccagttgggcaggcgttctctctttataatcgataaccaactgagctttgtttcgttcgtgctgtttcttggaagttctatatctgtcatgcatgtccaaagtagagttgtctatcttcctgcttttctacttcctctagcaagcccagatgcacagactgttggtatgttttggttgccgagggtacaatcatacatacaggcgaaacacttgccactctgctacgaactgggacgtgcgcccgcctggcgactggcgaggaccacggagtcacggacccggctgttttgccttctgttgatcgtcctaatttcagggctcaggcaggcagacgcgatgggatcctacgtggtaggagtactcgccagttcagatctcgcgggttaatatttactgtcacgtcatgttgtatcactatcgaccatatactataaattatgtaattgatttttgtcagtgtttatctgtgtttatctactgtaatgctc

SEQ ID NO: 83577 - DNA, 891 bp, Zea Mays
tggaaatggtcgaaaacggatacttattcggatatcagcttttttggtatgatgacactggattcaaaattaacaatgtaaaatatgaaggcagtgtattgattgtagagaacaagataatgacatgggcacccaaaacgttctcagagataactcctgaaagtttatcaatcttcaaagttgtgcaccctatcccagagatctttattcttggttgcggaagacacgtccagctggtcagtcctgagctgcggatgttcattcggtcaactggaatgaaactagaagcagttgattcgaggaatgcagcttcaacatataatatcctgaacgaggagggcaggccggtggcagctgcagttcttccctatggagtcacttgttaatgttttatcttctataccagttgggcaggcgttctctctttataatcgataaccaactgagctttgtttcgttcgtgctgtttcttggaagttctatatctgtcatgcatgtccaaagtagagttgtctatcttcctgcttttctacttcctctagcaagcccagatgcacagactgttggtatgttttggttgccgagggtacaatcatacatacaggcgaaacacttgccactctgctacgaactgggacgtgcgcccgcctggcgactggcgaggaccacggagtcacggacccggctgttttgccttctgttgatcgtcctaatttcagggctcaggcaggcagacgcgatgggatcctacgtggtaggagtactcgccagttcagatctcgcgggttaatatttactgtcacgtcatgttgtatcactatcgaccatatactataaattatgtaattgatttttgtcagtgtttatctgtgtttatctactgtaatgctc

SEQ ID NO: 83578 - DNA, 3230 bp, Zea Mays
ccatgtttgacaagagctgtgtaacagtcttaatttgagaggcactgcacattttttttaatatacaaaagaagaggtgaaattgaagaaaataaacttcaacttagttccatgaaaatctggacatgcgtgcgtcttacagaactacaagctgggatttcagtttacttatgatgaatgtatcctagaccaatatgttctagtgggaaagggtcattcgaatgtaagctagaagctcgctagttgatcttcttgtttagaaataaattgacgagtctgtctcgcaatatttttttaaaaaaagaaaaaattgtatattaagacataacgatcatatgacacaacactgacataagtgatccttttctggaaggcaaagaggaagaaaataaacttcagcctagttggttggaatctggacagaattgcagctaaaaagctccatgactaagttttagagaacagctagcagtactgtgaacataataaataaatatgcatataggggaagctaacctttgcaaactcctgtccatataagcatccaaggatgatattacttgaggtagctggtgcagcacctagaacaggacacagatattaactgctaccttacaactagttttggcatccaatgctacacttatttcttacatgctctgtgttctttgcaaaggatgctttttccagcaggttcttcggtagttttgccaaatgaacctgtgaccacaagtacatctatgttgattatcttggttaactaatagcgtgtttggtttgagaaatgaggtagtccatcatcttctcactcctcacttgtggaatggaatgagttcatctatcaccattccattcctcataagctaatagttagtaataatatgaggaatgagctcattccactaaatttgtgaaatggactcgtgatgcaatggattgattcttcaaaccaaacaccccctagctgaccgcttgtacttgtaacaacaatgtaagatcataacatcacagcatgtatgttgtggacacagtttcataaagttattaatcgaaagaaagtatggcacagttcattgaactgtctgaacctttattgaattatatgaggaaaaaatcagaaagaatcagaaaggggttgagagatagaggtgggtagagctgaaaatacaaaactaaactataaaacgactcataaacttagtagcactccttaaataagtgaattggcatgttggtaattgtagcctgaagtagaggatccatctaaagccgtaacaccatgctgcacaatggacacttcagcgcagcattgtggaagttgctagatgacaatcaaagcgcactgcttaatcaatgacagtcgaatgcctacagattctcggttacttctatcgagcactcaggagagcggttacttctatcgagcactcaagagagctgctaaattttatattaagaaaaaaagggggcaataacccttacatttgggcgctctttgagtctttgtatacagcaaaacaatgacctcgaccaaaaaaaactacctactgctcgctcgcaggctcaagggcaagaagaacccgccaaactccaaaagaataacttctaggttatgtagtataggatgaagataataacattcatgaattggacaatcatttcaccttcaagacaaaagtaaatccatccaaaatcctaaccatactgtctctaatctaaagagtaaagggagacatcacgaactaccgcataaattaagtcaatttcgcacaaatttggaaaagcgttgattcttgtgatcagcaaacggctgtaaaatcatgcttacaatcggaacactctagacccaaacaagacgagatgggggcagaaggcgggagacctgagcgggggaggactgctccatcagctggaggaggttggaggtggaccgcactgcttgtgctatctgctcggtcactgccgccttagcccctccaccaccgccaccgccggccgtcgcagccatccccgccacgtcgacctgggagctcgccctacggcctacggcctacgcccagtacagagttgaaaatgtgtgtaaacaaataaccaaaggcccaaccaaccgcagggccgaatttccaatcgtcaagtgggacccgttcgaatttccgttatgcaaaatttcccgacccctctagaacgaccgcccctgccgaggagccgaccgacgggcgaagcgggagggaggcgatggcggcggcttgggggcagaaggccctgggggctctgccgcagctggtgaagtcgctgcggagtgatcccgtctccggcagcgcacgacacaggcgccttccgtctctcaggaggaccttctcgttgtacgatcagatcaacctcatcgacagcgtcccggaagacgagctccgattccagtcgtatgatgacactggattcaaaattaacaatgtaaaatatgaaggcagtgtattgattgtagagaacaagataatgacatgggcacccaaaacgttctcagagataactcctgaaagagatctttattcttggttgcggaagacacgtccagctggtcagtcctgagctgcggatgttcattcggtcaactggaatgaaactagaagcagttgattcgaggaatgcagcttcaacatataatatcctgaacgaggagggcaggccggtggcagctgcagttcttccctatggagtcacttgttaatgttttatcttctataccagttgggcaggcgttctctctttataatcgataaccaactgagctttgtttcgttcgtgctgtttcttggaagttctatatctgtcatgcatgtccaaagtagagttgtctatcttcctgcttttctacttcctctagcaagcccagatgcacagactgttggtatgttttggttgccgagggtacaatcatacatacaggcgaaacacttgccactctgctacgaactgggacgtgcgcccgcctggcgactggcgaggaccacggagtcacggacccggctgttttgccttctgttgatcgtcctaatttcagggctcaggcaggcagacgcgatgggatcctacgtggtaggagtactcgccagttcagatctcgcgggttaatatttactgtcacgtcatgttgtatcactatcgaccatatactataaattatgtaattgatttttgtcagtgtttatctgtgtttatctactgtaatgctc

SEQ ID NO: 83579 - DNA, 1983 bp, Zea Mays
tgtcgcccgacagccagcgcatatcctctgcggactgcggcctgcgcacgggggcgatgggcgatggcgagcagccgagcactacccgccagcatcgccgaagcgataaaaaaactccaactcaaattcctaatgcagccagcccaatcgatctgctccgtccatcgcctcaggcgacggccctcctcacgccacctggcgggctcccccgtcgactccactccacctcctcctttcccccaatccaccctagtgatcttattttattcacgcgcaaaaacctaaaaaagatttagaaacggaagaacaaacagcaagcgaagcatcgccagattggtatatcgatcgattgatcggtggcggaggaaggggaggacggggggcagatggcggcgtgccggggcttcttcgagtgcctgctcaggctgctcaacttcatcctcaccgtcgccggcctcgctatggttggttacgggatctacctgctcgtcgagtggatgaagatatccgaggacggcatcggcggggcttcgacggcggaggtgctcgtctctggccggccgttgttgggggctgtcattctcggtgacagcttcctcgacaatctacccaaagcatggtttatttatttgtttatttgtgttggcaccatcgtcatcttggtgtctctgtttggctgcattggagcagggacaagaaacacctgctgtttgtgtttcgtatcctgttatgtgcctcttcggcgtcattatgttgtcctctctaaagaagattccatttgtcatgcacaagacactaaaaagtacttggaattatgctcaacattaattccagacgggatattattagttgctgaacatgtgaaccaacaaaattttgtttctgtgctactctgaacgctgatcttaattcttatagaacagcagtagcagaggcaataagattatcactatttctgcagcccaaaaaacgtttcgtccaaggcacttggcattttataatgatagggtcacagtattacacgcttgtttccttttacttgtaaacaagtatgctttcttggtcatattgttgatccttgctgaagctgcagctgctgcattcattttctttgaccatggctggaaagatacttcttttgcaggtaattccagtggacaaaacacataactttgatgttatgtatgactttctgaaggaaaactgggagattgcaagatgggtcgctctgggcgttgttgtttttgaggcagtgctcttgctgttagctctggctgtcagggcaatgaacaaacctgctgagtatgacagtgatgacgaaattatagcaattggccgaagccctaccatccggcagccactgatccatacccaaaatgttcctgccactggtgttcctgtcccaacacttgatcaacgtgcaagtagaaatgatgcctggagccaaaggatgcgagagaagtatggtctggacacgagccagttcacatacaacccttcagacccaagcaggtaccagcaaaatggcacgccacgggctgaagaaaggagtcgatgcactataatgtgaagaattcttcatgaggtcctacgagataatagactttcttgaaggggctactgtagtttggtgttaccagtgttgttcagactttacacagcggtgtgtggaatagaagaatcccgaccatattttttgtcacgctcgatatgacttctcagcaaatgctctatgcacctaattttactgtgaatgaggaactgctagccgttgacatcatctattttgaatttttttggggtttgtttcttgttggcaatccgcccccctttcatccttctacgtaagttccagattgtcgctccgtttaatttagatgccaaatgtgtgtaagatttggttgtgccgtgaagtgagatgggaatgggagaatctattttgctttcaataagaatcaagatgtccaaaagagtaaattgagc

SEQ ID NO: 83580 - DNA, 2018 bp, Zea Mays
tgtcgcccgacagccagcgcatatcctctgcggactgcggcctgcgcacgggggcgatgggcgatggcgagcagccgagcactacccgccagcatcgccgaagcgataaaaaaactccaactcaaattcctaatgcagccagcccaatcgatctgctccgtccatcgcctcaggcgacggccctcctcacgccacctggcgggctcccccgtcgactccactccacctcctcctttcccccaatccaccctagtgatcttattttattcacgcgcaaaaacctaaaaaagatttagaaacggaagaacaaacagcaagcgaagcatcgccagattggtatatcgatcgattgatcggtggcggaggaaggggaggacggggggcagatggcggcgtgccggggcttcttcgagtgcctgctcaggctgctcaacttcatcctcaccgtcgccggcctcgctatggttggttacgggatctacctgctcgtcgagtggatgaagatatccgaggacggcatcggcggggcttcgacggcggaggtgctcgtctctggccggccgttgttgggggctgtcattctcggtgacagcttcctcgacaatctacccaaagcatggtgagatggtttccttgcctgtggacttttttttctgatgtatcaatactggtttcgtccatgtgatgtcgccattgattatgattttggattgagaggaactgcaaggtttgcttagtaggggtggcaatcacaactgtgaatgtgtgaaatatgcaattgatagccaaaacacgcagttccaaattgcagtctgacgaagcatttgttactcgcctttagattattggtgagcatgttgggtagggggtaaattatgtgtggatttgaatgttccaagtatcattgactctttagtttggcaactgtgggttttctctgtttgtttttactgccaaggtgattgtgtttcatatttaatagcctctgttccctgcaggtttatttatttgtttatttgtgttggcaccatcgtcatcttggtgtctctgtttggctgcattggagcagggacaagaaacacctgctgtttgtgtttctatgctttcttggtcatattgttgatccttgctgaagctgcagctgctgcattcattttctttgaccatggctggaaagatgtaattccagtggacaaaacacataactttgatgttatgtatgactttctgaaggaaaactgggagattgcaagatgggtcgctctgggcgttgttgtttttgaggcagtgctcttgctgttagctctggctgtcagggcaatgaacaaacctgctgagtatgacagtgatgacgaaattatagcaattggccgaagccctaccatccggcagccactgatccatacccaaaatgttcctgccactggtgttcctgtcccaacacttgatcaacgtgcaagtagaaatgatgcctggagccaaaggatgcgagagaagtatggtctggacacgagccagttcacatacaacccttcagacccaagcaggtaccagcaaaatggcacgccacgggctgaagaaaggagtcgatgcactataatgtgaagaattcttcatgaggtcctacgagataatagactttcttgaaggggctactgtagtttggtgttaccagtgttgttcagactttacacagcggtgtgtggaatagaagaatcccgaccatattttttgtcacgctcgatatgacttctcagcaaatgctctatgcacctaattttactgtgaatgaggaactgctagccgttgacatcatctattttgaatttttttggggtttgtttcttgttggcaatccgcccccctttcatccttctacgtaagttccagattgtcgctccgtttaatttagatgccaaatgtgtgtaagatttggttgtgccgtgaagtgagatgggaatgggagaatctattttgctttcaataagaatcaagatgtccaaaagagtaaattgagc

SEQ ID NO: 83581 - DNA, 2450 bp, Zea Mays
tgtcgcccgacagccagcgcatatcctctgcggactgcggcctgcgcacgggggcgatgggcgatggcgagcagccgagcactacccgccagcatcgccgaagcgataaaaaaactccaactcaaattcctaatgcagccagcccaatcgatctgctccgtccatcgcctcaggcgacggccctcctcacgccacctggcgggctcccccgtcgactccactccacctcctcctttcccccaatccaccctagtgatcttattttattcacgcgcaaaaacctaaaaaagatttagaaacggaagaacaaacagcaagcgaagcatcgccagattggtatatcgatcgattgatcggtggcggaggaaggggaggacggggggcagatggcggcgtgccggggcttcttcgagtgcctgctcaggctgctcaacttcatcctcaccgtcgccggcctcgctatggttggttacgggatctacctgctcgtcgagtggatgaagatatccgaggacggcatcggcggggcttcgacggcggaggtgctcgtctctggccggccgttgttgggggctgtcattctcggtgacagcttcctcgacaatctacccaaagcatggtgagatggtttccttgcctgtggacttttttttctgatgtatcaatactggtttcgtccatgtgatgtcgccattgattatgattttggattgagaggaactgcaaggtttgcttagtaggggtggcaatcacaactgtgaatgtgtgaaatatgcaattgatagccaaaacacgcagttccaaattgcagtctgacgaagcatttgttactcgcctttagattattggtgagcatgttgggtagggggtaaattatgtgtggatttgaatgttccaagtatcattgactctttagtttggcaactgtgggttttctctgtttgtttttactgccaaggtgattgtgtttcatatttaatagcctctgttccctgcaggtttatttatttgtttatttgtgttggcaccatcgtcatcttggtgtctctgtttggctgcattggagcagggacaagaaacacctgctgtttgtgtttcgtatcctgttatgtgcctcttcggcgtcattatgttgtcctctctaaagaagattccatttgtcatgcacaagacactaaaaagtacttggaattatgctcaacattaattccagacgggatattattagttgctgaacatgtgaaccaacaaaattttgtttctgtgctactctgaacgctgatcttaattcttatagaacagcagtagcagaggcaataagattatcactatttctgcagcccaaaaaacgtttcgtccaaggcacttggcattttataatgatagggtcacagtattacacgcttgtttccttttacttgtaaacaagtatgctttcttggtcatattgttgatccttgctgaagctgcagctgctgcattcattttctttgaccatggctggaaagatgtgagtattctattgggtgcttatctcaggaactaaactactataatgtaccttgccttaccatttccttgagtagctgtagttatcaatagacttcttttgcaggtaattccagtggacaaaacacataactttgatgttatgtatgactttctgaaggaaaactgggagattgcaagatgggtcgctctgggcgttgttgtttttgagtgctcttgctgttagctctggctgtcagggcaatgaacaaacctgctgagtatgacagtgatgacgaaattatagcaattggccgaagccctaccatccggcagccactgatccatacccaaaatgttcctgccactggtgttcctgtcccaacacttgatcaacgtgcaagtagaaatgatgcctggagccaaaggatgcgagagaagtatggtctggacacgagccagttcacatacaacccttcagacccaagcaggtaccagcaaaatggcacgccacgggctgaagaaaggagtcgatgcactataatgtgaagaattcttcatgaggtcctacgagataatagactttcttgaaggggctactgtagtttggtgttaccagtgttgttcagactttacacagcggtgtgtggaatagaagaatcccgaccatattttttgtcacgctcgatatgacttctcagcaaatgctctatgcacctaattttactgtgaatgaggaactgctagccgttgacatcatctattttgaatttttttggggtttgtttcttgttggcaatccgcccccctttcatccttctacgtaagttccagattgtcgctccgtttaatttagatgccaaatgtgtgtaagatttggttgtgccgtgaagtgagatgggaatgggagaatctattttgctttcaataagaatcaagatgtccaaaagagtaaattgagc

SEQ ID NO: 83582 - DNA, 1458 bp, Zea Mays
tgtcgcccgacagccagcgcatatcctctgcggactgcggcctgcgcacgggggcgatgggcgatggcgagcagccgagcactacccgccagcatcgccgaagcgataaaaaaactccaactcaaattcctaatgcagccagcccaatcgatctgctccgtccatcgcctcaggcgacggccctcctcacgccacctggcgggctcccccgtcgactccactccacctcctcctttcccccaatccaccctagtgatcttattttattcacgcgcaaaaacctaaaaaagatttagaaacggaagaacaaacagcaagcgaagcatcgccagattggtatatcgatcgattgatcggtggcggaggaaggggaggacggggggcagatggcggcgtgccggggcttcttcgagtgcctgctcaggctgctcaacttcatcctcaccgtcgccggcctcgctatggttggttacgggatctacctgctcgtcgagtggatgaagatatccgaggacggcatcggcggggcttcgacggcggaggtgctcgtctctggccggccgttgttgggggctgtcattctcggtgacagcttcctcgacaatctacccaaagcatggtaattccagtggacaaaacacataactttgatgttatgtatgactttctgaaggaaaactgggagattgcaagatgggtcgctctgggcgttgttgtttttgaggcagtgctcttgctgttagctctggctgtcagggcaatgaacaaacctgctgagtatgacagtgatgacgaaattatagcaattggccgaagccctaccatccggcagccactgatccatacccaaaatgttcctgccactggtgttcctgtcccaacacttgatcaacgtgcaagtagaaatgatgcctggagccaaaggatgcgagagaagtatggtctggacacgagccagttcacatacaacccttcagacccaagcaggtaccagcaaaatggcacgccacgggctgaagaaaggagtcgatgcactataatgtgaagaattcttcatgaggtcctacgagataatagactttcttgaaggggctactgtagtttggtgttaccagtgttgttcagactttacacagcggtgtgtggaatagaagaatcccgaccatattttttgtcacgctcgatatgacttctcagcaaatgctctatgcacctaattttactgtgaatgaggaactgctagccgttgacatcatctattttgaatttttttggggtttgtttcttgttggcaatccgcccccctttcatccttctacgtaagttccagattgtcgctccgtttaatttagatgccaaatgtgtgtaagatttggttgtgccgtgaagtgagatgggaatgggagaatctattttgctttcaataagaatcaagatgtccaaaagagtaaattgagc

SEQ ID NO: 83583 - DNA, 2211 bp, Zea Mays
aaccactcctcccataggcatagcgtacaccagcgcacaggccgacaggcgcaagggcagcgccaaggaaaacccgagctaccctgcggtacaacgccgctgctacaaaggctacaccaaaatccaaaacccaaccaacaaaccaaccaaccgcgctgctcctgtctcttgcgcctcgcgatctgcctccgttccttcctttctccctcccggcgtgatgagcggtgggagatgaggtgcaagctccacccttacgccaaccccgtgggcgtgtgcgcgccctgcctccgcgaccgcctcctcgcgctcgccgccgagcgcgcccaggccgccgaggccagcagcgacgggggctgcgggagcagcagctgcggcagcccgcctccgcccctgcacctgcacctgcccacgcgcgcgcggcgccaccagcagcacggccacgccgagggaagggccgggggcttcccgcgctccgtgtcgccgtacgcgcagcaccggcgctccgacgcctgcgcttcctccggctccgggtaccagccgaacctcctcttcttccgcacgccgcaggtcgggcccgccgcggccgccttccgcgccgacgagcccggggaggagaccggcggcggcggcggcaagaggaaggccgcgccgagaaggtcctttctgtcggcgatctttggcgtcaggcggcacggacgacgggaggaggcagtagtcaggaaggaccctccccggcggtccacctcgtggctctcggcgatcatccgccgcaagcggaggccggccgacttgcccgcagccgcgtccttcccggacgaggagcccgagtcccccggaggcagcaacagcaccggcagctggtggttcccctcgccgtcgcctgcaaggcagcagcagcaccgccgccggcacggcggcggcgctggcgccagcggggacgggatctcggggttcgccgtgtgcctgagcccgctcgtccggcccagctccgccggcggccggcgccggtgccagccgccggacccctccgcgctgggaggagacagccaccggcgacacgcgtctgccggcggcgccgcgtcgttcggccgcaacgcgtcccggaagctcgccgatatgggtaggttccgatgacgcttcctcgccgccgtcgtcgtcggcgccggccagagttcctctttctttgttattattattattattattattttgttaatctcgaagatgatatgatgatgtttgtttagtacagtactagtagcacttagcgcctagctaggcagccaaacttgttggaagaaattcaatggttattcggatggcctgctttggtttgtactcctactagcccaagtttggagcggcacacattagtcggcgatgacagtgtattagctagcttcaagagttttaaggaattctttgtgtgagcttggagttttgtttgcgaggaagatgtcaaacacggcgacctggggatatcagctccgctgaactctgaccagcgacttcaattttgtccgctgccgcgcggcgcgactgccgaggtgatttaatttgttttatcgggagatgggttcgtttgtgcgctgcggcctgcggcggcgttcgctcgcgctcatcattcaactcccgcaggccggaggtagttgtcagttgcggcgctggcctccgtcggttggacttggatccttcctcttccgtcagcactgtacttgtgctccgccttcggtggtagcagtatattcttcagacatgaatcaggaattcaggcctcgatttggggacgctacctgctaccgtcgggattcgttaactatgtgtatatattcgttaactatgtgtatatatgattatgagctgcggatttatttttgaatgattatatgcgctgtggattagtactgatgagtggtagccagaccatgaacaaccttgccgtgcggcgacaaggtcagacggactacgctcgctcgcgtcgctccatgcttgcacgacaacacggacaggtcttgaacttgaggcctcatttagaacgcatgaatttcatatgaattagtccatttttacaaggaagaacacaagaaacagtcgtcggcccggtcgtctcctgttgtccgctgacaatacagacgatcggtttcagaggcagccacatacacaatgacgacactactagacagatcttgcgtgtaaaatgaaattttatat

SEQ ID NO: 83584 - DNA, 1146 bp, Zea Mays
taaacaccaccagcagtgccagctgctagctattagctatagcttcctttcatcagggtgcgacgcgtccatcctgctggacgggcctgacacggagaagacggcggtgcagaacagcggcatcttcggctacgacttcatcgacgacgtgaaggcggcgctcgagagagtttgccccggcgtcgtctcctgcgctgacatcatcatcgccgcgacaagggacgccgttggcatgtgcggggggccgagctaccaagtgcagctgggcagaagggacggcatggtgtcgcaggcgtccatggcgagcattctgccgggccccaacgtcgacgtccccaccgccatcgatctgttcgcgcggaagggcctcaacagcttcgagatggtcagcctcatgggcgcgcacacggtgggggtgacgcactgctcggtgatccacgaccggctgttcaacttcaacggcaccgggtcgccggacccggccatggacccgatgtacgtgtggatcctgacgacgtacgcgtgccccaggggccaggccttcgacaacatcgtctacctcgacgacccctccagcatcctgctcgtcgaccggagctactactcccagatcatgaagcgccacggcgtgctgtccgtggaccaggccctcggcgacagcagcgccaccgcgtggatggtcaagttcctcgccaccaccgacttcttcccctccatgttcagctacgcgctcaacaagctcgccgcgctcgacgtcctcaccggcaccgacggcgagatcaggaagagctgccggaggaccaactgatctgacggatcggatcgatctgccgcagttgttagttgattgatacacagagataggttaatcaatcattaccagcagctacctaatagctggctagacgagcagctgctgtgctgtgagacgcaaagggggaaaaaaggacaagagaaagcatatcgaaccaatggatcgaggactgagggagcattaccagtggtagcatttggttttaccgtagtaaatttgagtaaagattcaatttactggtgtagtacaaggatgcattttgtgtgtgtgtgtgtctgtacgctgattcttttgtacgtggccgctataaaaatatacgttccatgcatata

SEQ ID NO: 83585 - DNA, 1919 bp, Zea Mays
agaggggacaggggaggcagaggacggagagagtcgcccaccgccgccaccaccaccaccacaggcgccaccctgctcgatcgagcaagcagtgtgacattatagctaggctgctgcacatgcaccgtgctgtgctggtcaacgatacacttctcttttcaccaatacagtcacgaagaagtactccagcagcagctgcagcagcagctgtattatagccggctaccaccaccgatccgtcgaccggagatgcagccggcctgctccggcgccgcgcttctcgccgccttcatcgccgtgctggcgtattcggccgcgcgctgccgcggccagctcgccgacaactactacgccggcaagtgcggcaacttcagcgtggaggccatcatccgggacgccgtcaaggcccgcctcgcgtgggacaagcggatggtcgccggcctcctccacctgcagttccacgactgcttcgtcgccgggtgcgacgcgtccatcctgctggacgggcctgacacggagaagacggcggtgcagaacagcggcatcttcggctacgacttcatcgacgacgtgaaggcggcgctcgagagagtttgccccggcgtcgtctcctgcgctgacatcatcatcgccgcgacaagggacgccgttggcatggtgagtcaccctgcccggcccggccctacctacgagctacatgtactacgtgaacaagcaataatgccgattggttttctttctgaagaatcgcaatgtcgagctgaatggcgatgattgacttcatccgctgctcttaccttttgacatatgatgatttatcttttggttttgctaagagcgagctggcaacggcttcgttcgatttttaattattcattactaggcaggctataaataccacattgtgaatccgtttattgttgctttaatacttaaatactggttacaaatgacgaattaagtgacgatttatctgcgctgtgaacgaattattcaatgcaagtccagtgcggggggccgagctaccaagtgcagctgggcagaagggacggcatggtgtcgcaggcgtccatggcgagcattctgccgggccccaacgtcgacgtccccaccgccatcgatctgttcgcgcggaagggcctcaacagcttcgagatggtcagcctcatgggcgcgcacacggtgggggtgacgcactgctcggtgatccacgaccggctgttcaacttcaacggcaccgggtcgccggacccggccatggacccgatgtacgtgtggatcctgacgacgtacgcgtgccccaggggccaggccttcgacaacatcgtctacctcgacgacccctccagcatcctgctcgtcgaccggagctactactcccagatcatgaagcgccacggcgtgctgtccgtggaccaggccctcggcgacagcagcgccaccgcgtggatggtcaagttcctcgccaccaccgacttcttcccctccatgttcagctacgcgctcaacaagctcgccgcgctcgacgtcctcaccggcaccgacggcgagatcaggaagagctgccggaggaccaactgatctgacggatcggatcgatctgccgcagttgttagttgattgatacacagagataggttaatcaatcattaccagcagctacctaatagctggctagacgagcagctgctgtgctgtgagacgcaaagggggaaaaaaggacaagagaaagcatatcgaaccaatggatcgaggactgagggagcattaccagtggtagcatttggttttaccgtagtaaatttgagtaaagattcaatttactggtgtagtacaaggatgcattttgtgtgtgtgtgtgtctgtacgctgattcttttgtacgtggccgctataaaaatatacgttccatgcatata

SEQ ID NO: 83586 - DNA, 1668 bp, Zea Mays
ctaggctagcacgcatcttctctgtcaggtcttctgaactagagacagctatgctatatatcacagagacgcataggagatcgatcgagtcttcgagaggggacaggggaggcagaggacggagagagtcgcccaccgccgccaccaccaccaccacaggcgccaccctgctcgatcgagcaagcagtgtgacattatagctaggctgctgcacatgcaccgtgctgtgctggtcaacgatacacttctcttttcaccaatacagtcacgaagaagtactccagcagcagctgcagcagcagctgtattatagccggctaccaccaccgatccgtcgaccggagatgcagccggcctgctccggcgccgcgcttctcgccgccttcatcgccgtgctggcgtattcggccgcgcgctgccgcggccagctcgccgacaactactacgccggcaagtgcggcaacttcagcgtggaggccatcatccgggacgccgtcaaggcccgcctcgcgtgggacaagcggatggtcgccggcctcctccacctgcagttccacgactgcttcgtcgccgggtgcgacgcgtccatcctgctggacgggcctgacacggagaagacggcggtgcagaacagcggcatcttcggctacgacttcatcgacgacgtgaaggcggcgctcgagagagtttgccccggcgtcgtctcctgcgctgacatcatcatcgccgcgacaagggacgccgttggcatgtccagtgcggggggccgagctaccaagtgcagctgggcagaagggacggcatggtgtcgcaggcgtccatggcgagcattctgccgggccccaacgtcgacgtccccaccgccatcgatctgttcgcgcggaagggcctcaacagcttcgagatggtcagcctcatgggcgcgcacacggtgggggtgacgcactgctcggtgatccacgaccggctgttcaacttcaacggcaccgggtcgccggacccggccatggacccgatgtacgtgtggatcctgacgacgtacgcgtgccccaggggccaggccttcgacaacatcgtctacctcgacgacccctccagcatcctgctcgtcgaccggagctactactcccagatcatgaagcgccacggcgtgctgtccgtggaccaggccctcggcgacagcagcgccaccgcgtggatggtcaagttcctcgccaccaccgacttcttcccctccatgttcagctacgcgctcaacaagctcgccgcgctcgacgtcctcaccggcaccgacggcgagatcaggaagagctgccggaggaccaactgatctgacggatcggatcgatctgccgcagttgttagttgattgatacacagagataggttaatcaatcattaccagcagctacctaatagctggctagacgagcagctgctgtgctgtgagacgcaaagggggaaaaaaggacaagagaaagcatatcgaaccaatggatcgaggactgagggagcattaccagtggtagcatttggttttaccgtagtaaatttgagtaaagattcaatttactggtgtagtacaaggatgcattttgtgtgtgtgtgtgtctgtacgctgattcttttgtacgtggccgctataaaaatatacgttccatgcatata

SEQ ID NO: 83587 - DNA, 1797 bp, Zea Mays
gagatatgcgccggtgtcttccactccgtccctgggccaaccgggtggtggtgtcagcgccggtgtcttcctctccgtccctgggcttgggtttccatggcggtggcgagggtaacgccgacctcagccctattactcggaggtccaaccagatagccttttgtacttctacagtgctgcgagagcaaggagagtaggagcccaaagccccaaacgctctttgtttcgctctgcgtgcatgcacgcgtgttcgatgcattaggacggactttgaagaggctagagcaacagttaccgtgtaggtgagctgaatgaaattggccaggagaggaaacaatcggtctataaaaaagtttatagctaatttagataagatcatactttcttatgattgaataattctctgtctgtgttctaactgcgtcctttctcagtgttatactgtcccaatttacagaacaacagatgaaccgtaatgagtcattccgaagatagttgaagtccagtgttattaccgcaattaatatctacctctccacattatgccccttatcttactccatcagtacgaatggctgatattaatgtgtctcattttcagttaatctagctgttgtatctaacttagatatcaggctgctgaaattgcttaaagaccattaatatctctgatatcatggactgttatttcctttccattctgaagatgcaagtaaaccatgggcgattctcttcattagttcaaacaaacacatctactcatgtacccttttctggtggagctagagaacaacaagttcactttactcctcaaccaaaccaagtaagaaaccacttcattttctcacttctgagagttctttgccaaagaaagtacgtgaatctatgaattaatcatgatatttgatatttgatagttgaatctgtttgtattgatcttgagcattatgatattctgaactgagatagttcattacttgtcctagcactttccatcgctgcattatattttatccgccagcttatatctttcactgccctttctcttgggtaagtatgtttacctcttgtaagttgtaactggttagttgagttttacaacgttatgtctgttctaatggcaatttctctatctggacaaccactgcctggacaagcagtaatggttaagccatctgaggctgaaaagaacttagctcaggcaaatgtgacatcaggtggtgccgcttcaggtggagcaagaaagttgtatgttggcaatcttcactcaaatattaccgaagaccaattgagatagatgtgggtccgacccatgctccaatgtcgttgcctcctatgagctcttggtcccatgagctgcatgtgggccatcctcgtcgtatcagcactatgcccctgctggccggctgcgtagcgaacacacagaggaacgctaaatgtagcacgtgtagacagcgtccggtattttaccgaaggctttaccgtctgttgctggaccagcaatagagctcggcgtcctgtaaatttggcggacaggaccacatacaggtccttgttggacacagtcttagtcctgtgagttccaggttttcgcttgtggtacctatgaacatgaaacctgtttactttgaggaatgtactttatttccatcttaagttagtctattcaaacggaatatggatatattaaccgaaattttctgcagtagcatagatcaatgacttggacgagttgctcggttttgttttggacctttggttgatacttatgcggcgtaggatttcagtagattgctt

SEQ ID NO: 83588 - DNA, 1743 bp, Zea Mays
gagatatgcgccggtgtcttccactccgtccctgggccaaccgggtggtggtgtcagcgccggtgtcttcctctccgtccctgggcttgggtttccatggcggtggcgagggtaacgccgacctcagccctattactcggaggtccaaccagatgtaaactgctccttccctccaagttcttctcgactagatccttgcctcgtcgtccgggcactgtttctttccttgcttttttaacaacaaggcccaaataatttatcaatgtacgcatcaaatggcatgctccatttttttgaagtgaacatgtgctaagctcctgcaatttgttcaacgtagtgcatagtagtagcagtgagtactgactactgagtgttaattaccattcaattgcatcctgatggaccccttcacccataattttaacaacattcttatcaaatagatgacatttgaaacatttcttccgcagagccttttgtacttctacagtgctgcgagagcaaggagagtaggagcccaaagccccaaacgctctttgtttcgctctgcgtgcatgcacgcgtgttcgatgcattaggacggactttgaagaggctagagcaacagttaccgtgtagttaatctagctgttgtatctaacttagatatcaggctgctgaaattgcttaaagaccattaatatctctgatatgtaagtgcctgtgaattgccctatatgcttaattacttcagtatgataaatgactcatttttgtgacaatgcttttcgatgatgtatggaagcatggactgttatttcctttccattctgaagatgcaaggtcaattccctcactccatcaagcaaatgtgtttacttatgagattgagatgcgagcttaagttgctcacagtattcaaataaaatcacctacttattttgctcctgaagtaaaccatgggcgattctcttcattagttcaaacaaacacatctactcatgtacccttttctggtggagctagagaacaacaagttcactttactcctcaaccaaaccaacactttccatcgctgcattatattttatccgccagcttatatctttcactgccctttctcttggtaatggttaagccatctgaggctgaaaagaacttagctcaggcaaatgtgacatcaggtggtgccgcttcaggtggagcaagaaagttgtatgttggcaatcttcactcaaatattaccgaagaccaattgagatagatgtgggtccgacccatgctccaatgtcgttgcctcctatgagctcttggtcccatgagctgcatgtgggccatcctcgtcgtatcagcactatgcccctgctggccggctgcgtagcgaacacacagaggaacgctaaatgtagcacgtgtagacagcgtccggtattttaccgaaggctttaccgtctgttgctggaccagcaatagagctcggcgtcctgtaaatttggcggacaggaccacatacaggtccttgttggacacagtcttagtcctgtgagttccaggttttcgcttgtggtacctatgaacatgaaacctgtttactttgaggaatgtactttatttccatcttaagttagtctattcaaacggaatatggatatattaaccgaaattttctgcagtagcatagatcaatgacttggacgagttgctcggttttgttttggacctttggttgatacttatgcggcgtaggatttcagtagattgctt

SEQ ID NO: 83589 - DNA, 1656 bp, Zea Mays
cccccgagatatgcgccggtgtcttccactccgtccctgggccaaccgggtggtggtgtcagcgccggtgtcttcctctccgtccctgggcttgggtttccatggcggtggcgagggtaacgccgacctcagccctattactcggaggtccaaccagatagccttttgtacttctacagtgctgcgagagcaaggagagtaggagcccaaagccccaaacgctctttgtttcgctctgcgtgcatgcacgcgtgttcgatgcattaggacggactttgaagaggctagagcaacagttaccgtgtaggtgagctgaatgaaattggccaggagaggaaacaatcggtctataaaaaagtttatagctaatttagataagatcatactttcttatgattgaataattctctgtctgtgttctaactgcgtcctttctcagtgttatactgtcccaatttacagaacaacagatgaaccgtaatgagtcattccgaagatagttgaagtccagtgttattaccgcaattaatatctacctctccacattatgccccttatcttactccatcagtacgaatggctgatattaatgtgtctcattttcagttaatctagctgttgtatctaacttagatatcaggctgctgaaattgcttaaagaccattaatatctctgatatgtaagtgcctgtgaattgccctatatgcttaattacttcagtatgataaatgactcatttttgtgacaatgcttttcgatgatgtatggaagcatggactgttatttcctttccattctgaagatgcaaggtcaattccctcactccatcaagcaaatgtgtttacttatgagattgagatgcgagcttaagttgctcacagtattcaaataaaatcacctacttattttgctcctgaagtaaaccatgggcgattctcttcattagttcaaacaaacacatctactcatgtacccttttctggtggagctagagaacaacaagttcactttactcctcaaccaaaccaaccatctgaggctgaaaagaacttagctcaggcaaatgtgacatcaggtggtgccgcttcaggtggagcaagaaagttgtatgttggcaatcttcactcaaatattaccgaagaccaattgagatagatgtgggtccgacccatgctccaatgtcgttgcctcctatgagctcttggtcccatgagctgcatgtgggccatcctcgtcgtatcagcactatgcccctgctggccggctgcgtagcgaacacacagaggaacgctaaatgtagcacgtgtagacagcgtccggtattttaccgaaggctttaccgtctgttgctggaccagcaatagagctcggcgtcctgtaaatttggcggacaggaccacatacaggtccttgttggacacagtcttagtcctgtgagttccaggttttcgcttgtggtacctatgaacatgaaacctgtttactttgaggaatgtactttatttccatcttaagttagtctattcaaacggaatatggatatattaaccgaaattttctgcagtagcatagatcaatgacttggacgagttgctcggttttgttttggacctttggttgatacttatgcggcgtaggatttcagtagattgctt

SEQ ID NO: 83590 - DNA, 1683 bp, Zea Mays
caccgcccgcccccctcccccgagatatgcgccggtgtcttccactccgtccctgggccaaccgggtggtggtgtcagcgccggtgtcttcctctccgtccctgggcttgggtttccatggcggtggcgagggtaacgccgacctcagccctattactcggaggtccaaccagatagccttttgtacttctacagtgctgcgagagcaaggagagtaggagcccaaagccccaaacgctctttgtttcgctctgcgtgcatgcacgcgtgttcgatgcattaggacggactttgaagaggctagagcaacagttaccgtgtaggtgagctgaatgaaattggccaggagaggaaacaatcggtctataaaaaagtttatagctaatttagataagatcatactttcttatgattgaataattctctgtctgtgttctaactgcgtcctttctcagtgttatactgtcccaatttacagaacaacagatgaaccgtaatgagtcattccgaagatagttgaagtccagtgttattaccgcaattaatatctacctctccacattatgccccttatcttactccatcagtacgaatggctgatattaatgtgtctcattttcagttaatctagctgttgtatctaacttagatatcaggctgctgaaattgcttaaagaccattaatatctctgatatgtaagtgcctgtgaattgccctatatgcttaattacttcagtatgataaatgactcatttttgtgacaatgcttttcgatgatgtatggaagcatggactgttatttcctttccattctgaagatgcaaggtcaattccctcactccatcaagcaaatgtgtttacttatgagattgagatgcgagcttaagttgctcacagtattcaaataaaatcacctacttattttgctcctgaagtaaaccatgggcgattctcttcattagttcaaacaaacacatctactcatgtacccttttctggtggagctagagaacaacaagttcactttactcctcaaccaaaccaataatggttaagccatctgaggctgaaaagaacttagctcaggcaaatgtgacatcaggtggtgccgcttcaggtggagcaagaaagttgtatgttggcaatcttcactcaaatattaccgaagaccaattgagatagatgtgggtccgacccatgctccaatgtcgttgcctcctatgagctcttggtcccatgagctgcatgtgggccatcctcgtcgtatcagcactatgcccctgctggccggctgcgtagcgaacacacagaggaacgctaaatgtagcacgtgtagacagcgtccggtattttaccgaaggctttaccgtctgttgctggaccagcaatagagctcggcgtcctgtaaatttggcggacaggaccacatacaggtccttgttggacacagtcttagtcctgtgagttccaggttttcgcttgtggtacctatgaacatgaaacctgtttactttgaggaatgtactttatttccatcttaagttagtctattcaaacggaatatggatatattaaccgaaattttctgcagtagcatagatcaatgacttggacgagttgctcggttttgttttggacctttggttgatacttatgcggcgtaggatttcagtagattgctt

SEQ ID NO: 83591 - DNA, 1356 bp, Zea Mays
caccgcccgcccccctcccccgagatatgcgccggtgtcttccactccgtccctgggccaaccgggtggtggtgtcagcgccggtgtcttcctctccgtccctgggcttgggtttccatggcggtggcgagggtaacgccgacctcagccctattactcggaggtccaaccagatagccttttgtacttctacagtgctgcgagagcaaggagagtaggagcccaaagccccaaacgctctttgtttcgctctgcgtgcatgcacgcgtgttcgatgcattaggacggactttgaagaggctagagcaacagttaccgtgtagttaatctagctgttgtatctaacttagatatcaggctgctgaaattgcttaaagaccattaatatctctgatatcatggactgttatttcctttccattctgaagatgcaaggtcaattccctcactccatcaagcaaatgtgtttacttatgagattgagatgcgagcttaagttgctcacagtattcaaataaaatcacctacttattttgctcctgaagtaaaccatgggcgattctcttcattagttcaaacaaacacatctactcatgtacccttttctggtggagctagagaacaacaagttcactttactcctcaaccaaaccaacactttccatcgctgcattatattttatccgccagcttatatctttcactgccctttctcttggtaatggttaagccatctgaggctgaaaagaacttagctcaggcaaatgtgacatcaggtggtgccgcttcaggtggagcaagaaagttgtatgttggcaatcttcactcaaatattaccgaagaccaattgagatagatgtgggtccgacccatgctccaatgtcgttgcctcctatgagctcttggtcccatgagctgcatgtgggccatcctcgtcgtatcagcactatgcccctgctggccggctgcgtagcgaacacacagaggaacgctaaatgtagcacgtgtagacagcgtccggtattttaccgaaggctttaccgtctgttgctggaccagcaatagagctcggcgtcctgtaaatttggcggacaggaccacatacaggtccttgttggacacagtcttagtcctgtgagttccaggttttcgcttgtggtacctatgaacatgaaacctgtttactttgaggaatgtactttatttccatcttaagttagtctattcaaacggaatatggatatattaaccgaaattttctgcagtagcatagatcaatgacttggacgagttgctcggttttgttttggacctttggttgatacttatgcggcgtaggatttcagtagattgctt

SEQ ID NO: 83592 - DNA, 1981 bp, Zea Mays
catccgcgaccaccgcccgcccccctcccccgagatatgcgccggtgtcttccactccgtccctgggccaaccgggtggtggtgtcagcgccggtgtcttcctctccgtccctgggcttgggtttccatggcggtggcgagggtaacgccgacctcagccctattactcggaggtccaaccagatgtaaactgctccttccctccaagttcttctcgactagatccttgcctcgtcgtccgggcactgtttctttccttgcttttttaacaacaaggcccaaataatttatcaatgtacgcatcaaatggcatgctccatttttttgaagtgaacatgtgctaagctcctgcaatttgttcaacgtagtgcatagtagtagcagtgagtactgactactgagtgttaattaccattcaattgcatcctgatggaccccttcacccataattttaacaacattcttatcaaatagatgacatttgaaacatttcttccgcagagccttttgtacttctacagtgctgcgagagcaaggagagtaggagcccaaagccccaaacgctctttgtttcgctctgcgtgcatgcacgcgtgttcgatgcattaggacggactttgaagaggctagagcaacagttaccgtgtaggtgagctgaatgaaattggccaggagaggaaacaatcggtctataaaaaagtttatagctaatttagataagatcatactttcttatgattgaataattctctgtctgtgttctaactgcgtcctttctcagtgttatactgtcccaatttacagaacaacagatgaaccgtaatgagtcattccgaagatagttgaagtccagtgttattaccgcaattaatatctacctctccacattatgccccttatcttactccatcagtacgaatggctgatattaatgtgtctcattttcagttaatctagctgttgtatctaacttagatatcaggctgctgaaattgcttaaagaccattaatatctctgatatcatggactgttatttcctttccattctgaagatgcaaggtcaattccctcactccatcaagcaaatgtgtttacttatgagattgagatgcgagcttaagttgctcacagtattcaaataaaatcacctacttattttgctcctgaagtaaaccatgggcgattctcttcattagttcaaacaaacacatctactcatgtacccttttctggtggagctagagaacaacaagttcactttactcctcaaccaaaccaacactttccatcgctgcattatattttatccgccagcttatatctttcactgccctttctcttggtaatggttaagccatctgaggctgaaaagaacttagctcaggcaaatgtgacatcaggtggtgccgcttcaggtggagcaagaaagttgtatgttggcaatcttcactcaaatattaccgaagaccaattgagatagatgtgggtccgacccatgctccaatgtcgttgcctcctatgagctcttggtcccatgagctgcatgtgggccatcctcgtcgtatcagcactatgcccctgctggccggctgcgtagcgaacacacagaggaacgctaaatgtagcacgtgtagacagcgtccggtattttaccgaaggctttaccgtctgttgctggaccagcaatagagctcggcgtcctgtaaatttggcggacaggaccacatacaggtccttgttggacacagtcttagtcctgtgagttccaggttttcgcttgtggtacctatgaacatgaaacctgtttactttgaggaatgtactttatttccatcttaagttagtctattcaaacggaatatggatatattaaccgaaattttctgcagtagcatagatcaatgacttggacgagttgctcggttttgttttggacctttggttgatacttatgcggcgtaggatttcagtagattgctt

SEQ ID NO: 83593 - DNA, 1505 bp, Zea Mays
gcatccgcgaccaccgcccgcccccctcccccgagatatgcgccggtgtcttccactccgtccctgggccaaccgggtggtggtgtcagcgccggtgtcttcctctccgtccctgggcttgggtttccatggcggtggcgagggtaacgccgacctcagccctattactcggaggtccaaccagatagccttttgtacttctacagtgctgcgagagcaaggagagtaggagcccaaagccccaaacgctctttgtttcgctctgcgtgcatgcacgcgtgttcgatgcattaggacggactttgaagaggctagagcaacagttaccgtgtagtgttatactgtcccaatttacagaacaacagatgaaccgtaatgagtcattccgaagatagttgaagtccagtgttattaccgcaattaatatctacctctccacattatgccccttatcttactccatcagtacgaatggctgatattaatgtgtctcattttcagttaatctagctgttgtatctaacttagatatcaggctgctgaaattgcttaaagaccattaatatctctgatatgtaagtgcctgtgaattgccctatatgcttaattacttcagtatgataaatgactcatttttgtgacaatgcttttcgatgatgtatggaagcatggactgttatttcctttccattctgaagatgcaaggtcaattccctcactccatcaagcaaatgtgtttacttatgagattgagatgcgagcttaagttgctcacagtattcaaataaaatcacctacttattttgctcctgaagtaaaccatgggcgattctcttcattagttcaaacaaacacatctactcatgtacccttttctggtggagctagagaacaacaagttcactttactcctcaaccaaaccaagtggtgccgcttcaggtggagcaagaaagttgtatgttggcaatcttcactcaaatattaccgaagaccaattgagatagatgtgggtccgacccatgctccaatgtcgttgcctcctatgagctcttggtcccatgagctgcatgtgggccatcctcgtcgtatcagcactatgcccctgctggccggctgcgtagcgaacacacagaggaacgctaaatgtagcacgtgtagacagcgtccggtattttaccgaaggctttaccgtctgttgctggaccagcaatagagctcggcgtcctgtaaatttggcggacaggaccacatacaggtccttgttggacacagtcttagtcctgtgagttccaggttttcgcttgtggtacctatgaacatgaaacctgtttactttgaggaatgtactttatttccatcttaagttagtctattcaaacggaatatggatatattaaccgaaattttctgcagtagcatagatcaatgacttggacgagttgctcggttttgttttggacctttggttgatacttatgcggcgtaggatttcagtagattgctt

SEQ ID NO: 83594 - DNA, 2428 bp, Zea Mays
ctcccccggcaacagcttctgcatccgcgaccaccgcccgcccccctcccccgagatatgcgccggtgtcttccactccgtccctgggccaaccgggtggtggtgtcagcgccggtgtcttcctctccgtccctgggcttgggtttccatggcggtggcgagggtaacgccgacctcagccctattactcggaggtccaaccagatagccttttgtacttctacagtgctgcgagagcaaggagagtaggagcccaaagccccaaacgctctttgtttcgctctgcgtgcatgcacgcgtgttcgatgcattaggacggactttgaagaggctagagcaacagttaccgtgtaggtgagctgaatgaaattggccaggagaggaaacaatcggtctataaaaaagtttatagctaatttagataagatcatactttcttatgattgaataattctctgtctgtgttctaactgcgtcctttctcagtgttatactgtcccaatttacagaacaacagatgaaccgtaatgagtcattccgaagatagttgaagtccagtgttattaccgcaattaatatctacctctccacattatgccccttatcttactccatcagtacgaatggctgatattaatgtgtctcattttcagttaatctagctgttgtatctaacttagatatcaggctgctgaaattgcttaaagaccattaatatctctgatatgtaagtgcctgtgaattgccctatatgcttaattacttcagtatgataaatgactcatttttgtgacaatgcttttcgatgatgtatggaagcatggactgttatttcctttccattctgaagatgcaaggtcaattccctcactccatcaagcaaatgtgtttacttatgagattgagatgcgagcttaagttgctcacagtattcaaataaaatcacctacttattttgctcctgaagtaaaccatgggcgattctcttcattagttcaaacaaacacatctactcatgtacccttttctggtggagctagagaacaacaagttcactttactcctcaaccaaaccaagtaagaaaccacttcattttctcacttctgagagttctttgccaaagaaagtacgtgaatctatgaattaatcatgatatttgatatttgatagttgaatctgtttgtattgatcttgagcattatgatattctgaactgagatagttcattacttgtcctagcactttccatcgctgcattatattttatccgccagcttatatctttcactgccctttctcttgggtaagtatgtttacctcttgtaagttgtaactggttagttgagttttacaacgttatgtctgttctaatggcaatttctctatctggacaaccactgcctggacaagcagtaatggttaagccatctgaggctgaaaagaacttagctcaggcaaatgtgacatcaggtggtgccgcttcaggtggagcaagaaagttgtatgttggcaatcttcactcaaatattaccgaagaccaattgagataggtacatttgatatgatcttgtattgctcaccccacttattatgcatttatcatacccttttttctttatgattttcttgaattcttgattgaaaaaacgcacctgaggctatagcaaaagtttttagtatattttgtcaattaattatttgcttatgtattgggatatgttggtgcttcgttttaataaggcgtactaaataactgtttcagttaggctatcttcagcaacttcctctaaatttcatcctctaaaagaatattcttcgtcctttacagtacactctaaaaaatttcatcctctatatctctaccatctccagcaacgtttcttaaattttgtcctctatatcccatgttctatattttttctgacagatgtgggtccgacccatgctccaatgtcgttgcctcctatgagctcttggtcccatgagctgcatgtgggccatcctcgtcgtatcagcactatgcccctgctggccggctgcgtagcgaacacacagaggaacgctaaatgtagcacgtgtagacagcgtccggtattttaccgaaggctttaccgtctgttgctggaccagcaatagagctcggcgtcctgtaaatttggcggacaggaccacatacaggtccttgttggacacagtcttagtcctgtgagttccaggttttcgcttgtggtacctatgaacatgaaacctgtttactttgaggaatgtactttatttccatcttaagttagtctattcaaacggaatatggatatattaaccgaaattttctgcagtagcatagatcaatgacttggacgagttgctcggttttgttttggacctttggttgatacttatgcggcgtaggatttcagtagattgctt

SEQ ID NO: 83595 - DNA, 1456 bp, Zea Mays
cgggcccctcccccggcaacagcttctgcatccgcgaccaccgcccgcccccctcccccgagatatgcgccggtgtcttccactccgtccctgggccaaccgggtggtggtgtcagcgccggtgtcttcctctccgtccctgggcttgggtttccatggcggtggcgagggtaacgccgacctcagccctattactcggaggtccaaccagatagccttttgtacttctacagtgctgcgagagcaaggagagtaggagcccaaagccccaaacgctctttgtttcgctctgcgtgcatgcacgcgtgttcgatgcattaggacggactttgaagaggctagagcaacagttaccgtgtagtgttatactgtcccaatttacagaacaacagatgaaccgtaatgagtcattccgaagatagttgaagtccagtgttattaccgcaattaatatctacctctccacattatgccccttatcttactccatcagtacgaatggctgatattaatgtgtctcattttcagttaatctagctgttgtatctaacttagatatcaggctgctgaaattgcttaaagaccattaatatctctgatatcatggactgttatttcctttccattctgaagatgcaagtgaagtaaaccatgggcgattctcttcattagttcaaacaaacacatctactcatgtacccttttctggtggagctagagaacaacaagttcactttactcctcaaccaaaccaacactttccatcgctgcattatattttatccgccagcttatatctttcactgccctttctcttggtaatggttaagccatctgaggctgaaaagaacttagctcaggcaaatgtgacatcaggtggtgccgcttcaggtggagcaagaaagttgtatgttggcaatcttcactcaaatattaccgaagaccaattgagatagatgtgggtccgacccatgctccaatgtcgttgcctcctatgagctcttggtcccatgagctgcatgtgggccatcctcgtcgtatcagcactatgcccctgctggccggctgcgtagcgaacacacagaggaacgctaaatgtagcacgtgtagacagcgtccggtattttaccgaaggctttaccgtctgttgctggaccagcaatagagctcggcgtcctgtaaatttggcggacaggaccacatacaggtccttgttggacacagtcttagtcctgtgagttccaggttttcgcttgtggtacctatgaacatgaaacctgtttactttgaggaatgtactttatttccatcttaagttagtctattcaaacggaatatggatatattaaccgaaattttctgcagtagcatagatcaatgacttggacgagttgctcggttttgttttggacctttggttgatacttatgcggcgtaggatttcagtagattgctt

SEQ ID NO: 83596 - DNA, 3262 bp, Zea Mays
cttgggctgcttaattctgcgttcattaccctattgccgaagattgatggtgcagcccttgtgaagaattttcgtccgatcagcctcatacatagcttcgccaagctggtaacaaagttgatggcaaataggctggctgtgcatttgaatgcaatggtttcacccaatcagacagcttttatcaaaaaaagattcattcttgacaatttcatgttggtccaacgcactgctaggtttctccaccaacaaaggcaggctcgtatcctcttcaagctggatatttccaaggctttgactcggtttcatggccgtttctcattgaggttttgaggaagatggggttcggacagatttggtgtgatgttgttagtgggttgttggctacctcctccactagaatcttgctgaatggtgttcctggggagatcattgcgcaccaaaggggtctaaggcaaggcgatccactctctcctatgttgtttattttggtcatggatgctctaaatctgctcattcaaaaggcttccgatgaagggttgctccagcgtctatcgtctggagctttgcatcacaggctttctctttatgcggatgacgctgtggttttccttaggcctgtggcttcagacataaatataatcctagagatccttcgactttttggggaagcttcggggctcaagactaatgtccagaaaagtagtgtgttccccattcgttgtaccgaggatgatttggtgcgggtccgagattgtctcccatgtcccttgtcggatttcccttgtcagtatcttggtttacctctgtctttgggaaagctttcaaaggttcagttgcaggcattggtggacaaagcggctaatgtgcttccgggttggaaggccgaccttatgacaaaggcgggtcgtgttgtgtatgttcagtcggttctcacagcgaaaatgatctatgctgccatggctttggacctccctagctggactgttaaagctattgacaagataagaaggggcttcctttggaaaggaagaaaacaagtcaatgggggtcactgtttggtggcgtggggcaaggttactaggcctaaggacttgggtgggcttgggatcactgatctgcggctgttgagcgtggctcttcgggctaggtggccctggctccagagaaccgaccactctaagccttgggcggtcctccctgttcaggcttgtggatcggtgcaggctttgatcaatattgcagttgtgtctgagttgggtgatggaaatgatatccttttttggaaggatcggtgactgaatggtagatgcatcggagaggtggcacctgaggttcttgagcatgttcctaggcgtattgcttccaaaaggctggttaaagatgctctgacagatctaaattgggtggctgacataaggggtgcgctttcagttagggcacttgcgcaagttctaggcctttgtgacctgctggagggtcttgttcttcagcctggtattccagataggcatatttggaaattcaatgcttctggggactactcttctagttctgcctacaaagttctccttggagcggttgattttggcccggctgagcggatttgaaagtcttgggctccgggtaaatgcaaattttttctgtggctcgtggagcataatagatgctggacagctgacaggttggctttgagggggctggaccaccccgtctgctgtccgctctgtgaccaggccgatgagacaattaatcatttgctggtcgagtgcagttttgcaaagcagttttggtttctcctccttcggtcgggggacttccaggtgctctgtccttctacaggggatagttgttttgactcttggtgggagaagagtgctgagatggtgggcaagcctttgtcgaagggtttcaactcgctggtcattttgggtgcgtggtccatttggaagcatagaaataggtgtgtttgatggctgtagcccgagtgttgtgatcgcgctctcggctgcgagggaagagatgttgtgctggcgtttggctggcgctaaagctctatcttctttccatctagaggagttgttttaagagtggtgtatttggtggtgtgtgtctgtaagtctgttgttcgtgttttggggtttcaccccttttctcttcttaatacaaaaatacgcagatctcctgcgtattcaagaaaaaaaaatggataaggtaacaagagacacgcaagaggatatcccttggtgtatgttttttgtggagtggtgtagtactagttgatgaaaatcgagcaggagtaaatagaaaactataattgtggcaggagactcggttttagacacagtagaactaaaacaaaatacataagatgtgattcggcactacacatgacgaaggagatattagtttggaaggtcaagtagtgcctaggaataacatctttacgtgtttaggatcaatgctacaaagagacgggatattgatgaagatgttagccatagaatcaaagcagggtggatgaagtggtgtcaagcatctggcgtcctatatgacaagaggttagtataaaagctaaaaggcaagttttattggacggtgattagacctgctatgttgtatggtgtggaatgttggcctacaaaaagatgacatgttcagcagataagtgttgcgaaaatgtgtatgttgcattggatttgtggccatacaagaagggctcgaatccagaatgatgatatatgtgatagactagggctagcaccaatcgaagaaaagcttgtcctaacaccagttgatatcgaataatccattaatcagcaaacaagggatacatataggatgtatacaaggcctaggcccaacacacgaaaacactctaaacccctccccgcatttgaaattctagcgacgatagatgttgagaaatgggaatggagcgaaactccgagaacgacataagaggggcccttggtgaagatgtcgacgaactgagatgtcctcgaaacatgaaggactcgaacatcaccaatgacgacacgttcgcgacgaagtggaggttgatctcgacatgttttgtccgctagtgctggacaagggttgatggagaggtaaatcgcgctaacattgttgcagtagatgagggtgctcctggagacgggactgtgaacagtgttttaaaggcaacaactaggcgtccaggcgcccgaaagatccaaggcatcctcgtcgccaaggtaagaatcagcaagagggcatagggcag

SEQ ID NO: 83597 - DNA, 4345 bp, Zea Mays
agaggagttaggtgggacaaagcccattatagtaggggtaaacaaggaaaatacaggtaaacactaatacaaccctaacagtattctaacaattttcttaataagacaagtgatggagcagtataaggaacaaaagaaagatctacacgtagttttcattgacttggagaaggattataacaaaatatcaaggaatgttatgtggtgagctttggacgaacataaaattccaacgaactacattggactcatcaaggacatgtacaacaatgttgtgatagtgttcgaaaagtgatgggaacacatgaccttccaattagaacaggactatatcagggatcacctttgagccctttacctttttgccttgatgatggataaggtaacgaaggccactagaaataccgaaccaaatagtcggtggtgacgacggatggctcctcggctctccgcctccccctccctccccctctgccctggcgcccaccccctcccctcccttcccaccagcctctcgccggcgcccactccgggtccggcgaccacctccccttcccccgtggagccgggttccccctcttccttgtcttctctggctcgtcccttcgtaccggctggccggtccaaggtgcagcggtgggcggaggcgagtccggtctctctggagacggttccagcggacgtctctagtgaggtcgctggtcctcccgtgcgacgatcgatcaaggaggtagccctgctcccgcccccgcgtgttgttaggccggtgcctcggtgggaacctcactgcccggtgatcaaggtggttgctcgccctctctctcccaggagagcgccgaggccctcccctgacgctgagggatgggtcgaggttcgtcctcggcgacatcttcgcgggcctctgcctccccgtcgatcgatccctcaggatctccggggaaggtgtttcaactgcatggctatctctcacaaggcggctgagtgtaggtgcccggtgcgctgcttcgcctgcaggtccttgggacaccgcgctgcctcgtgccctgctcgcctcgaccgggcgcctctctgcaggaattctacgtcggtttgggatcgtctcgggcagttgctggtcgatgccaagcctcgttctgttaagatttggagggaggtcccctcacgtggcgggatggtcgagggtgccagggcgccggttcaggcgcagggaggcgcgaagaggcgacgccaccgcacgaggggaagaaggtctaacccatccctgttggttcctgagccatctgttcaggatcttcaagcctcgatgcccgccgaggatcaagccccccttctgtcccaggttgaagatgatgcgtccgcccctcgtggttgcgttctggagcgatcggttgcgcttgacagagaggagttcagattgcagcgttgtgccttgttcgtcgtggtcaccggttcgcggcctcaggtgactttggaagttttcgcagcagaggttgcggctgggtttggtctgaatgaaggctccttctcagtgcaccgttcttccccagaagattttgtcttggttctggactctgagcacgcagcaaatgaggtgtacaacaatggttcggtgttcaattctccctctggttcgttcaagtttattcgatggtctaggctggctcacgccgaggtggtttcgttcccctctttggtcatggttgagttcggaggaattcctgtgcacgcgtgggagctggctacggcgcaaaatctgatgcgagatttctgctctgaggtggaacttcatcccgactcagtcaatcgactcaacttttcttcgttcaaggtattcggatggtgccgccggccgcagctcatttcggtctcgtttgagctcctcatcccggagcgggtgatgagttcgggaggccctccggcggtgagacgcttgctgtcctatccggtgacggcctctgtatctagtgttccccaggcggatgctactgtttcgccttcattgccttcgtccccaacgtctgatgatggtgcccgggaggcaggttctcgccggcgcaggctgcttcggggtgtgctggagaggcttggcgcttcagcttcagtggggcctcagtccggccggaggcccgtgcatgagcggcttggccacattcctacgcttggacgacacgtggactccagccaggggcctttgcatggcggtgtgcatggtggtggcggctcgtttcctgcgaccgctcgtgttggacaggaggagcatgggctgggcaacattgatggtgttggtttctttcgaggagacgttctgttgcctgaggtggtggctgcagtcgggattcggcctttggatgttggtggggacttcgtatcttcgccggccgtgggggagtcgctgaggctcggctccagtgtccccttgcccgatgacgggtctggggatcctcatttgttgccagctgcgcctccggcgaaattgggcgggatgaggtcgcccatggatgtgttgcctccaggcatgagggtttggacccgtccgccaattacctacatccgtagaaggcgaggaacggatgcttcccgagtgctctcgcctgcgcaggcgggtttcattgaaagaatgtctaagtctgttgagtccattcttggtgttcctcagaagcggcagcatcgttccaggccccgggctggctgcaccttccctcgccgcagcaggcgtcttgccggggctggagtggagaagctgccagtccctcagcgtgttcagaagggcaggttgcggattgtgaaggagctgggtcttctgcaggctgatcatgacgatgtgctgtctccaagtgttctcgatgattatgctaaggtttttgttaagcggccctcggatctgcagctcaacgccttggcgctgcttctcaacatgtccatccctgagaatttgttgggggagccttcttcggcggtggtctaagccttggtcctttttggtcgtggttttttgttttctcaatagatccttcaaaaatactttgctggaatgtgcggggccttaatagttcggcccggcaagatgtggttcgatgtttagtggacagcgtcaaagcggatgtgatctgtattcaagaaactaaaatgtcggatgttaccagatggctggtttgtcgttgtttgggttcagactttggcaatttcgttttctctccctcgaatggcgcaagtggaggtattctggttgcttggaggagtcatgtaacttctcttgggtcgaggattgatggtcactgtgtttcggtgaattttcggctggctgatggcacatcctggtggctgtcttgtgtgtatgctccccaaggtattgctgaaaaaattgaattcctgcatgagctcacgactgttagaactcactgcctgggtctgtggctagtgatcggtgatttcaacatgatcctaagcaacgaggataaaaacaattccaaccttgatcgaaatatgatggggagattcagaagatggaaggatgatttggctcttcttgaaattcccttgactggtcgcaaatacacttggtcaaatggtcagagcaaccccaccttggttcgtctggataggatgttctgttctgcggattgggaggctctctttccgggttgtttgcttcagagtacagcttctcaagattcagaccattgccctcttctgctaggtttgcaggatgtcaatagagcaaaagggcgttttttcttccaggctttctgggttaagttggaaggttttcatgacactgttgatcaggcttggagctcggtggcgccaggtccctgtcctctggtcactctctccaggaagttgcaggctacgtctagggctttgcagagttggagtgcaaaaaaagtgggttgtttgaagcttcagcttgagatggcttgggaactccttcacatgtttgagatggctcaggagcttcgggttctgtcacctgctgaagactggttctagtgtgctttgaagaagcgcattcttgcgctttcctcttggtctagatcagtggtgcggcttcggtctcgtgttacttggttgaaagatggagacgccaatacatcactctttcatgcccaggcgagatgcaggaaaaagaggaattttattgcttctctaaattccaccgagggcgaggtctggacttctcatgatgacaaggcagtagcccttttcgacttctatgatggtttgcttggtactgctatttagagagatgtctctattgaccttgatgagctagggttgcaatcttttgatcttgaaggcttgaatgtgcatttctcggaggatgaagtttgggacaaggttaaat

SEQ ID NO: 83598 - DNA, 1441 bp, Zea Mays
acacgacgcgacgtagggcctaggcccgcggcccgcggcccgcgggcgctgtggtgcgccttttttttaccatcgagacaacacgacgaggccagccacgcgcaaaccgaatccaccaacgtcaaacgaccgcaccaaccaatccacttcgccggcgatccgtctcatctcgtcgcgtctccggcgccggcagacacgggtaacgcggctccgagatcggcgggcaggatgatgatgctgatcgattgctcggggtgccgtaccccgttgcagctgccgcacggggcgccctgcatccgatgcgccatctgtggggccgtcacgcacatcgcccccgcccctcccgccgagcccaaccgcggcgccgtacaaccggcgccggggtgggcgccgccgccgccgccggtgcacggacggaagcgcgccgtggtgtgcgggatttcgtatcggtactcgcggcatgagctgaagggctgcatcaacgacgccaagtgcatgcgccacctgctcatgacgcgcttcaacttccccgacgactccatcatcatgctcaacgaagaacaaacggacccctacaaaatcccaacaaagcataacataaggatggccatgtattggcttgtgcaaggttgtcaacctggagattcattggtgttccattattctgggcatggatcacaacaaagaaattacagtggagatgaggttgatgggttcgatgaaaccctctgcccgttggattttgagacacaagggatgattttggatgatgagataaatacagcattagttcgaccacttcctcatggagttaaacttcatgcactcattgatgcttgtcatagtgggactgcacttgatttgccttatctctgcagaatgaacaggagtgggcaatatgtatgggaagatcaccgaccgcgatctggtgtctggaaaggcactagtggtggggaagctatttcctttagtggttgtgatgatgatcagacctctgcagatacctctgctttatcaaagatcacttcgactggtgcaatgacattctgcttcatccaagctattgaacgtggacagggcaccacctacggtagtatcctgaactctatgcgttccacaatacgcaacacaggtgactcagcgggtgtaggtggcggtgctgttacatcactaattacaatgcttcttactggagggagcctttctgctggtggtctgagacaggagccacaactgacggcgtgcgagccatttgatgtctatgcgaagcccttctccctatgacgtgttcatagtattgcccaattgatgacagaagaataatatgtaaataattcgttgataaattcatgaataccaacttctctaactcagctttatcactgtcatacatcttagacatatatagctcaaccatcctatgtttgtatctaggatcaag

SEQ ID NO: 83599 - DNA, 1699 bp, Zea Mays
acacgacgcgacgtagggcctaggcccgcggcccgcggcccgcgggcgctgtggtgcgccttttttttaccatcgagacaacacgacgaggccagccacgcgcaaaccgaatccaccaacgtcaaacgaccgcaccaaccaatccacttcgccggcgatccgtctcatctcgtcgcgtctccggcgccggcagacacgggtaacgcggctccgagatcggcgggcaggatgatgatgctgatcgattgctcggggtgccgtaccccgttgcagctgccgcacggggcgccctgcatccgatgcgccatctgtggggccgtcacgcacatcgcccccgcccctcccgccgagcccaaccgcggcgccgtacaaccggcgccggggtgggcgccgccgccgccgccggtgcacggacggaagcgcgccgtggtgtgcgggatttcgtatcggtactcgcggcatgagctgaagggctgcatcaacgacgccaagtgcatgcgccacctgctcatgacgcgcttcaacttccccgacgactccatcatcatgctcaacgaagaacaaacggacccctacaaaatcccaacaaagcataacataaggatggccatgtattggcttgtgcaaggttgtcaacctggagattcattggtgttccattattctgggcatggatcacaacaaagaaattacagtggagatgaggttgatgggttcgatgaaaccctctgcccgttggattttgagacacaagggatgattttggatgatgagataaatacagcattagttcgaccacttcctcatggagttaaacttcatgcactcattgatgcttgtcatagtgggactgcacttgatttgccttatctctgcagaatgaacaggagtgggcaatatgtatgggaagatcaccgaccgcgatctggtgtctggaaaggcactagtggtggggaagctatttcctttagtggttgtgatgatgatcagacctctgcagatacctctgctttatcaaagatcacttcgactggtgcaatgacattctgcttcatccaagctattgaacgtggacagggcaccacctacggtagtatcctgaactctatgcgttccacaatacgcaacacaggtgactcagcgggtgtaggtggcggtgctgttacatcactaattacaatgcttcttactggagggagcctttctgctggtggtctgagacaggagccacaactgacggcgtgcgagccatttgatgtctatgcgaagcccttctccctatgacgtgttcatagtattgcccaatgtactatatatctcctcccatttcacgttatcattatgtacaaacgaacaagaccttagaagtcctccatccatccagattgttaacaacgcgtggaattgccctttatttccatgccctcacaatgttcagtgcacagttgttaaaggagagtacaatttgatgcctcagatgctgcaatttcatttttctagttttttccttttctcctcgaatcattgttattttacagcagaaaggttaaagtatagtttggttttgaagctttcctgtttgacagtgttagtttataaagtatgaatgaggtattggtaaggaagataagtatacattgtttatttcacagatataatccctatatgcatgaataatttttgtccacgctggcccgac

SEQ ID NO: 83600 - DNA, 2038 bp, Zea Mays
cctccgcccatctccacctcgccatcgtcccatgtctctctcctccgccggccaccaccccctcccggcccgaccaaccccgaaccccacttccaattagatgcatcaccaccaccaccaccccgcggccgtgctggagtctgcggccccggcggcagaccctccgcccccgccggtcctcgacccgtcctccttacgcatccacatcccgtcaagcccgcaccatgcgctgccctccaccccgcacaagcgccccgttgtcatgacctcgtcctcctcgtcgtccacccccactcgcccctcgccgtcgcccttcaccccgccgcggaggcgcaaggtccccgcgccagctgctcccgcggggggcgcagcggccaggtatctccttcgctgcctgcacctccgcctgcgcatcctcctcctcatctctctcccctccctctactttctctccccgacccccgccatcctcccgcactccctcctcgccgacttcctttccgctgcggccttctcctgcgcgctcctccttctcctctgcctctccctgccgcggcttcccttcgcgctgccgctgccgctccccctccgccgcgcgcgccgatcccctatcctttggtccatcggttcctcgccttccgcatccgcaaccacccccaccaccggccatttcgttcaggtttatagcaacggcgacgtctacgagggccagttccaccgcggccgctgcactggcagcggcgtctactactactacatgagcgggagatatgagggggattgggtcgacggcaagtacgacggcttcggcgtcgagacctgggccagaggtagccggtaccggggccagtaccggcatggactcaggcatggctacggcgtgtacaggttctacactggggatgtgtatgctggggagtggtcaaacggccagagccatggatatggcgttcacacctgtgaggacggtagccggtatgttggtgagttcaagaggggcgtcaagcatggtctcggccactaccatttcagggcctaccgagtgccggaagctgctgcatgagtggggtctgggaaagggataaaccgaggcaagcctttcgcaagcaaatgtggagaggctacttcgaacctgtgacccggaatggtgacacctacgcgggagagtactttgctgataggatgcacggctttggaatctacagctttgccaatggtcatagatacgagggagcatggcatgagggtagaagacagggtttaggtatgtatagtttcaggaatggagagacacaagctgggcactggcaaaatggagttcttgatactttatgcacccagaactttatccctggatcacctattgctgtgaaccattccaaggtcctcaacgcagtgcaggaagcgagaagagctgcagagaaggcctatgacatcccaagagtagatgatagggtgaacagggccgttgcagcagctaataaagcagccaatgcagccagggttgctgccgtgaaggctgcacaaaagcgcaaccccaataatggtgatgatctaccactgtcagtagtgtgacaatgaaggaaatatatgttggcatgaagctgcttcgctatgccatcgcatcacccattgcccggcataaccttcagcttcccagtaggggaagccactgctcgtccatcaggccttggccagtggcgacacctgagtcattgccggcagcattcaagcttgcgggagaagaccaaattttcatacatatacatatttgtggtgtcttttgcgatgcagcagaactactgctctgaggactttccattgttcaaggtaactgggcgcgaggccagcagtaggtttctcctgcattttctgcagtgtaatactcacccaatgttagcgatacgacgaatgcacaccccaacatcaggagacaaaaacctactccctccgtttccgtttcaaactatgaatcattttaactttttttgagtcaaagcatcttaaatttaactaaaattatagagaaataaaaaaa

SEQ ID NO: 83601 - DNA, 1418 bp, Zea Mays
cctccgcccatctccacctcgccatcgtcccatgtctctctcctccgccggccaccaccccctcccggcccgaccaaccccgaaccccacttccaattagatgcatcaccaccaccaccaccccgcggccgtgctggagtctgcggccccggcggcagaccctccgcccccgccggtcctcgacccgtcctccttacgcatccacatcccgtcaagcccgcaccatgcgctgccctccaccccgcacaagcgccccgttgtcatgacctcgtcctcctcgtcgtccacccccactcgcccctcgccgtcgcccttcaccccgccgcggaggcgcaaggtccccgcgccagctgctcccgcggggggcgcagcggccaggttctacactggggatgtgtatgctggggagtggtcaaacggccagagccatggatatggcgttcacacctgtgaggacggtagccggtatgttggtgagttcaagaggggcgtcaagcatggtctcggccactaccatttcaggaatggtgacacctacgcgggagagtactttgctgataggatgcacggctttggaatctacagctttgccaatggtcatagatacgagggagcatggcatgagggtagaagacagggtttaggtatgtatagtttcaggaatggagagacacaagctgggcactggcaaaatggagttcttgatactttatgcacccagaactttatccctggatcacctattgctgtgaaccattccaaggtcctcaacgcagtgcaggaagcgagaagagctgcagagaaggcctatgacatcccaagagtagatgatagggtgaacagggccgttgcagcagctaataaagcagccaatgcagccagggttgctgccgtgaaggctgcacaaaagcgcaaccccaataatggtgatgatctaccactgtcagtagtgtgacaatgaaggaaatatatgttggcatgaagctgcttcgctatgccatcgcatcacccattgcccggcataaccttcagcttcccagtaggggaagccactgctcgtccatcaggccttggccagtggcgacacctgagtcattgccggcagcattcaagcttgcgggagaagaccaaattttcatacatatacatatttgtggtgtcttttgcgatgcagcagaactactgctctgaggactttccattgttcaaggtaactgggcgcgaggccagcagtaggtttctcctgcattttctgcagtgtaatactcacccaatgttagcgatacgacgaatgcacaccccaacatcaggagacaaaaacctactccctccgtttccgtttcaaactatgaatcattttaactttttttgagtcaaagcatcttaaatttaactaaaattatagagaaataaaaaaa

SEQ ID NO: 83602 - DNA, 1348 bp, Zea Mays
cgatgatgcacccgctctgaacccaacccaccgccatttctatacccctctcgccctgcgccccgtcacctctctggtccctctcctcttgctttgatgctttctctctccatctcgtttcccccgcctgcccagccagcgcaaaccctagcccgtactgcgaggctcttggcagcggataactggacctgtccgcatgaatcgggggagagaaactggcggtaacttacgtgaatcgggtttgtttagtggctgcgacggcgacggcggcgcagggatggaccgtaagcgcattaaggacgtgctcgagaagcacctggagaggtcgtcgccgtccacctccaggggcgtcgtgtccaaggagagggagcgcctcgctgccgggaaactgccggcgtcgcttggcaaggcggagaaggtgtctgatggtgaggaatttgaaactgacagtgaagatgaagattctgatatcagtggttctgagagcgagggcacatcctggatttcatggtgccatattatgattatgcacttgatctcatcttagacattgagtcttctgatgatacatacactgaggagcgaaaagaatttatcgagttgtctgcagagatactatatggattaattcatgcacgatacatcttaaccagcaagggtctagctgcaatgttggagaagttcaagaatcgtgactttggtggatgccccagagtgtactgctgtggccagccctgtcttccagcaggtcaatcggatgttcctagatcgagcacagtgaagatatactgtccaaaatgcgaagaacttaactatccaatatccatgtaccaaggcagcattgatggatcatacttcgggacgacgttccctcatcttttcctgatgacctatccgcacttgaagccgcagaagccgccacagcaatacactccaagagttttcggcttcaaacatcacaagccgtcatgacagagctgcactttcagcagaaacaccctttgcacctaggatttagggagagcaccgtggccttcaaatattgttgcctgatcgatgtacgaattcgcgaccttgggtcctgctgcaaactgctgtcaaattgacgttgaacactccactaccatggttacctcttcgtggctacgtgaaaaattcgtgttgacggctttactgaccggaagggccagcaacgtcgtcgtcctgcgggtgcggagttgccggctgcgactgggctgcgtgcacgtaaccaccggctgcagctgcaagtagaataagttgagcatacatcgagacaaatctatcggcatagatcgctctcagaattatttcgtgggcagctactaat

SEQ ID NO: 83603 - DNA, 1343 bp, Zea Mays
cgacggcgacggcggcgcagggatggaccgtaagcgcattaaggacgtgctcgagaagcacctggagaggtcgtcgccgtccacctccaggggcgtcgtgtccaaggagagggagcgcctcgctgccgggaaactgccggcgtcgcttggcaaggcggagaaggtgtctgatggtgaggaatttgaaactgacagtgaagatgaagattctgatatcagtggttctgagagcgagggcacatcctggatttcatggtgccatattatgattatgcacttgatctcatcttagacattgagtcttctgatgatacatacactgaggagcgaaaagaatttatcgagttgtctgcagagatactatatggattaattcatgcacgatacatcttaaccagcaagggtctagctgcaatgttggagaagttcaagaatcgtgactttggtggatgccccagagtgtactgctgtggccagccctgtcttccagcaggtcaatcggatgttcctagatcgagcacagtgaagatatactgtccaaaatgcgaagaacttaactatccaatatccatgtaccaaggcagtatccttttgatttgttcttttaattgttttgtacagtatgatatttccatacttccatttgcatctactggccattttatgctgttcttttcaagcgatttatattttgaccaccattcgaaactattgaagtaatatattttttgtttgcaacatcatttatgttttccctgatctccatgccaacagcctggtgaaccacactgaacatttcccccctgattacttgcctcaagtcctcaatttttttgtcagtaaactctttctcggtaaataataatcgtagatggatatttgtaagttgccattacttgcccttgcatgtcctttactttacccaggcattgatggatcatacttcgggacgacgttccctcatcttttcctgatgacctatccgcacttgaagccgcagaagccgccacagcaatacactccaagagttttcggcttcaaacatcacaagccgtcatgacagagctgcactttcagcagaaacaccctttgcacctaggatttagggagagcaccgtggccttcaaatattgttgcctgatcgatgtacgaattcgcgaccttgggtcctgctgcaaactgctgtcaaattgacgttgaacactccactaccatggttacctcttcgtggctacgtgaaaaattcgtgttgacggctttactgaccggaagggccagcaacgtcgtcgtcctgcgggtgcggagttgccggctgcgactgggctgcgtgcacgtaaccaccg

SEQ ID NO: 83604 - DNA, 1607 bp, Zea Mays
tatggattaaacgaagaggagcgatgagcccacgagtttaagtttagatcaggtctaaagttcggatatcaaatccggatgcacgatgatgcacccgctctgaacccaacccaccgccatttctatacccctctcgccctgcgccccgtcacctctctggtccctctcctcttgctttgatgctttctctctccatctcgtttcccccgcctgcccagccagcgcaaaccctagcccgtactgcgaggctcttggcagcggataactggacctgtccgcatgaatcgggggagagaaactggcggtaacttacgtgaatcgggtttgtttagtggctgcgacggcgacggcggcgcagggatggaccgtaagcgcattaaggacgtgctcgagaagcacctggagaggtcgtcgccgtccacctccaggggcgtcgtgtccaaggagagggagcgcctcgctgccgggaaactgccggcgtcgcttggcaaggcggagaaggtgtctgatggtgaggaatttgaaactgacagtgaagatgaagattctgatatcagtggttctgagagcgagggcacatcctggatttcatggttctgtacattgcgaggtgccatattatgattatgcacttgatctcatcttagacattgagtcttctgatgatacatacactgaggagcgaaaagaatttatcgagttgtctgcagagatactatatggattaattcatgcacgatacatcttaaccagcaagggtctagctgcaatgttggagaagttcaagaatcgtgactttggtggatgccccagagtgtactgctgtggccagccctgtcttccagcaggtcaatcggatgttcctagatcgagcacagtgaagatatactgtccaaaatgcgaagaacttaactatccaatatccatgtaccaaggcagtatccttttgatttgttcttttaattgttttgtacagtatgatatttccatacttccatttgcatctactggccattttatgctgttcttttcaagcgatttatattttgaccaccattcgaaactattgaagtaatatattttttgtttgcaacatcatttatgttttccctgatctccatgccaacagcctggtgaaccacactgaacatttcccccctgattacttgcctcaagtcctcaatttttttgcattgatggatcatacttcgggacgacgttccctcatcttttcctgatgacctatccgcacttgaagccgcagaagccgccacagcaatacactccaagagttttcggcttcaaacatcacaagccgtcatgacagagctgcactttcagcagaaacaccctttgcacctaggatttagggagagcaccgtggccttcaaatattgttgcctgatcgatgtacgaattcgcgaccttgggtcctgctgcaaactgctgtcaaattgacgttgaacactccactaccatggttacctcttcgtggctacgtgaaaaattcgtgttgacggctttactgaccggaagggccagcaacgtcgtcgtcctgcgggtgcggagttgccggctgcgactgggctgcgtgcacgtaaccaccg

SEQ ID NO: 83605 - DNA, 1556 bp, Zea Mays
ggcacgtgtcggcacgcatgagaggctggagccgtgaaatgcggagggagcgtgaaaccccagcgggttttagcaagaagtaatatggattaaacgaagaggagcgatgagcccacgagtttaagtttagatcaggtctaaagttcggatatcaaatccggatgcacgatgatgcacccgctctgaacccaacccaccgccatttctatacccctctcgccctgcgccccgtcacctctctggtccctctcctcttgctttgatgctttctctctccatctcgtttcccccgcctgcccagccagcgcaaaccctagcccgtactgcgaggctcttggcagcggataactggacctgtccgcatgaatcgggggagagaaactggcggtaacttacgtgaatcgggtttgtttagtggctgcgacggcgacggcggcgcagggatggaccgtaagcgcattaaggacgtgctcgagaagcacctggagaggtcgtcgccgtccacctccaggggcgtcgtgtccaaggagagggagcgcctcgctgccgggaaactgccggcgtcgcttggcaaggcggagaaggtgtctgatggtgaggaatttgaaactgacagtgaagatgaagattctgatatcagtggttctgagagcgagggcacatcctggatttcatggttctgtacattgcgaggtgccatattatgattatgcacttgatctcatcttagacattgagtcttctgatggtgagattgttgttccttaaggaagttgatgcatattggtttgcctttgaatttatgatacatacactgaggagcgaaaagaatttatcgagttgtctgcagagatactatatggattaattcatgcacgatacatcttaaccagcaagggtctagctgcaatgttggagaagttcaagaatcgtgactttggtggatgccccagagtgtactgctgtggccagccctgtcttccagcaggtcaatcggatgttcctagatcgagcacagtgaagatatactgtccaaaatgcgaagaacttaactatccaatatccatgtaccaaggcacctggtgaaccacactgaacatttcccccctgattacttgcctcaagtcctcaatttttttgcattgatggatcatacttcgggacgacgttccctcatcttttcctgatgacctatccgcacttgaagccgcagaagccgccacagcaatacactccaagagttttcggcttcaaacatcacaagccgtcatgacagagctgcactttcagcagaaacaccctttgcacctaggatttagggagagcaccgtggccttcaaatattgttgcctgatcgatgtacgaattcgcgaccttgggtcctgctgcaaactgctgtcaaattgacgttgaacactccactaccatggttacctcttcgtggctacgtgaaaaattcgtgttgacggctttactgaccggaagggccagcaacgtcgtcgtcctgcgggtgcggagttgccggctgcgactgggctgcgtgcacgtaaccaccg

SEQ ID NO: 83606 - DNA, 794 bp, Zea Mays
aattaatgatacaatagtcgaaacatactcataaattatccatctagattggagcgaggtgccatatcaggttatgggctgtcatgtgggaccaccggtatacccacctgacccatgccagggacacgcagtgcacgcaggaagtgccttcgaactacctgacagtctcgttcaagctatatgatatggatagcacagggtttattgaacggaaggaggttaagcagatgttaattgctcttctaggagaatcagaaatgaggctatctgatgatatcattgagacaatcctggataagacattctctgatgctgatgcaaatcaggatgggaaaatagatagaacagagtgggagaattttgtcacaagaaatccttccttgatgaagataatgactctgccatacctcaattaacaaggagaacctgtcgagggttacgactggagatttctagcctctggcattatgaatggagggtatattcatgcggctaccaggaagggtgcgtcaaaattgtctgccacagatgtacttgacgagctgtagtttttactcggtgataatgttgatgcttttgtgttggtgatgattgggacttgagttagtatgctgagatgaacatttttcatttttaccagtgggaagtctctattttgtttgtgaaactgcgacgtgcgtgtctgtactgatcaaatatgattcttgtcaaagtagtactgcattctactattttagcgtaaaataaacctcgaagtcccaaaacttgcatcacatgtcattgaagtctctgag

SEQ ID NO: 83607 - DNA, 1589 bp, Zea Mays
aattaatgatacaatagtcgaaacatactcataaattatccatctagattggagcgaggtgccatatcaggttatgggctgtcatgtgggaccaccggtatacccacctgacccatgccagggacacgcagtgcacgcaggaagtgccgtaagctaatggtcaccacaacgagaaaaccatcgtgcctcgatttgaggagcttttccatctatgtttgttagaagggcttctgggaaacaatccccatgccattacagactgagattacgaactccgtggccagggtccagctaccatgaaccccgatgccctttacatgggcgtacaacaatgaaatacctgtccaaaatactcataagttatctgtctagattggagtgagatgccatctcagattatgggcgtacaacaacaaaataccttctcaaaaataagctattgtatctggtgccattcatattgtggataagctaaatttgaactgcataattagaggaagtgtatggactatggagtgagatgccatctcagattatgggcgtacaacaacaaaatacctgttaaaaaacaagctattgtatccggtgccattcatattgcggataagctaaatttgaactgcataattagaggaagtgtatttcggttccatatttatttcaaacatcatgttataaaaagtttttgaaatgtcatgcagaattaccactttatgccattgagaaatgaaattttgtggacataaaaaccaattagtgattaatctttgccatcattgtatattacacaggaagaattccagttagcattatttaagaatcagaggaaagaaaatcttttcgctaatcggatatttgaccttttcgatgtcaagaaaaggggtgccattgattttggtgactttgtccgagctctaaatgtgtttcatccaaatatcccaatggatgaaaaaattgatttctcgttcaagctatatgatatggatagcacagggtttattgaacggaaggaggttaagcagatgttaattgctcttctaggagaatcagaaatgaggctatctgatgatatcattgagacaatcctggataagacattctctgatgctgatgcaaatcaggatgggaaaatagatagaacagagtgggagaattttgtcacaagaaatccttccttgatgaagataatgactctgccatacctcaattaacaaggagaacctgtcgagggttacgactggagatttctagcctctggcattatgaatggagggtatattcatgcggctaccaggaagggtgcgtcaaaattgtctgccacagatgtacttgacgagctgtagtttttactcggtgataatgttgatgcttttgtgttggtgatgattgggacttgagttagtatgctgagatgaacatttttcatttttaccagtgggaagtctctattttgtttgtgaaactgcgacgtgcgtgtctgtactgatcaaatatgattcttgtcaaagtagtactgcattctactattttagcgtaaaataaacctcgaagtcccaaaacttgcatcacatgtcattgaagtctctgag

SEQ ID NO: 83608 - DNA, 2173 bp, Zea Mays
atagccgcacggtgcgctgtcgcgtgccgaatcgcttgtgccgtcgtgcggtttcgtctcatctccctttttcgccgcacgccttggcccttttccagtagaagaagcgtcgaaggggacgcgcacatgcgccggcgtggcagagactgacccggccccaaggccgatcaggggaagggcggccgcccctgcctcccggggccagggggctgagctccccgcctcgtctcggcctggcctggttcgccctcgctccgacgcgtggtggacgcaaccagtgcgcgacgcccccggctcctggtccgttccgcagttccgcaccccgcttcgaccaaccaatcgccgccgcgtcgcgtcgcgtcgcctccttttttttccccgccctcccggacggcggcctcgttcgccagaagaaacccaggctgcagccgaaatcctcaagtctccgtcgtctgaccccacctcgacggcccagatccactcgccctcgccgccctcgtgcccctcagtccctcactccctcgcctcctcagcggcgaagacagctgcgaacggggccatttttaggcgggagcgcgggcggcggtgctagcagattggttggtttgagtggttgggccggctcttcgaaacgccccgcggcggcgatgggatgcttccattccacggccaagcggcagcatcctggctacgaggaccccgtggacctcgcctcccagacctccttcagtgttagtgaggttgaggctctattcgagctgttcaagagcataagtggttcagtgattgacgatggcctgatcaacaagggcttctgggaaacaatccccatgccattacagactgagattacgaactccgtggccagggtccagctaccatgaaccccgatgccctttacatgggcgtacaacaatgaaatacctgtccaaaatactcataagttatctgtctagattggagtgagatgccatctcagattatgggcgtacaacaacaaaataccttctcaaaaataagctattgtatctggtgccattcatattgtggataagctaaatttgaactgcataattagaggaagtgtatggactatggagtgagatgccatctcagattatgggcgtacaacaacaaaatacctgttaaaaaacaagctattgtatccggtgccattcatattgcggataagctaaatttgaactgcataattagaggaagtgtatttcggttccatatttatttcaaacatcatgttataaaaagtttttgaaatgtcatgcagaattaccactttatgccattgagaaatgaaattttgtggacataaaaaccaattagtgattaatctttgccatcattgtatattacacaggaagaattccagttagcattatttaagaatcagaggaaagaaaatcttttcgctaatcggatatttgaccttttcgatgtcaagaaaaggggtgccattgattttggtgactttgtccgagctctaaatgtgtttcatccaaatatcccaatggatgaaaaaattgatttctcgttcaagctatatgatatggatagcacagggtttattgaacggaaggaggttaagcagatgttaattgctcttctaggagaatcagaaatgaggctatctgatgatatcattgagacaatcctggataagacattctctgatgctgatgcaaatcaggatgggaaaatagatagaacagagtgggagaattttgtcacaagaaatccttccttgatgaagataatgactctgccatacctcaattaacaaggagaacctgtcgagggttacgactggagatttctagcctctggcattatgaatggagggtatattcatgcggctaccaggaagggtgcgtcaaaattgtctgccacagatgtacttgacgagctgtagtttttactcggtgataatgttgatgcttttgtgttggtgatgattgggacttgagttagtatgctgagatgaacatttttcatttttaccagtgggaagtctctattttgtttgtgaaactgcgacgtgcgtgtctgtactgatcaaatatgattcttgtcaaagtagtactgcattctactattttagcgtaaaataaacctcgaagtcccaaaacttgcatcacatgtcattgaagtctctgag

SEQ ID NO: 83609 - DNA, 1645 bp, Zea Mays
atagccgcacggtgcgctgtcgcgtgccgaatcgcttgtgccgtcgtgcggtttcgtctcatctccctttttcgccgcacgccttggcccttttccagtagaagaagcgtcgaaggggacgcgcacatgcgccggcgtggcagagactgacccggccccaaggccgatcaggggaagggcggccgcccctgcctcccggggccagggggctgagctccccgcctcgtctcggcctggcctggttcgccctcgctccgacgcgtggtggacgcaaccagtgcgcgacgcccccggctcctggtccgttccgcagttccgcaccccgcttcgaccaaccaatcgccgccgcgtcgcgtcgcgtcgcctccttttttttccccgccctcccggacggcggcctcgttcgccagaagaaacccaggctgcagccgaaatcctcaagtctccgtcgtctgaccccacctcgacggcccagatccactcgccctcgccgccctcgtgcccctcagtccctcactccctcgcctcctcagcggcgaagacagctgcgaacggggccatttttaggcgggagcgcgggcggcggtgctagcagattggttggtttgagtggttgggccggctcttcgaaacgccccgcggcggcgatgggatgcttccattccacggccaagcggcagcatcctggctacgaggaccccgtggacctcgcctcccagacctccttcagtgttagtgaggttgaggctctattcgagctgttcaagagcataagtggttcagtgattgacgatggcctgatcaacaagattggagcgaggtgccatatcaggttatgggctgtcatgtgggaccaccggtatacccacctgacccatgccagggacacgcagtgcacgcaggaagtgccttcgaactacctgacagtctcgttcaagctatatgatatggatagcacagggtttattgaacggaaggaggttaagcagatgttaattgctcttctaggagaatcagaaatgaggctatctgatgatatcattgagacaatcctggataagacattctctgatgctgatgcaaatcaggatgggaaaatagatagaacagagtgggagaattttgtcacaagaaatccttccttgatgaagataatgactctgccatacctcaaggacatcacaacaacattccccagctttgtgtttaactctgaagtcgatgatctcgtcacgtgaccacgattttctctccgatgtatagttaacaaggagaacctgtcgagggttacgactggagatttctagcctctggcattatgaatggagggtatattcatgcggctaccaggaagggtgcgtcaaaattgtctgccacagatgtacttgacgagctgtagtttttactcggtgataatgttgatgcttttgtgttggtgatgattgggacttgagttagtatgctgagatgaacatttttcatttttaccagtgggaagtctctattttgtttgtgaaactgcgacgtgcgtgtctgtactgatcaaatatgattcttgtcaaagtagtactgcattctactattttagcgtaaaataaacctcgaagtcccaaaacttgcatcacatgtcattgaagtctctgag

SEQ ID NO: 83610 - DNA, 2169 bp, Zea Mays
atagccgcacggtgcgctgtcgcgtgccgaatcgcttgtgccgtcgtgcggtttcgtctcatctccctttttcgccgcacgccttggcccttttccagtagaagaagcgtcgaaggggacgcgcacatgcgccggcgtggcagagactgacccggccccaaggccgatcaggggaagggcggccgcccctgcctcccggggccagggggctgagctccccgcctcgtctcggcctggcctggttcgccctcgctccgacgcgtggtggacgcaaccagtgcgcgacgcccccggctcctggtccgttccgcagttccgcaccccgcttcgaccaaccaatcgccgccgcgtcgcgtcgcgtcgcctccttttttttccccgccctcccggacggcggcctcgttcgccagaagaaacccaggctgcagccgaaatcctcaagtctccgtcgtctgaccccacctcgacggcccagatccactcgccctcgccgccctcgtgcccctcagtccctcactccctcgcctcctcagcggcgaagacagctgcgaacggggccatttttaggcgggagcgcgggcggcggtgctagcagattggttggtttgagtggttgggccggctcttcgaaacgccccgcggcggcgatgggatgcttccattccacggccaagcggcagcatcctggctacgaggaccccgtggacctcgcctcccagacctccttgttagtgaggttgaggctctattcgagctgttcaagagcataagtggttcagtgattgacgatggcctgatcaacaagggcttctgggaaacaatccccatgccattacagactgagattacgaactccgtggccagggtccagctaccatgaaccccgatgccctttacatgggcgtacaacaatgaaatacctgtccaaaatactcataagttatctgtctagattggagtgagatgccatctcagattatgggcgtacaacaacaaaataccttctcaaaaataagctattgtatctggtgccattcatattgtggataagctaaatttgaactgcataattagaggaagtgtatggactatggagtgagatgccatctcagattatgggcgtacaacaacaaaatacctgttaaaaaacaagctattgtatccggtgccattcatattgcggataagctaaatttgaactgcataattagaggaagtgtatttcggttccatatttatttcaaacatcatgttataaaaagtttttgaaatgtcatgcagaattaccactttatgccattgagaaatgaaattttgtggacataaaaaccaattagtgattaatctttgccatcattgtatattacacaggaagaattccagttagcattatttaagaatcagaggaaagaaaatcttttcgctaatcggatatttgaccttttcgatgtcaagaaaaggggtgccattgattttggtgactttgtccgagctctaaatgtgtttcatccaaatatcccaatggatgaaaaaattgatttctcgttcaagctatatgatatggatagcacagggtttattgaacggaaggaggttaagcagatgttaattgctcttctaggagaatcagaaatgaggctatctgatgatatcattgagacaatcctggataagacattctctgatgctgatgcaaatcaggatgggaaaatagatagaacagagtgggagaattttgtcacaagaaatccttccttgatgaagataatgactctgccatacctcaattaacaaggagaacctgtcgagggttacgactggagatttctagcctctggcattatgaatggagggtatattcatgcggctaccaggaagggtgcgtcaaaattgtctgccacagatgtacttgacgagctgtagtttttactcggtgataatgttgatgcttttgtgttggtgatgattgggacttgagttagtatgctgagatgaacatttttcatttttaccagtgggaagtctctattttgtttgtgaaactgcgacgtgcgtgtctgtactgatcaaatatgattcttgtcaaagtagtactgcattctactattttagcgtaaaataaacctcgaagtcccaaaacttgcatcacatgtcattgaagtctctgag

SEQ ID NO: 83611 - DNA, 1527 bp, Zea Mays
atagccgcacggtgcgctgtcgcgtgccgaatcgcttgtgccgtcgtgcggtttcgtctcatctccctttttcgccgcacgccttggcccttttccagtagaagaagcgtcgaaggggacgcgcacatgcgccggcgtggcagagactgacccggccccaaggccgatcaggggaagggcggccgcccctgcctcccggggccagggggctgagctccccgcctcgtctcggcctggcctggttcgccctcgctccgacgcgtggtggacgcaaccagtgcgcgacgcccccggctcctggtccgttccgcagttccgcaccccgcttcgaccaaccaatcgccgccgcgtcgcgtcgcgtcgcctccttttttttccccgccctcccggacggcggcctcgttcgccagaagaaacccaggctgcagccgaaatcctcaagtctccgtcgtctgaccccacctcgacggcccagatccactcgccctcgccgccctcgtgcccctcagtccctcactccctcgcctcctcagcggcgaagacagctgcgaacggggccatttttaggcgggagcgcgggcggcggtgctagcagattggttggtttgagtggttgggccggctcttcgaaacgccccgcggcggcgatgggatgcttccattccacggccaagcggcagcatcctggctacgaggaccccgtggacctcgcctcccagacctccttcagtgttagtgaggttgaggctctattcgagctgttcaagagcataagtggttcagtgattgacgatggcctgatcaacaagtctcgttcaagctatatgatatggatagcacagggtttattgaacggaaggaggttaagcagatgttaattgctcttctaggagaatcagaaatgaggctatctgatgatatcattgagacaatcctggataagacattctctgatgctgatgcaaatcaggatgggaaaatagatagaacagagtgggagaattttgtcacaagaaatccttccttgatgaagataatgactctgccatacctcaaggacatcacaacaacattccccagctttgtgtttaactctgaagtcgatgatctcgtcacgtgaccacgattttctctccgatgtatagttaacaaggagaacctgtcgagggttacgactggagatttctagcctctggcattatgaatggagggtatattcatgcggctaccaggaagggtgcgtcaaaattgtctgccacagatgtacttgacgagctgtagtttttactcggtgataatgttgatgcttttgtgttggtgatgattgggacttgagttagtatgctgagatgaacatttttcatttttaccagtgggaagtctctattttgtttgtgaaactgcgacgtgcgtgtctgtactgatcaaatatgattcttgtcaaagtagtactgcattctactattttagcgtaaaataaacctcgaagtcccaaaacttgcatcacatgtcattgaagtctctgag

SEQ ID NO: 83612 - DNA, 1692 bp, Zea Mays
atagccgcacggtgcgctgtcgcgtgccgaatcgcttgtgccgtcgtgcggtttcgtctcatctccctttttcgccgcacgccttggcccttttccagtagaagaagcgtcgaaggggacgcgcacatgcgccggcgtggcagagactgacccggccccaaggccgatcaggggaagggcggccgcccctgcctcccggggccagggggctgagctccccgcctcgtctcggcctggcctggttcgccctcgctccgacgcgtggtggacgcaaccagtgcgcgacgcccccggctcctggtccgttccgcagttccgcaccccgcttcgaccaaccaatcgccgccgcgtcgcgtcgcgtcgcctccttttttttccccgccctcccggacggcggcctcgttcgccagaagaaacccaggctgcagccgaaatcctcaagtctccgtcgtctgaccccacctcgacggcccagatccactcgccctcgccgccctcgtgcccctcagtccctcactccctcgcctcctcagcggcgaagacagctgcgaacggggccatttttaggcgggagcgcgggcggcggtgctagcagattggttggtttgagtggttgggccggctcttcgaaacgccccgcggcggcgatgggatgcttccattccacggccaagcggcagcatcctggctacgaggaccccgtggacctcgcctcccagacctccttgttagtgaggttgaggctctattcgagctgttcaagagcataagtggttcagtgattgacgatggcctgatcaacaaggaagaattccagttagcattatttaagaatcagaggaaagaaaatcttttcgctaatcggatatttgaccttttcgatgtcaagaaaaggggtgccattgattttggtgactttgtccgagctctaaatgtgtttcatccaaatatcccaatggatgaaaaaattgatttctcgttcaagctatatgatatggatagcacagggtttattgaacggaaggaggttaagcagatgttaattgctcttctaggagaatcagaaatgaggctatctgatgatatcattgagacaatcctggataagacattctctgatgctgatgcaaatcaggatgggaaaatagatagaacagagtgggagaattttgtcacaagaaatccttccttgatgaagataatgactctgccatacctcaaggacatcacaacaacattccccagctttgtgtttaactctgaagtcgatgatctcgtcacgtgaccacgattttctctccgatgtatagttaacaaggagaacctgtcgagggttacgactggagatttctagcctctggcattatgaatggagggtatattcatgcggctaccaggaagggtgcgtcaaaattgtctgccacagatgtacttgacgagctgtagtttttactcggtgataatgttgatgcttttgtgttggtgatgattgggacttgagttagtatgctgagatgaacatttttcatttttaccagtgggaagtctctattttgtttgtgaaactgcgacgtgcgtgtctgtactgatcaaatatgattcttgtcaaagtagtactgcattctactattttagcgtaaaataaacctcgaagtcccaaaacttgcatcacatgtcattgaagtctctgag

SEQ ID NO: 83613 - DNA, 903 bp, Zea Mays
ctccgtgtggcaccgacggcatgacctgtcgtgccggcggagatgaagtcttggcgtcaatcacaacaatagttctgggtttctttgtattcttattgatgatctgattaaatcagagatatattcagactatgtgcaggcgcatcttgcccctagtggttacctaaagatacccactgatatggaagattatttgaagggttgcaaatttcttccaaaacttaacaatgagatcccaagtgcaagaaatactacctataaagaaagattcagcagcttggaaaacttggtactgatcatgtttgaggacgatgcagtattaatacctcgggaaacagcgtggtttggttattaccctgatggagcctttagcccagtgctgccccctcaagagacgaagctgtatacagaagattggattggcttgaagaccctggacgaggctgggcgtgttaaattcgtgtctgtgccaggaggtcacctgcgtatcaccagaagcgacatgaagaagtacattgtgccttacttgacgccggaggcgtcatccaagaagaacatacacatacaccggatgctgtcgctttgagcgagtatctaacaaggtttgtatcggtggccattgtgccctgacacgtgggccatgtgttgacgccttgtaaatacgctgaacacgaagggaggaaatgatagctccttggaagagtggatccgaacttgtgaagtgaagcgtgtttggtcctttccgtttcctatctgacaaacaaatatgtccatgccgtggccacaacacgcataaatcattatgcacatttcctattgagtaaaatacaattccggtctgtaaacttgtcgaaccatgtcatgccggttcataaacctttaaaatatgtttcttaaatgctt

SEQ ID NO: 83614 - DNA, 1024 bp, Zea Mays
taccatgttcgagtagacacactaaccagttgaacccaaatgcttaaactgttagaagtgaaattggaagaggagcatgggactcttggttaatgccacttcaagagcaggcaaatacggtttgtaagaaggtcaagaaaatgaaagagctcagtgaaggttacaatatagttggcctgtctcaggggaacttaattggcagggctgtaatcgagtactgtgattgtggacctccggtcaagaatttcatatcaattgggggtcctcatgctggtacagcttcagtgccactttgtggtgatatggaagattatttgaagggttgcaaatttcttccaaaacttaacaatgagatcccaagtgcaagaaatactacctataaagaaagattcagcagcttggaaaacttggtactgatcatgtttgaggacgatgcagtattaatacctcgggaaacagcgtggtttggttattaccctgatggagcctttagcccagtgctgccccctcaagagacgaagctgtatacagaagattggattggcttgaagaccctggacgaggctgggcgtgttaaattcgtgtctgtgccaggaggtcacctgcgtatcaccagaagcgacatgaagaagtacattgtgccttacttgacgccggaggcgtcatccaagaagaacatacacatacaccggatgctgtcgctttgagcgagtatctaacaaggtttgtatcggtggccattgtgccctgacacgtgggccatgtgttgacgccttgtaaatacgctgaacacgaagggaggaaatgatagctccttggaagagtggatccgaacttgtgaagtgaagcgtgtttggtcctttccgtttcctatctgacaaacaaatatgtccatgccgtggccacaacacgcataaatcattatgcacatttcctattgagtaaaatacaattccggtctgtaaacttgtcgaaccatgtcatgccggttcataaacctttaaaatatgtttcttaaatgctt

SEQ ID NO: 83615 - DNA, 1215 bp, Zea Mays
caaagagaaaggtgcaaacgtggaaataaaggagtggaggcacaataaagcctctagcaggattcgaactcgaggcctctggttttaataccatgttcgagtagacacactaaccagttgaacccaaatgcttaaactgttagaagtgaaattggaagaggagcatgggactcttggttaatgccacttcaagagcaggcaaatacggtttgtaagaaggtcaagaaaatgaaagagctcagtgaaggttacaatatagttggcctgtctcaggggaacttaattggcagggctgtaatcgagtactgtgattgtggacctccggtcaagaatttcatatcaattgggggtcctcatgctggtacagcttcagtgccactttgtgtctgggtttctttgtattcttattgatgatctgattaaatcagagatatattcagactatgtgcaggcgcatcttgcccctagtggttacctaaagatacccactgatatggaagattatttgaagggttgcaaatttcttccaaaacttaacaatgagatcccaagtgcaagaaatactacctataaagaaagattcagcagcttggaaaacttggtactgatcatgtttgaggacgatgcagtattaatacctcgggaaacagcgtggtttggttattaccctgatggagcctttagcccagtgctgccccctcaagagacgaagctgtatacagaagattggattggcttgaagaccctggacgaggctgggcgtgttaaattcgtgtctgtgccaggaggtcacctgcgtatcaccagaagcgacatgaagaagtacattgtgccttacttgacgccggaggcgtcatccaagaagaacatacacatacaccggatgctgtcgctttgagcgagtatctaacaaggtttgtatcggtggccattgtgccctgacacgtgggccatgtgttgacgccttgtaaatacgctgaacacgaagggaggaaatgatagctccttggaagagtggatccgaacttgtgaagtgaagcgtgtttggtcctttccgtttcctatctgacaaacaaatatgtccatgccgtggccacaacacgcataaatcattatgcacatttcctattgagtaaaatacaattccggtctgtaaacttgtcgaaccatgtcatgccggttcataaacctttaaaatatgtttcttaaatgctt

SEQ ID NO: 83616 - DNA, 1096 bp, Zea Mays
agaaggatgtgacacaaaacaagagtgaaattggaagaggagcatgggactcttggttaatgccacttcaagagcaggcaaatacggtttgtaagaaggtcaagaaaatgaaagagctcagtgaaggttacaatatagttggcctgtctcaggggaacttaattggcagggctgtaatcgagtactgtgattgtggacctccggtcaagaatttcatatcaattgggggtcctcatgctggtacagcttcagtgccactttgtggttctgggtttctttgtattcttattgatgatctgattaaatcagagatatattcagactatgtgcaggcgcatcttgcccctagtggttacctaaagatacccactgatatggaagattatttgaagggttgcaaatttcttccaaaacttaacaatgagatcccaagtgcaagaaatactacctataaagaaagattcagcagcttggaaaacttggtactgatcatgtttgaggacgatgcagtattaatacctcgggaaacagcgtggtttggttattaccctgatggagcctttagcccagtgctgccccctcaagagacgaagctgtatacagaagattggattggcttgaagaccctggacgaggctgggcgtgttaaattcgtgtctgtgccaggaggtcacctgcgtatcaccagaagcgacatgaagaagtacattgtgccttacttgacgccggaggcgtcatccaagaagaacatacacatacaccggatgctgtcgctttgagcgagtatctaacaaggtttgtatcggtggccattgtgccctgacacgtgggccatgtgttgacgccttgtaaatacgctgaacacgaagggaggaaatgatagctccttggaagagtggatccgaacttgtgaagtgaagcgtgtttggtcctttccgtttcctatctgacaaacaaatatgtccatgccgtggccacaacacgcataaatcattatgcacatttcctattgagtaaaatacaattccggtctgtaaacttgtcgaaccatgtcatgccggttcataaacctttaaaatatgtttcttaaatgctt

SEQ ID NO: 83617 - DNA, 1134 bp, Zea Mays
aaaaaagaaggatgtgacacaaaacaagagtgaaattggaagaggagcatgggactcttggttaatgccacttcaagagcaggcaaatacggtttgtaagaaggtcaagaaaatgaaagagctcagtgaaggttacaatatagttggcctgtctcaggggaacttaattggcagggctgtaatcgagtactgtgattgtggacctccggtcaagaatttcatatcaattgggggtcctcatgctggtacagcttcagtgccactttgtggttctgggtttctttgtattcttattgatgatctgattaaatcagagatatattcagactatgtgcagtaagtaaatgaattgagggttgtgaaattacaggcgcatcttgcccctagtggttacctaaagatacccactgatatggaagattatttgaagggttgcaaatttcttccaaaacttaacaatgagatcccaagtgcaagaaatactacctataaagaaagattcagcagcttggaaaacttggtactgatcatgtttgaggacgatgcagtattaatacctcgggaaacagcgtggtttggttattaccctgatggagcctttagcccagtgctgccccctcaagagacgaagctgtatacagaagattggattggcttgaagaccctggacgaggctgggcgtgttaaattcgtgtctgtgccaggaggtcacctgcgtatcaccagaagcgacatgaagaagtacattgtgccttacttgacgccggaggcgtcatccaagaagaacatacacatacaccggatgctgtcgctttgagcgagtatctaacaaggtttgtatcggtggccattgtgccctgacacgtgggccatgtgttgacgccttgtaaatacgctgaacacgaagggaggaaatgatagctccttggaagagtggatccgaacttgtgaagtgaagcgtgtttggtcctttccgtttcctatctgacaaacaaatatgtccatgccgtggccacaacacgcataaatcattatgcacatttcctattgagtaaaatacaattccggtctgtaaacttgtcgaaccatgtcatgccggttcataaacctttaaaatatgtttcttaaatgctt

SEQ ID NO: 83618 - DNA, 991 bp, Zea Mays
tataatagcaaggagacaacaatcttgaaattggaagaggagcatgggactcttggttaatgccacttcaagagcaggcaaatacggtttgtaagaaggtcaagaaaatgaaagagctcagtgaaggttacaatatagttggcctgtctcaggggaacttaattggcagggctgtaatcgagtactgtgattgtggacctccggtcaagaatttcatatcaattgggggtcctcatgctggtacagcttcagtgccactttgtggtgatatggaagattatttgaagggttgcaaatttcttccaaaacttaacaatgagatcccaagtgcaagaaatactacctataaagaaagattcagcagcttggaaaacttggtactgatcatgtttgaggacgatgcagtattaatacctcgggaaacagcgtggtttggttattaccctgatggagcctttagcccagtgctgccccctcaagagacgaagctgtatacagaagattggattggcttgaagaccctggacgaggctgggcgtgttaaattcgtgtctgtgccaggaggtcacctgcgtatcaccagaagcgacatgaagaagtacattgtgccttacttgacgccggaggcgtcatccaagaagaacatacacatacaccggatgctgtcgctttgagcgagtatctaacaaggtttgtatcggtggccattgtgccctgacacgtgggccatgtgttgacgccttgtaaatacgctgaacacgaagggaggaaatgatagctccttggaagagtggatccgaacttgtgaagtgaagcgtgtttggtcctttccgtttcctatctgacaaacaaatatgtccatgccgtggccacaacacgcataaatcattatgcacatttcctattgagtaaaatacaattccggtctgtaaacttgtcgaaccatgtcatgccggttcataaacctttaaaatatgtttcttaaatgctt

SEQ ID NO: 83619 - DNA, 1437 bp, Zea Mays
cgcgaaacgcgccaacaaccagatcaatggagtgaggcagtgactcagctcagggcctcgggcccagcacaccaaccctccagtagtatctctgacgtgcgggctccgccagacaacgagctcacgagtcacgatccaaatcccttttccactccgccggacgtcgagagaggcggtgggtgcgggacgcgaaggcgaagccctagccccctccctgccgcggacgccgatggacccacctcgcgccgtcgcctttcttctcatactcctgcccgtgctcgccccggtggcctccggtgtacctttcgtcgtcctacacgggattggcgacgagtgcgggaacgatgggctgtcatccttcaccaagatgcttggggagtggtcaggctccaagggttactgcattgaaattggaagaggagcatgggactcttggttaatgccacttcaagagcaggcaaatacggtttgtaagaaggtcaagaaaatgaaagagctcagtgaaggttacaatatagttggcctgtctcaggggaacttaattggcagggctgtaatcgagtactgtgattgtggacctccggtcaagaatttcatatcaattgggggtcctcatgctggtacagcttcagtgccactttgtggttctgggtttctttgtattcttattgatgatctgattaaatcagagatatattcagactatgtgcaggatatggaagattatttgaagggttgcaaatttcttccaaaacttaacaatgagatcccaagtgcaagaaatactacctataaagaaagattcagcagcttggaaaacttggtactgatcatgtttgaggacgatgcagtattaatacctcgggaaacagcgtggtttggttattaccctgatggagcctttagcccagtgctgccccctcaagagacgaagctgtatacagaagattggattggcttgaagaccctggacgaggctgggcgtgttaaattcgtgtctgtgccaggaggtcacctgcgtatcaccagaagcgacatgaagaagtacattgtgccttacttgacgccggaggcgtcatccaagaagaacatacacatacaccggatgctgtcgctttgagcgagtatctaacaaggtttgtatcggtggccattgtgccctgacacgtgggccatgtgttgacgccttgtaaatacgctgaacacgaagggaggaaatgatagctccttggaagagtggatccgaacttgtgaagtgaagcgtgtttggtcctttccgtttcctatctgacaaacaaatatgtccatgccgtggccacaacacgcataaatcattatgcacatttcctattgagtaaaatacaattccggtctgtaaacttgtcgaaccatgtcatgccggttcataaacctttaaaatatgtttcttaaatgctt

SEQ ID NO: 83620 - DNA, 1385 bp, Zea Mays
gcgtcactcatcaacgcgaaacgcgccaacaaccagatcaatggagtgaggcagtgactcagctcagggcctcgggcccagcacaccaaccctccagtagtatctctgacgtgcgggctccgccagacaacgagctcacgagtcacgatccaaatcccttttccactccgccggacgtcgagagaggcggtgggtgcgggacgcgaaggcgaagccctagccccctccctgccgcggacgccgatggacccacctcgcgccgtcgcctttcttctcatactcctgcccgtgctcgccccggtggcctccggtgtacctttcgtcgtcctacacgggattggcgacgagtgcgggaacgatgggctgtcatccttcaccaagatgcttggggagtggtcaggctccaagggttactgcattgaaattggaagaggagcatgggactcttggttaatgccacttcaagagcaggcaaatacggtttgtaagaaggtcaagaaaatgaaagagctcagtgaaggttacaatatagttggcctgtctcaggggaacttaattggcagggctgtaatcgagtactgtgattgtggacctccggtcaagaatttcatatcaattgggggtcctcatgctggtacagcttcagtgccactttgtggtgatatggaagattatttgaagggttgcaaatttcttccaaaacttaacaatgagatcccaagtgcaagaaatactacctataaagaaagattcagcagcttggaaaacttggtactgatcatgtttgaggacgatgcagtattaatacctcgggaaacagcgtggtttggttattaccctgatggagcctttagcccagtgctgccccctcaagagacgaagctgtatacagaagattggattggcttgaagaccctggacgaggctgggcgtgttaaattcgtgtctgtgccaggaggtcacctgcgtatcaccagaagcgacatgaagaagtacattgtgccttacttgacgccggaggcgtcatccaagaagaacatacacatacaccggatgctgtcgctttgagcgagtatctaacaaggtttgtatcggtggccattgtgccctgacacgtgggccatgtgttgacgccttgtaaatacgctgaacacgaagggaggaaatgatagctccttggaagagtggatccgaacttgtgaagtgaagcgtgtttggtcctttccgtttcctatctgacaaacaaatatgtccatgccgtggccacaacacgcataaatcattatgcacatttcctattgagtaaaatacaattccggtctgtaaacttgtcgaaccatgtcatgccggttcataaacctttaaaatatgtttcttaaatgctt

SEQ ID NO: 83621 - DNA, 1483 bp, Zea Mays
gtttgctcgctctcgctcagtcggcgtcactcatcaacgcgaaacgcgccaacaaccagatcaatggagtgaggcagtgactcagctcagggcctcgggcccagcacaccaaccctccagtagtatctctgacgtgcgggctccgccagacaacgagctcacgagtcacgatccaaatcccttttccactccgccggacgtcgagagaggcggtgggtgcgggacgcgaaggcgaagccctagccccctccctgccgcggacgccgatggacccacctcgcgccgtcgcctttcttctcatactcctgcccgtgctcgccccggtggcctccggtgtacctttcgtcgtcctacacgggattggcgacgagtgcgggaacgatgggctgtcatccttcaccaagatgcttggggagtggtcaggctccaagggttactgcattgaaattggaagaggagcatgggactcttggttaatgccacttcaagagcaggcaaatacggtttgtaagaaggtcaagaaaatgaaagagctcagtgaaggttacaatatagttggcctgtctcaggggaacttaattggcagggctgtaatcgagtactgtgattgtggacctccgtctgggtttctttgtattcttattgatgatctgattaaatcagagatatattcagactatgtgcagtaagtaaatgaattgagggttgtgaaattacaggcgcatcttgcccctagtggttacctaaagatacccactgatatggaagattatttgaagggttgcaaatttcttccaaaacttaacaatgagatcccaagtgcaagaaatactacctataaagaaagattcagcagcttggaaaacttggtactgatcatgtttgaggacgatgcagtattaatacctcgggaaacagcgtggtttggttattaccctgatggagcctttagcccagtgctgccccctcaagagacgaagctgtatacagaagattggattggcttgaagaccctggacgaggctgggcgtgttaaattcgtgtctgtgccaggaggtcacctgcgtatcaccagaagcgacatgaagaagtacattgtgccttacttgacgccggaggcgtcatccaagaagaacatacacatacaccggatgctgtcgctttgagcgagtatctaacaaggtttgtatcggtggccattgtgccctgacacgtgggccatgtgttgacgccttgtaaatacgctgaacacgaagggaggaaatgatagctccttggaagagtggatccgaacttgtgaagtgaagcgtgtttggtcctttccgtttcctatctgacaaacaaatatgtccatgccgtggccacaacacgcataaatcattatgcacatttcctattgagtaaaatacaattccggtctgtaaacttgtcgaaccatgtcatgccggttcataaacctttaaaatatgtttcttaaatgctt

SEQ ID NO: 83622 - DNA, 870 bp, Zea Mays
cgcgaaacgcgccaacaaccagatcaatggagtgaggcagtgactcagctcagggcctcgggcccagcacaccaaccctccagtagtatctctgacgtgcgggctccgccagacaacgagctcacgagtcacgatccaaatcccttttccactccgccggacgtcgagagaggcggtgggtgcgggacgcgaaggcgaagccctagccccctccctgccgcggacgccgatggacccacctcgcgccgtcgcctttcttctcatactcctgcccgtgctcgccccggtggcctccggtgtacctttcgtcgtcctacacgggattggcgacgagtgcgggaacgatgggctgtcatccttcaccaagatgcttggggagtggtcaggctccaagggttactgcatgtgcattaggcgaagggtacttcggatccgacgcgctacagtctccgcttgactcgcttccataggggagagaaggcgagggcccgtggcagacgagaaggggggctcgctgcagcctcagacgtaccccgaaggccttcccttagacggcgaacgcccagtccaagcgaaggcaaggacatgacttcacagaatcaagggtgcgacacacgagcggaggcctcgacaggttacggagaaacccaggactccgccccgcagtcatctgggcccacttgtaaaccccttgcggggtagattttgtagtgcgtccgaattaccatactccgtccactgtaatgaccccgttagaggaatattttgggaatgtaacagtacttgggacccactacccctcccggttacctataaatacccctaccttgtacacagatgggacatgcataacaagacgctacagttctt

SEQ ID NO: 83623 - DNA, 937 bp, Zea Mays
aacgcgaaacgcgccaacaaccagatcaatggagtgaggcagtgactcagctcagggcctcgggcccagcacaccaaccctccagtagtatctctgacgtgcgggctccgccagacaacgagctcacgagtcacgatccaaatcccttttccactccgccggacgtcgagagaggcggtgggtgcgggacgcgaaggcgaagccctagccccctccctgccgcggacgccgatggacccacctcgcgccgtcgcctttcttctcatactcctgcccgtgctcgccccggtggcctccggtgtacctttcgtcgtcctacacgggattggcgacgagtgcgggaacgatgggctgtcatccttcaccaagatgcttggggagtggtcaggctccaagggttactgcatgaagaaccaaaaaagaaggatgtgacacaaaacaagaggtatgggaattggtttctgaaaaccaggtgcattaggcgaagggtacttcggatccgacgcgctacagtctccgcttgactcgcttccataggggagagaaggcgagggcccgtggcagacgagaaggggggctcgctgcagcctcagacgtaccccgaaggccttcccttagacggcgaacgcccagtccaagcgaaggcaaggacatgacttcacagaatcaagggtgcgacacacgagcggaggcctcgacaggttacggagaaacccaggactccgccccgcagtcatctgggcccacttgtaaaccccttgcggggtagattttgtagtgcgtccgaattaccatactccgtccactgtaatgaccccgttagaggaatattttgggaatgtaacagtacttgggacccactacccctcccggttacctataaatacccctaccttgtacacagatgggacatgcataacaagacgctacagttctt

SEQ ID NO: 83624 - DNA, 843 bp, Zea Mays
accattactacttcaccttgccaggccgcctgggcatgggttgccctcgagagcgaactgtcgtcgcaactctgtccatgaccttgctctttctcctagccgaccaagctggagttgtttcctgtcatccgtttcccgccgtagccgtagcggcgaagcatcagacggcggtgcaggtccgcaacctcctcatcgacaccaggaacgctgctggcatggcggcgtatggtgcggagaagacggaagaagcggcaccgccggacctatgctcgggggtcgtggcggtgtcccagggcagcgcgggaagcctctccaacggcaccccgtcctacagcgtgaccatcaccaacacttgtctaggctgcaccgtgcgcgacgtccacgtctcctgcggcgagttcgccgcccccacggagctcgtcgaccccagcgacttccgacgcttgtcgtacgacgactgcctcgtcaagaacggcggacccatgggccccggcgagaccatttccttcgagtactccaactctttcatctacaagatggacgtcgccacggtctcatgcggcgacgtataggtatagctagcaggtgttgtgtaccggcgtcgtgtcttgcaggcaccgtcttatttcctcacccgctgttggtaaataaaagtacggagtcgtagcgtagtagctagcagctcactagttcagtaaggatttggctttgttgggaagtcaagacgatagttgtatgagatgggcgttagactttgtttgggaaagcttctaagtgctctctaaatccatcaaaataactatataccttttttccccaagcacttctctatcgaagaatctg

SEQ ID NO: 83625 - DNA, 1791 bp, Zea Mays
gagaagccgaatcgcgagcccacccggccagggggcagatttcgtgctcctctcctccagtctccaccctccagcgccctccacttgcagaggttcgcgactcgcgacgcctccgcagccccagccccagccccacgccccgcgatccaaaccctagccccctccaccgtaccgccaccgtcatggccgaaccatccgccgccgccgtcaccgcagctgaggtcggggaggagtccgatgccgccgcgatggaggaggtcgcggcggccgcgaagaggtggccggggtggcccggggacagcgtgttccggctggtggtgccagtgctcaaggtcggaagcataatcgggcggaagggcgagctcatcaagcgccttgtcgaggggaccaaggccagagtccgcatcctcgagggccccgtcggcgccaccgagcgtatcgttttggtttctggaaaagaagatccaggcttggagctatctccagccatggatgctctcatgagagtttttaagcgtgtcattgggataacagatggagctgcggagggcactcaggctgctgctactcctggtgtatgtgctgcccgattgttggttcctggagctcaggcaattaacctaattgggaagcaaggtgccactatcaaagcaatccaggagagcacgggtgctacaatacgatgaacatgagagaccattttatgtaactgacgatgaaaggatagttgagatacagggcgatacagagaaagttctaaaagcactgcaagctgtttctaaccatcttcggaagtttttggttgaccatagtgtacttccattatttgaaaaaactaatactgcagtgagccaagatcacaatgttggttggagtgatatgtcacatccttcaattggttctgcacaagtgaatcaaccaccttcagtggtagatgaatatattcttccagtgaagagggatactttgtatcttgaacgagaaactttgttagatcataacattcatcgctcaggcgtatcactttatgggcgggatccagccttgtcaacactacgaccacctggaatacatggtgctggcccgctacttacacagataacccaaaccatgcaaatcccacttacctatgctgaagacattataggagttaaaggagcaaatattgcgtacatacgagctaatagtggagctgttgttacaattcaggagagtttgggtagtccagatgatattactgttgaaataaaggggacatcttcacaggtacaagctgcacagcagctcatccaggactcgttggctgcacaccgagaacctgtcagaagcagttatgtgggagcaggattagattcactgtataggtccagctactcacaatatggcagctccacctatccttcgtcatcactgccatcttattctagcatcgatgatgttagtaggtacccatcttcaggtcttggtggctatgggtcgagttacaggtactagtactagttcgtccttaggcttgaatgcttgatggcaccttgtatccattcctgggtgattattgtacaagtcagcaagttttctgctctgcgtgcttacgggcaggggatcattttacaagtcagcaagttctctgctttgtatgcttccgggcagggatctggtagattatactgcatcccaattcccagtacccagacttcggagtccaatttgctttgacaatggaatcggaaatcgtgcttgttaattcgatgattgcatctgtttataggatattcgtgctgttaaatcaca

SEQ ID NO: 83626 - DNA, 821 bp, Zea Mays
atcgacatcaggatctggttttaatgttggcttctttctcccttcttgaaagctcagtaagcatgtctgcgtaatttgaaaacaccatcaggttcacctaagcctggtaatgggtcacaatccggcctcaaccccactccaatcctataagttttaaaagtgaacccagccctacttaaatccaaattgatttgatacaactcaattcaatccgtttttcaataccccgacatcctaatccgtctcgatccttttaaaaatccacgggccaatccaagggccttcatatacaagcaagcaccaccacaagttaataaattattataatccatgggctcacaaacaaatgatagaaaacaacttgtaactgtgtagagaaatagaacttgacagccatgatcgatgagaaactgctccatgctaaaatgtttacaaagacgctccatgctaaaattcagtatttctacacagttggtgacattgatgcttgatgagaattataactcaaactgaattcagataactgaacttgacaatttagcattgcagtgacctcggaactcggatgggaacccgcctagttaccacatgcggagaggattcagttccagagctcaacaaatgatcatctgatgatcttgtggtcatcgagtgtcctctttctattcaataaactgttgtgtgtaacctgcatgcaaactatatagactgttaaactatatagactgttatacagagttgttccgagcacaaaatgatcaactttagttcatctaagtatatgagagcagtaaaacttcactaggataaaatataactgg

SEQ ID NO: 83627 - DNA, 386 bp, Zea Mays
gttatgtctagcaatggttagcaagaaagaagctgttgctgtgccatcgttctgcaagaagcaagctagcgtcaaatgattatcctagctagcgtcaattatagaagctagaattggtcataatgataggatggtacctgattactgttgataccaataactttatacgggtctattctctactaaggcgctattctattctctactcatagaaatcagacatgaaatcagattttttttttttttgcaactctgatttgaagaaatcagatttttttttcgagcagggccaaagggtatgatgcacaattcttaatttaactgcagattgcatataccggttgtgacacgcttcttttgtcctcctgagatacctctgatcatag

SEQ ID NO: 83628 - DNA, 730 bp, Zea Mays
agcaggaaagctgcacatctttatatatttagagagacgaaaaagtcttacaagaaagttccccaaatagagagaataaaaaagatctgatcatccattaagtacacttccaataatactgataataatagctagtgtacctattttcaaaaaaaaaaagattgtcaggtggattcatcacaaacgtataagaacaatcctcagttaatggatgcatattacaatcccaggtcagttgtcgctggtaaacatggaaacagtggtctcatcgtcctccctccctcactgcgccatgctccttcttggggatatatttttctctggaatgtgcaggatcttctgccagttctcgtgtccctctgattggcaggttctactgaggacgcggcacccatggatttcaaccttcgcaagcgaccggggcagggttggaaggcgctccatcctatcgcacctcataatcaatacactctggagcgaaacaaggggctccatattttctggcatgctgtcccagtcgcacaagctaactcgaagctcagtagctcacgcagacaactgaacagctcggtctcttcttcaggaaaagatgccaatcggttgcagttatggagctcaagctcttgcaggtacttcagcgctcctggactctggctactcagcatccagctagggtacctcgaacccttgtagcggttgattgtgagtgttgcaagatccttcggggggc

SEQ ID NO: 83629 - DNA, 1629 bp, Zea Mays
gcagcgtttattagccgtcacactcccacactcggcctgccgaggagaaactgaagatggttaggggctagaacgagcgagaggcggccgggaggagggaccgatttgtcgatggcgatcggggcgttcgtggagggcgctccggcggacggcggagaaggttacagcggccgcgtgacgcccttcgtggtgctgtcctgcgtcgtcgccggcagcggcggcgtcctcttcggatacgacctcggcatctccggtggtcttacctcaatggactgcttcctgaagagattcttcccaaaggtgtaccgtcagaagcaggacagcaaagtgagccactactgcgagttcaacagcgagctcctcaccgtcttcacgtcctccctctatatcgccggtcttgttgcaactctggctgcagcaaccatcacaaggaggtatggccgtcgcacatcaatgctgatcggcggcagtgtcttcatcgcgggctcagtgttcggtggtgcagccaccaatattcccatgctcctaatgaacaggattctactggggattggtctggggttcactaatcagtcaatcccattgtacctgtccgaaatggcgccaccccgataccgcggggcaatcaacaacggcttcgagctctgcatcagccttggcatcctgttcgcgaacgttctcaactatttcgtcataaaaatcacagcaggatggggatggaggatatccctgtccatggccgcactgcccgccgcattcctaaccatcggcgcgatcttcctccccgagacgccaagcttcataatccaacgtgacggcaacaacacggacaaggcaagggtgctgctccagaagctgcgcggaacggcctcggtccagaaagagctcgacgacctggtccgtgctagcgacctctcacgagcaacccggtacccattcaggagcatactcgagaggaagtacaggccgcagcttgtggtggcgctgctggtccctttcttcaaccaggctttgcgtggtcgtggggccctctcaccttcttggtccctgccgaggtttgcccgctggagatcaggtccgcggggcagagcatcgtggtcgctgtggttttcttgatgacgtttgtgattagccagacgtttcttgaggtcctctgccgcgtcaagtcggcgacgttcttcgtcttcggtggatggatctgcctgatgacgttgttcgtttatctgttcctgcctgagaccaagaagctgcccatggagcagatggagcaggtctggaagacacactggttctggaagaaggttgtgggagaggaagcggataggaaagaagcaggagcagggaatatagctttgtcgggcttgtcttagtcattttctgagtcgggtgtgtgtatgtgtatttgatcaaaactgcaaagaaaaacatagtatacgatcgcgacaagctgatgtaaatgtacatttgtatgtaaatcgagtaaacttatcagtctggcgttgttgccagttcctacaactaaccgttccaaatggtacaagagtacagaagcactaatataacaagaatgttgaaacgcactgctgtttcttctttcatgatcggccgtagaaggaaaatttacctaac

SEQ ID NO: 83630 - DNA, 1636 bp, Zea Mays
ctagtagtggaatactagtagtggcagcgtttattagccgtcacactcccacactcggcctgccgaggagaaactgaagatggttaggggctagaacgagcgagaggcggccgggaggagggaccgatttgtcgatggcgatcggggcgttcgtggagggcgctccggcggacggcggagaaggttacagcggccgcgtgacgcccttcgtggtgctgtcctgcgtcgtcgccggcagcggcggcgtcctcttcggatacgacctcggcatctccgtcaatcccattgtacctgtccgaaatggcgccaccccgataccgcggggcaatcaacaacggcttcgagctctgcatcagccttggcatcctgttcgcgaacgttctcaactatttcgtcataaaaatcacagcaggatggggatggaggatatccctgtccatggccgcactgcccgccgcattcctaaccatcggcgcgatcttcctccccgagacgccaagcttcataatccaacgtgacggcaacaacacggacaaggcaagggtgctgctccagaagctgcgcggaacggcctcggtccagaaagagctcgacgacctggtccgtgctagcgacctctcacgagcaacccggtacccattcaggagcatactcgagaggaagtacaggccgcagcttgtggtggcgctgctggtccctttcttcaaccaggttagcgggatcaacgtggtgaacttctacgcgccggtcatgttcaggacgatcggtctcaaggagagcgcgtccctcctgtcctcggtggtgacacgcctgtgcgcgacgtctgccaacgtcgtggcgatggtggtggtcgacagggttgggcgcaggaagctcttccttgccggcggcgtgcagatgatactttcgcagttcaccgtcggcgcgatcctggctgcgaagttcagggactacgaggagatgggtgatgggtacgcgtacctggtgctgaccacactgtgtgtgttcgttgcaggctttgcgtggtcgtggggccctctcaccttcttggtccctgccgaggtttgcccgctggagatcaggtccgcggggcagagcatcgtggtcgctgtggttttcttgatgacgtttgtgattagccagacgtttcttgaggtcctctgccgcgtcaagtcggcgacgttcttcgtcttcggtggatggatctgcctgatgacgttgttcgtttatctgttcctgcctgagaccaagaagctgcccatggagcagatggagcaggtctggaagacacactggttctggaagaaggttgtgggagaggaagcggataggaaagaagcaggagcagggaatatagctttgtcgggcttgtcttagtcattttctgagtcgggtgtgtgtatgtgtatttgatcaaaactgcaaagaaaaacatagtatacgatcgcgacaagctgatgtaaatgtacatttgtatgtaaatcgagtaaacttatcagtctggcgttgttgccagttcctacaactaaccgttccaaatggtacaagagtacagaagcactaatataacaagaatgttgaaacgcactgctgtttcttctttcatgatcggccgtagaaggaaaatttacctaac

SEQ ID NO: 83631 - DNA, 2959 bp, Zea Mays
gtactcgaagcgggcggagtcggcgagtgcacacgtcaacacccacccgaatactagtagtggaatactagtagtggcagcgtttattagccgtcacactcccacactcggcctgccgaggagaaactgaagatggttaggggctagaacgagcgagaggcggccgggaggagggaccgatttgtcgatggcgatcggggcgttcgtggagggcgctccggcggacggcggagaaggttacagcggccgcgtgacgcccttcgtggtgctgtcctgcgtcgtcgccggcagcggcggcgtcctcttcggatacgacctcggcatctccggtggtcttacctcaatggactgcttcctgaagagattcttcccaaaggtgtaccgtcagaagcaggacagcaaacaaccatcacaaggaggtatggccgtcgcacatcaatgctgatcggcggcagtgtcttcatcgcgggctcagtgttcggtggtgcagccaccaatattcccatgctcctaatgaacaggattctactggggattggtctggggttcactaatcaggtaacttatacttgaatcagtactcaacagggcacatatatttagctcaaaacaccataaatcggttgagcagtactccctttgtcacacatataggtcaatttagatttgaaggaaacaaaggcctaggtatggtcaatctagcacattcaagtagagaagatttttgaattgcttataacatgatatatagttcaagaaatcagcacaacagtttcatgctggatgaatgttctaatatctagatattggaaattaaatgtattgtgcagtaagtctagcatgaactcagaaaatcctgtgtggctatgaaatcagtatcagacttgagatcaagtatttcattgagttggacttggtggttaaaaacaaaggcttcttgtggatgtcatttgttcagctcccaagttggctacaatagatcgctaaagttgaacaaaagtacatgtttggcttattatgactttcaagtgtctttgctgctgatgaattatgcgctcttacagagttactgcttactaagcaaccttcaagctttcaacaagtgaagtgattatatatcagaatggagataaaatatagctgaaagtaaaagttgtgatgtaatctgaactttctagtttcagcttgcagtaatattgggtgtttggtttctaaggactaatttttagttcatccattttatttcattttagttcatccataagaaacgtatttggtaatttagggactaaaatggaataaaatggagagactaaaaattagtctctagaaaccaaacaacttctaataattagaatagctagtagaaaaatagtgacagaagttcacattgtgcaagagcaccaactatgaccacaagtcttaacacatcactgtctgcatagtactgtcatataatcacgtttcttatggattagagataattacttttgacgtacagactatactagctgcatgccgttcttaatatctctttctcccagagaacaattagatccatactaacatcatactatgcaagtcacatttgatttgcagtcaatcccattgtacctgtccgaaatggcgccaccccgataccgcggggcaatcaacaacggcttcgagctctgcatcagccttggcatcctgttcgcgaacgttctcaactatttcgtcataaaaatcacagcaggatggggatggaggatatccctgtccatggccgcactgcccgccgcattcctaaccatcggcgcgatcttcctccccgagacgccaagcttcataatccaacgtgacggcaacaacacggacaaggcaagggtgctgctccagaagctgcgcggaacggcctcggtccagaaagagctcgacgacctggtccgtgctagcgacctctcacgagcaacccggtacccattcaggagcatactcgagaggaagtacaggccgcagcttgtggtggcgctgctggtccctttcttcaaccaggttagcgggatcaacgtggtgaacttctacgcgccggtcatgttcaggacgatcggtctcaaggagagcgcgtccctcctgtcctcggtggtgacacgcctgtgcgcgacgtctgccaacgtcgtggcgatggtggtggtcgacagggttgggcgcaggaagctcttccttgccggcggcgtgcagatgatactttcgcagttcaccgtcggcgcgatcctggctgcgaagttcagggactacgaggagatgggtgatgggtacgcgtacctggtgctgaccacactgtgtgtgttcgttgcaggctttgcgtggtcgtggggccctctcaccttcttggtccctgccgaggtttgcccgctggagatcaggtccgcggggcagagcatcgtggtcgctgtggttttcttgatgacgtttgtgattagccagacgtttcttgaggtcctctgccgcgtcaagtcggcgacgttcttcgtcttcggtggatggatctgcctgatgacgttgttcgtttatctgttcctgcctgagaccaagaagctgcccatggagcagatggagcaggtctggaagacacactggttctggaagaaggttgtgggagaggaagcggataggaaagaagcaggagcagggaatatagctttgtcgggcttgtcttagtcattttctgagtcgggtgtgtgtatgtgtatttgatcaaaactgcaaagaaaaacatagtatacgatcgcgacaagctgatgtaaatgtacatttgtatgtaaatcgagtaaacttatcagtctggcgttgttgccagttcctacaactaaccgttccaaatggtacaagagtacagaagcactaatataacaagaatgttgaaacgcactgctgtttcttctttcatgatcggccgtagaaggaaaatttacctaac

SEQ ID NO: 83632 - DNA, 2746 bp, Zea Mays
gtactcgaagcgggcggagtcggcgagtgcacacgtcaacacccacccgaatactagtagtggaatactagtagtggcagcgtttattagccgtcacactcccacactcggcctgccgaggagaaactgaagatggttaggggctagaacgagcgagaggcggccgggaggagggaccgatttgtcgatggcgatcggggcgttcgtggagggcgctccggcggacggcggagaaggttacagcggccgcgtgacgcccttcgtggtgctgtcctgcgtcgtcgccggcagcggcggcgtcctcttcggatacgacctcggcatctccggtggtcttacctcaatggactgcttcctgaagagattcttcccaaaggtgtaccgtcagaagcaggacagcaaagtgagccactactgcgagttcaacagcgagctcctcaccgtcttcacgtcctccctctatatcgccggtcttgttgcaactctggctgcagcaaccatcacaaggaggtatggccgtcgcacatcaatgctgatcggcggcagtgtcttcatcgcgggctcagtgttcggtggtgcagccaccaatattcccatgctcctaatgaacaggattctactggggattggtctggggttcactaatcaggtaacttatacttgaatcagtactcaacagggcacatatatttagctcaaaacaccataaatcggttgagcagtactccctttgtcacacatataggtcaatttagatttgaaggaaacaaaggcctaggtatggtcaatctagcacattcaagtagagaagatttttgaattgcttataacatgatatatagttcaagaaatcagcacaacagtttcatgctggatgaatgttctaatatctagatattggaaattaaatgtattgtgcagtaagtctagcatgaactcagaaaatcctgtgtggctatgaaatcagtatcagacttgagatcaagtatttcattgagttggacttggtggttaaaaacaaaggcttcttgtggatgtcatttgttcagctcccaagttggctacaatagatcgctaaagttgaacaaaagtacatgtttggcttattatgactttcaagtgtctttgctgctgatgaattatgcgctcttacagagttactgcttactaagcaaccttcaagctttcaacaagtgaagtgattatatatcagaatggagataaaatatagctgaaagtaaaagttgtgatgtaatctgaactttctagtttcagcttgcagtaatattgggtgtttggtttctaaggactaatttttagttcatccattttatttcattttagttcatccataagaaacgtatttggtaatttagggactaaaatggaataaaatggagagactaaaaattagtctctagaaaccaaacaacttctaataattagaatagctagtagaaaaatagtgacagaagttcacattgtgcaagagcaccaactatgaccacaagtcttaacacatcactgtctgcatagtactgtcatataatcacgtttcttatggattagagataattacttttgacgtacagactatactagctgcatgccgttcttaatatctctttctcccagagaacaattagatccatactaacatcatactatgcaagtcacatttgatttgcagtcaatcccattgtacctgtccgaaatggcgccaccccgataccgcggggcaatcaacaacggcttcgagctctgcatcagccttggcatcctgttcgcgaacgttctcaactatttcgtcataaaaatcacagcaggatggggatggaggatatccctgtccatggccgcactgcccgccgcattcctaaccatcggcgcgatcttcctccccgagacgccaagcttcataatccaacgtgacggcaacaacacggacaaggcaagggtgctgctccagaagctgcgcggaacggcctcggtccagaaagagctcgacgacctggtccgtgctagcgacctctcacgagcaacccggtacccattcaggagcatactcgagaggaagtacaggccgcagcttgtggtggcgctgctggtccctttcttcaaccaggctttgcgtggtcgtggggccctctcaccttcttggtccctgccgaggtttgcccgctggagatcaggtccgcggggcagagcatcgtggtcgctgtggttttcttgatgacgtttgtgattagccagacgtttcttgaggtcctctgccgcgtcaagtcggcgacgttcttcgtcttcggtggatggatctgcctgatgacgttgttcgtttatctgttcctgcctgagaccaagaagctgcccatggagcagatggagcaggtctggaagacacactggttctggaagaaggttgtgggagaggaagcggataggaaagaagcaggagcagggaatatagctttgtcgggcttgtcttagtcattttctgagtcgggtgtgtgtatgtgtatttgatcaaaactgcaaagaaaaacatagtatacgatcgcgacaagctgatgtaaatgtacatttgtatgtaaatcgagtaaacttatcagtctggcgttgttgccagttcctacaactaaccgttccaaatggtacaagagtacagaagcactaatataacaagaatgttgaaacgcactgctgtttcttctttcatgatcggccgtagaaggaaaatttacctaac

SEQ ID NO: 83633 - DNA, 1909 bp, Zea Mays
ccctgttcccacggaagggcagagcagaagacagaagagaagccttcaggcaggcaggcagccatggttgcggatgcgcattgggcgtgggcatcgccgcatcagcatctccggggaagcaaaaggagccttccaaagctgcagagaactgtagatggaacgcgagatgctctgcagctaaccacatgaggattgcaacacttttgtcaccacttgatcatcatggtggggcagaacaaggcgggacacgccaatcagacgccaccagtccagcgttgctgctgaagctgaacaataggttaactacacttgacggtagtaaaaaaaattggggtacgtagggacctggactagccacctctgatttttatcactgcagctgtaatagacaactgctatgcttctcttctgtgtgaccgtgaggtttcgttgtcagcagtaatagagattagatgctgcttgtgttcccgttacattcgtttgcttcctgccctttttccctggggaattttggtacagcacacaacacaagcaactataaaaatctagcaaggtcaacaactaccgctggaattcacacacggccgggacaacatgatcactactggtaccactagtagatacgtaataatgaactgataggtactcgtcttacacttttaagtacacagcttatatctctctctcgtttatatatgtttatacttattaaaactcaatttaataaaagaagaagaagaagaagaaaaaaagaactagctgttttccccccaaagtaagcaagaaagagagaaaaaaaggagagggcgagaagcaaaacgaagaagaaatgggataccactgctactattgtttagacctcgtttgcaatgcaggcaacgagcatctctgaccgctactcccaaagcagcggctcctcgaggcgcagctccgcattgaccacctcctccacgtcagtgagcggggcccacatcggcgggaagcgcccgaacccgtcccggatgtcgaggagcaggtccggcaggtcgaacagctgccgctcgtcctccacgccgctcgacggcgtccctggccgagaggccgccggcggtggtagtgctactggtactggtgcctgtgcgtcggcggctgcctcctcgggcgcggcgccgtccttggcagcgggctcctcgtgcgcgccggcgccgggctccgatgacggcgacgtgaacgcagcggccaatgcggcggctgcctggacgtccttgggcgccgcggacgcggcgcgcgggagcgcgccggcgaggtccgggaagttgaggtgcgcggcgcggcccttgatggcgagcgccgcgacgtcgtgggcgcgcgcggccatctcggcggtggggaacgtgccgagccatatgcgcgacttcttgcgcggctcgcggatctccgacacccacttgccccacgcccgcatccgcacgccgcggaacgtcgggtgcttcccctcgctgccccgcggtcgcttcttggccggcgccgccttattaccagcacagccttcctcctcctcctcctcctcctcaccgcccgcctcggcctcggcctcggcctccaacgcctgccgcttccgtgtcgcgggcgcggcattggccgccgccggtgacgggggcgaagaggacgagtctgtgacagtggacgagcagcaggatgtggtgcacgacgaggtggtggtggcagagcaagaggacgtttcgtggagctcttgagccatggcagatagggtagctacctctttgcactgatgcgcagtggtgtctggtactctggtgtgcaggaggatcaagtgatcaagaggctggttgcctgtatgtggtgcgaccgcgagggcctttttatcatcagcgtcaaatgagggtgggatgcaacaaaaagttacttg

SEQ ID NO: 83634 - DNA, 2075 bp, Zea Mays
ggcggctccacaacccctggcggcctggccttgtgcttcgtgcgtgcctacccccctataagtacgcggcaccgtctcgcagacaccttgcagaaccatcactagtgagtagtagtgagtgacctgcaaagacacgcgaggcacgcagagctggagcagctgatctgagaaccaggaattaggatggcgatggagaaaggctggaaggcgagagacgctgctggtgctttcatgatggacttggagctggtggccgaggaaaccgacgacgcggtgccgtcgataccgccaccgcagacgccgctggagcccatggagtacctctcccggtcgtggagcgtgtcggcgtcggagatttccaagattctcctcggtggaggcaagaagagcagcgttgcggcggcgagccggcttccggaggtgaccataccggagcagtctgcgctcgccaccacgtcctccgtcgttcctctaccgtgtcatcagcagaactactgcaaaacatacaaacagagagccgcaagaaggtcttccacgagcagcggccaccaccaccagtcgatcggcaagtggttccaggtccaccacagggaaacacgccgggcgaagcagagcagcaaggagaagcagcgcgccgagaaggcccacgtgcacgccatggtgtccgtggcccgggtcgctgccgccgtcgccgccgtcgcgtcggccacgagctccaacgcccaggctaccactaccaagatggcgacagccatggcgtcggccaccgagctgctggcctcccactgcgtcgaggcagctcagcacgcgggggcgcgccacgaccaggtggccgccgccgtgcaggccgcggttggcgtcagaagccccggcgatctgatgacgctcacggcggccgcagcgaccgctctgcgaggagcggcgacactgaggcagagggcgcagcgagagacgaggagcaacgcgagcatcctgctcccgtacgagaaagccgcgaattcgtggagcccggacatctggtgcaaggagggggcgctgctgaaacgcgcaaggaaagggggtttgcacaagataagagtatgtatctacatcaacaagaggtcagaggtgatactgaagctgaaaagcaaacacatcggaggcgcgctgacaaagaagaacaagagcgtggtttacggcgtatacagcgagcttccgacgtgggctgagccagggaaggactgcatagaggagacatgctgctgctttggcctcagcacggcgcagggcctagtggagttcgagtgcgagggcaacgcgagcaagcaggagtggatcgacgacgtgcagaacctgcttcgtcaggcggctctgcatgaccgagtaggggataaactgggattagtaaaactcagctagtgcagtctcagtatataaccctctttcatggtagcagcagattgctgtgtcctgctgctcctgcatcagcgatgcgaggggtacattaacatatattggtcgtactcttgtcactgacatgctatacaacatctatagtgatagacatacggaatatattagtatatgttttgtaaagggccggagcagacaatcaaaatcgttgggaggacgctgatcccagtttattttttagaaaaaaaaaaacagctagcccgagttttaattaagttcggttaggcctagaggggtggacgttcggtcttcaacccatcagctgttcggactaattattcacgatcggaatttcgtagcattgtatctaacactgtcatatcataaaaatgttgtgaaactatgaatgaaacaatgtgtctcaatacaatagttcacttcactatttcataagctaacataccaattaagtattgcaacttaatagccaatagaagcacggttttcaagaacttggaaacgagttgacatgatttcattctatgaaactcaatcctcttaaatgctataccatatcatcaaaaattatgatgtgtcacaccattaaatgtgcatgaaacaaccatagtgatgagtttaaatacactattttcattttccaatgctaccatatcagatttaaa

SEQ ID NO: 83635 - DNA, 2277 bp, Zea Mays
gccatagcacggcggctccacaacccctggcggcctggccttgtgcttcgtgcgtgcctacccccctataagtacgcggcaccgtctcgcagacaccttgcagaaccatcactagtgagtagtagtgagtgacctgcaaagacacgcgaggcacgcagagctggagcagctgatctgagaaccaggaattaggatggcgatggagaaaggctggaaggcgagagacgctgctggtgctttcatgatggacttggagctggtggccgaggaaaccgacgacgcggtgccgtcgataccgccaccgcagacgccgctggagcccatggagtacctctcccggtcgtggagcgtgtcggcgtcggagatttccaagattctcctcggtggaggcaagaagagcagcgttgcggcggcgagccggcttccggaggtgaccataccggagcagtctgcgctcgccaccacgtcctccgtcgttcctctaccgtgtcatcagcagaacagagagccgcaagaaggtcttccacgagcagcggccaccaccaccagtcgatcggcaagtggttccaggtccaccacagggaaacacgccgggcgaagcagagcagcaaggagaagcagcgcgccgagaaggcccacgtgcacgccatggtgtccgtggcccgggtcgctgccgccgtcgccgccgtcgcgtcggccacgagctccaacgcccaggctaccactaccaagatggcgacagccatggcgtcggccaccgagctgctggcctcccactgcgtcgaggcagctcagcacgcgggggcgcgccacgaccaggtggccgccgccgtgcaggccgcggttggcgtcagaagccccggcgatctgatgacgctcacggcggccgcagcgaccggtacgcactacgcagtccgacggagctgtgtcatcgcgtcgcaggttttccactgccgattcttgaaacaagacgctaagcttccgtgcacttttggctcgcgtcgaccagctctgcgaggagcggcgacactgaggcagagggcgcagcgagagacgaggagcaacgcgagcatcctgctcccgtacgagaaagccgcgaattcgtggagcccggacatctggtgcaaggagggggcgctgctgaaacgcgcaaggaaagggggtttgcacaagataagagtatgtatctacatcaacaagaggtcagaggtgatactgaagctgaaaagcaaacacatcggaggcgcgctgacaaagaagaacaagagtaggtcccgacatctgctaccgaaacattggatccagccgaccagtagtttgcgaacttcagtttcagtactaaccctttccgcttgagaccggtgcaggcgtggtttacggcgtatacagcgagcttccgacgtgggctgagccagggaaggactgcatagaggagacatgctgctgctttggcctcagcacggcgcagggcctagtggagttcgagtgcgagggcaacgcgagcaagcaggagtggatcgacgacgtgcagaacctgcttcgtcaggcggctctgcatgaccgagtaggggataaactgggattagtaaaactcagctagtgcagtctcagtatataaccctctttcatggtagcagcagattgctgtgtcctgctgctcctgcatcagcgatgcgaggggtacattaacatatattggtcgtactcttgtcactgacatgctatacaacatctatagtgatagacatacggaatatattagtatatgttttgtaaagggccggagcagacaatcaaaatcgttgggaggacgctgatcccagtttattttttagaaaaaaaaaaacagctagcccgagttttaattaagttcggttaggcctagaggggtggacgttcggtcttcaacccatcagctgttcggactaattattcacgatcggaatttcgtagcattgtatctaacactgtcatatcataaaaatgttgtgaaactatgaatgaaacaatgtgtctcaatacaatagttcacttcactatttcataagctaacataccaattaagtattgcaacttaatagccaatagaagcacggttttcaagaacttggaaacgagttgacatgatttcattctatgaaactcaatcctcttaaatgctataccatatcatcaaaaattatgatgtgtcacaccattaaatgtgcatgaaacaaccatagtgatgagtttaaatacactattttcattttccaatgctaccatatcagatttaaa

SEQ ID NO: 83636 - DNA, 2181 bp, Zea Mays
ctggcattgccacccccaggccccagctagtgggcagggtcgtcgatcgacagggtagaaaaggaggcgaggagcctgtcagcctcgtgttccccctctcgttccttctgcctgcctgccatagcacggcggctccacaacccctggcggcctggccttgtgcttcgtgcgtgcctacccccctataagtacgcggcaccgtctcgcagacaccttgcagaaccatcactagtgagtagtagtgagtgacctgcaaagacacgcgaggcacgcagagctggagcagctgatctgagaaccaggaattaggatggcgatggagaaaggctggaaggcgagagacgctgctggtgctttcatgatggacttggagctggtggccgaggaaaccgacgacgcggtgccgtcgataccgccaccgcagacgccgctggagcccatggagtacctctcccggtcgtggagcgtgtcggcgtcggagatttccaagattctcctcggtggaggcaagaagagcagcgttgcggcggcgagccggcttccggaggtgaccataccggagcagtctgcgctcgccaccacgtcctccgtcgttcctctaccgtgtcatcagcagaacagagccgcaagaaggtcttccacgagcagcggccaccaccaccagtcgatcggcaagtggttccaggtccaccacagggaaacacgccgggcgaagcagagcagcaaggagaagcagcgcgccgagaaggcccacgtgcacgccatggtgtccgtggcccgggtcgctgccgccgtcgccgccgtcgcgtcggccacgagctccaacgcccaggctaccactaccaagatggcgacagccatggcgtcggccaccgagctgctggcctcccactgcgtcgaggcagctcagcacgcgggggcgcgccacgaccaggtggccgccgccgtgcaggccgcggttggcgtcagaagccccggcgatctgatgacgctcacggcggccgcagcgaccgctctgcgaggagcggcgacactgaggcagagggcgcagcgagagacgaggagcaacgcgagcatcctgctcccgtacgagaaagccgcgaattcgtggagcccggacatctggtgcaaggagggggcgctgctgaaacgcgcaaggaaagggggtttgcacaagataagagtatgtatctacatcaacaagaggtcagaggtgatactgaagctgaaaagcaaacacatcggaggcgcgctgacaaagaagaacaagagcgtggtttacggcgtatacagcgagcttccgacgtgggctgagccagggaaggactgcatagaggagacatgctgctgctttggcctcagcacggcgcagggcctagtggagttcgagtgcgagggcaacgcgagcaagcaggagtggatcgacgacgtgcagaacctgcttcgtcaggcggctctgcatgaccgagtaggggataaactgggattagtaaaactcagctagtgcagtctcagtatataaccctctttcatggtagcagcagattgctgtgtcctgctgctcctgcatcagcgatgcgaggggtacattaacatatattggtcgtactcttgtcactgacatgctatacaacatctatagtgatagacatacggaatatattagtatatgttttgtaaagggccggagcagacaatcaaaatcgttgggaggacgctgatcccagtttattttttagaaaaaaaaaaacagctagcccgagttttaattaagttcggttaggcctagaggggtggacgttcggtcttcaacccatcagctgttcggactaattattcacgatcggaatttcgtagcattgtatctaacactgtcatatcataaaaatgttgtgaaactatgaatgaaacaatgtgtctcaatacaatagttcacttcactatttcataagctaacataccaattaagtattgcaacttaatagccaatagaagcacggttttcaagaacttggaaacgagttgacatgatttcattctatgaaactcaatcctcttaaatgctataccatatcatcaaaaattatgatgtgtcacaccattaaatgtgcatgaaacaaccatagtgatgagtttaaatacactattttcattttccaatgctaccatatcagatttaaa

SEQ ID NO: 83637 - DNA, 2335 bp, Zea Mays
ctgacacaacgactcagcgacatccccgcggcctctcccctcgcctgggctctctccgcctggcttttgcagaagcagaaaccagcagcgattccgccctcgctagtatcgccgccctcgttcaccgcttactgccggcgggatgatcccgttcaaccctgcggtcgccgcggaggtgcgcgccctgatacagggcgtggaggactccaccttcgaccccatataccgcgagctctcccagccctggtgggtgcgttttttgcttcaagtttgtgtggatgaaattctcttaaacatcggtggcgcaaataaccaccgattgaaacatgatcttgtagccatcatcttcagatattgtgtggataaaccctacttcagcaccaatttctgtgaagcactgagggcaatgcctgacagcgatgggctccttgaaacattgtccaatgaacttgagttatctacaactgagagggttgtagttggacttgctctctcagactctgagaatccagacttgaacctggaagagatgtgccttggtagattagatgacgattttgattctcatatatccaaaattggagaacaaataagtctgtctgatatcatcagtgaactaggatgtggatgtacttgtaatactactcattgtaaagaaatgttatcactccttgagcctcttgatgatatgggaatctctaagttactaggagcggttgtttgcactcgtattggtgttggagaagctcaaaatacatattcaatatttcttttgacttttgggaacaaccaaacaattgactcatctcagttgacttcatggaatattgatgttcttgtggattcaatcaatgaaattgcacctggaactaactggacacatgttatagaaaatcttgaccatgagggtttcattatccctgatgaagcagcttttcgtttattgatgtctatatgttattgagcctgcaaggatccattcccacttcatgccatctgtgggttactatggaataatataaaaggacagttgtcattcttgaaacatgcagtggctttgccaaatgatacattcacattcgcacattgtacaaggaagatggtttttccagacttgggaaattgtaaccagggcaatcaggcttggtactgccttgtccttcttgaggtgttatgtcagcttgctgaacttggctattcaaagccagtgcgagcaattcagccaattcttggttatcctctgatcaattatcctgaagtgttacttcttggtgttagccatatcaatactgcatataatctcatccagcatgaagtactgtcctgtgtttttcctgctgtggtgaagaacaccatgcacagcagtcttatgaactatctatgacatatcaatccttaccttactcttcaaggattcattgatgctcgttctgacataagttgtcttctgagaactgtggagatatgtgaagacctaaaggagcttcttcgtgttgctttgttatctaatcttcgaagtcttattcagaaattgattagcaatagggaatgcatcagcaccagcacaaattaactaaagtcaaatggagatattcaaaagtggaacagctacttagatgttcagaaaccttgtaatggctatggacacaaaaggccgctacattattctcaatgcgattgctaaccagcttcgctatccaaatagccatacccactacatcattctgtacctgtttgccgaggcaacccaggaaattggccaagagcagataacaagggttcttctggaaaagttaattgtcaaccggcctcatcctcggggaactgataaaggtatgctaccttgactatttgaaacgcataaacataagtgacttgaagaaaacggagtgtgtttgtgcataacccacgctacagcttctggactcgttcttttacgcactgtgctcctgagatagagaagcttatccagtcggttgcaaggtcctacggaggggaaaggggcagacgatggattgggtctagcggacggagcccactagggaaaaaatgtctagcatcgaatgaattccaaaaacatgagatgtagttttgctgatatggtatagttagagtaggtctgcgtggtttgctcggaatgaagatgaacctgtgctatgctggaagtttagcccatctctatgtctaacacaaaatctgcaggagaaaccgctggcaactgatcaggcaacataatagtccgttagtatgctaatcgttagtttccgcaagcttgcaatatcaaccgttcgattggggtcattatgggtctatcaccctgccaagccatataaac

SEQ ID NO: 83638 - DNA, 739 bp, Zea Mays
ctgacacaacgactcagcgacatccccgcggcctctcccctcgcctgggctctctccgcctggcttttgcagaagcagaaaccagcagcgattccgccctcgctagtatcgccgccctcgttcaccgcttactgccggcgggatgatcccgttcaaccctgcggtcgccgcggaggtgcgcgccctgatacagggcgtggaggactccaccttcgaccccatataccgcgagctctcccagccctggtgggtgcgttttttgcttcaagtttgtgtggatgaaattctcttaaacatcggtggcgcaaataaccaccgattgaaacatgatcttgtagccatcatcttcagatattgtgtggataaaccctacttcagcaccaatttctgtgaagcactgagggcaatgcctgacagcgatgggctccttgaaacattgtccaatgaacttgagttatctacaactgagagggttgtagttggacttgctctctcagactctgagaatccagacttgaacctggaagggagaaaatttacaatcgctcaaattaaggaataaggagttatgctcaaaccatgctcattctgtatcaaatgaatggatacaggagattgttgtgttttttctccagaccgaaggcctctcaaaaaatatggattcctttactaacatttttccctattaaatgtaaaagagggtccattctatgttcctgtcccacttcagcaacccaat

SEQ ID NO: 83639 - DNA, 1308 bp, Zea Mays
aaagtaggacgctacccgtacagcccccaggccgctcctcggagcacagcacaggccgctcatatgtggggccctcttgcatattcggtgcaggaaggacccgtcctgctccgggcggacggagacggtgatcatcaccgacatgaactactacccggtgtccaagtaccacttcgacctcagcggcactgcgttcggcaggctggccaagcccggcctcaacgacaagctccgccactccggcatcatcgacatcgagttcaccagggtgccgtgcgagttcccgggcctgaagatcgggttccacgtggaggagtactcgaaccccgtctacttcgcggtgctggtggagtacgaggacggcgacggcgacgtggtgcaggtggacctgatggagtccaagacggcgcgcggcccgccgacggggcggtggacgccgatgcgcgagtcctggggctccgtctggcgcatggacaccaaccaccgcatgcagccgcccttctccatccgcatccgcaacgagtccggcaagacgctcgtcgccaacaacgtcatcccggccaactggcgccccaacaccttctaccgctccttcgtccagtacagctaaccgatcgggatccgtgccctgcccgcaattggagctggctggctggggcgctactcggctcggtcaccatcgtctacagtactatactatgctctactaccactagactgctgctgttactactagtctactaccaccaagtacggcggaacggaacagctagtcgtcgtcggcggccttgggaggggaggtgtctccggtcaccgtgccgttgcagttgtatcgtgatcatggtcctgggagttgttgcatccggggcgcgctttttaggtcaggcgtcgtgtgcgatgtttgtggggtcaggctggcatgtcatgccgtgcgtgaccctgattgcgagccggcaagcaagaagacaaaaaaactaaagccgtgtgggaaaatggaggaggcaggcgtacaagctacgctctcccgcccactgttgcttttataatttatcatcatcatcatcttcattccgatcggtgattaatcgaaaagtatattgtaatgtataaacgccattttcctttcgtcagtgccttttttttcctggttgtggatgttttgtttgcgcattcagccttgctgtgctgaagccaaacgcaagtaatgtgctgaagccaaacgcaagtacacaagtaatgtacataatgaagatgtgaaagaaagaaaaaacgacagaaatataaactcccgtttgacgatgatatttt

SEQ ID NO: 83640 - DNA, 1718 bp, Zea Mays
gaactgagcaagaccccggcccggtcgactgagctgatcagcctgcccaggccatgtgcagccccaacatggcacgttctccctcgctcctctgcgtacacacagaaacctctcctccctcccctctcgcagctagcgtgccggcctgccggtgcccttctgcccatctggcttataaataggcccacacggcaccacggccaccaccaccacccaccagtccaccaccactgctcgcactcactccaccgctgcccacttcttgtttgtattgtatccagactccagaggaagccgagagggccaatgaggcaaggcatgagctccccttccgccgccgcggcgctcgtgctcctcctggccctgctcgccggaggccagtgccgagaggcccagctcgacgccgcggacgccggcaccggcacggagaactacaccgccagcgacgccgccgtgtactggggcccctggcagagggcccgggccacctggtacggccagcccaacggcgccggccccgacgacaacggtggcgcgtgcggattcaagcacaccaaccagtaccccttcatgtccatgggctcctgcggcaaccagccattgttcaaggacggcaagggctgcggctcctgctacaagattcggtgcaggaaggacccgtcctgctccgggcggacggagacggtgatcatcaccgacatgaactactacccggtgtccaagtaccacttcgacctcagcggcactgcgttcggcaggctggccaagcccggcctcaacgacaagctccgccactccggcatcatcgacatcgagttcaccagggtgccgtgcgagttcccgggcctgaagatcgggttccacgtggaggagtactcgaaccccgtctacttcgcggtgctgccgcccttctccatccgcatccgcaacgagtccggcaagacgctcgtcgccaacaacgtcatcccggccaactggcgccccaacaccttctaccgctccttcgtccagtacagctaaccgatcgggatccgtgccctgcccgcaattggagctggctggctggggcgctactcggctcggtcaccatcgtctacagtactatactatgctctactaccactagactgctgctgttactactagtctactaccaccaagtacggcggaacggaacagctagtcgtcgtcggcggccttgggaggggaggtgtctccggtcaccgtgccgttgcagttgtatcgtgatcatggtcctgggagttgttgcatccggggcgcgctttttaggtcaggcgtcgtgtgcgatgtttgtggggtcaggctggcatgtcatgccgtgcgtgaccctgattgcgagccggcaagcaagaagacaaaaaaactaaagccgtgtgggaaaatggaggaggcaggcgtacaagctacgctctcccgcccactgttgcttttataatttatcatcatcatcatcttcattccgatcggtgattaatcgaaaagtatattgtaatgtataaacgccattttcctttcgtcagtgccttttttttcctggttgtggatgttttgtttgcgcattcagccttgctgtgctgaagccaaacgcaagtaatgtgctgaagccaaacgcaagtacacaagtaatgtacataatgaagatgtgaaagaaagaaaaaacgacagaaatataaactcccgtttgacgatgatatttt

SEQ ID NO: 83641 - DNA, 2505 bp, Zea Mays
caagcaagcaagcaagccagcaagcgagccgatccgtcggtccatcgtccatccatccaccaccgaacccggccggccggccccaaccttcatctgccagcctttaatacgtgctgccgtggcaacacgagtgagtgcagagtagtagaactgagcaagaccccggcccggtcgactgagctgatcagcctgcccaggccatgtgcagccccaacatggcacgttctccctcgctcctctgcgtacacacagaaacctctcctccctcccctctcgcagctagcgtgccggcctgccggtgcccttctgcccatctggcttataaataggcccacacggcaccacggccaccaccaccacccaccagtccaccaccactgctcgcactcactccaccgctgcccacttcttgtttgtattgtatccagactccagaggaagccgagagggccaatgaggcaaggcatgagctccccttccgccgccgcggcgctcgtgctcctcctggccctgctcgccggaggccagtgccgagaggcccagctcgacgccgcggacgccggcaccggcacggagaactacaccgccagcgacgccgccgtgtactggggcccctggcagagggcccgggccacctggtacggccagcccaacggcgccggccccgacgacaacggtggcgcgtgcggattcaagcacaccaaccagtaccccttcatgtccatgggctcctgcggcaaccagccattgttcaaggacggcaagggctgcggctcctgctacaagattcggtgcaggaaggacccgtcctgctccgggcggacggagacggtgatcatcaccgacatgaactactacccggtgtccaagtaccacttcgacctcagcggcactgcgttcggcaggctggccaagcccggcctcaacgacaagctccgccactccggcatcatcgacatcgagttcaccaggtcggtggtgtgcgtgctgttgaatttcgtagcgcggcaagtgaaagtttggtggtagggcggaggcagcagcatcatcatcattagccgctcacgttactcaccgtcgccgcgccggacactgcatgtgcggcaaagtggcgcagcagctgccgaaggccgcttttattgcgctgcggcacagcgcccaccaacatgctcaattttggctactagtgggcgcaccaccccgcttgtgcatcccatcccaacgtacctgcgtccaactgttgccaccggcgcccggcggtgaccgaccgaccgccagccccattatttcctttcgctttctctagcataccttgccaccaccagctgcccgggtccatgctaaagcagggagggagggattccttcacacttgcaaagctctttcttgccttgggttctgttctgctgctactgctagtgctatagtgacaagatggcgccgccgacggatgtgtgtttgcagggtgccgtgcgagttcccgggcctgaagatcgggttccacgtggaggagtactcgaaccccgtctacttcgcggtgctggtggagtacgaggacggcgacggcgacgtggtgcaggtggacctgatggagtccaagacggcgcgcggcccgccgacggggcggtggacgccgatgcgcgagtcctggggctccgtctggcgcatggacaccaaccaccgcatgcagccgcccttctccatccgcatccgcaacgagtccggcaagacgctcgtcgccaacaacgtcatcccggccaactggcgccccaacaccttctaccgctccttcgtccagtacagctaaccgatcgggatccgtgccctgcccgcaattggagctggctggctggggcgctactcggctcggtcaccatcgtctacagtactatactatgctctactaccactagactgctgctgttactactagtctactaccaccaagtacggcggaacggaacagctagtcgtcgtcggcggccttgggaggggaggtgtctccggtcaccgtgccgttgcagttgtatcgtgatcatggtcctgggagttgttgcatccggggcgcgctttttaggtcaggcgtcgtgtgcgatgtttgtggggtcaggctggcatgtcatgccgtgcgtgaccctgattgcgagccggcaagcaagaagacaaaaaaactaaagccgtgtgggaaaatggaggaggcaggcgtacaagctacgctctcccgcccactgttgcttttataatttatcatcatcatcatcttcattccgatcggtgattaatcgaaaagtatattgtaatgtataaacgccattttcctttcgtcagtgccttttttttcctggttgtggatgttttgtttgcgcattcagccttgctgtgctgaagccaaacgcaagtaatgtgctgaagccaaacgcaagtacacaagtaatgtacataatgaagatgtgaaagaaagaaaaaacgacagaaatataaactcccgtttgacgatgatatttt

SEQ ID NO: 83642 - DNA, 2606 bp, Zea Mays
atcatcggaaggaacacatcatatgaattgatatcgtcatagaatattacacatcatagccaaaatatcgtatgaatttgttgaacacaaataattcatccatcaaataagcatataacttcaaaccatatatctgcaaatcctttaacttaaaattcaaagcaaatcttataacttcaactcaaagtattaaacattaaacataataaaaaataatcctatagcttgaaatctagagctactataaacacctactatagctgccacaagactgcagatcctatagtagtcaactagacttatgatggagacacttgtcttcaattgaagcttaatagttgacgaaggaggttgttattttcttccatcgacctcttgatattatcaatggtttccgcttcttcatgaagtccattttttcttgcttctcatcctataattgatcctgaagttgttgaacctttgcagaaactatggggctatggagcttttcttggaggcacactggagaccaagattgcgtaggctggaatacaatagagctcagtagcacattagaaacaacttctgtaggagattcaattgttgtacatcctaagctggtgctgccaccatttcttatatgtcaacctaatataaaggttaaagattattcatcagtatagtataccgcaagttgcaagtacaaacatgaaaggaaaacaagcacttacaattgctctaagagaaaaatggcgcctgctgaacccatcatagttcagaacatcatagcaagctgtaataagcaaaaaaatatgttgtcttctacaataacttgaattttcatccaccaactcacttacaaaacagcagccgtcttcacgccatgtcgaactcttgcatcgaacttgggctgcagatgatgttgaacggcttgtcgatgctgtcctgcaatatcgtgatctgtccctccttgacaagtatgtcttcgtccaaggcttcgatcttcttcttcagcgatacaacctcgttctgcatgatgctcatgtttcttctcagctacttcacctcctgccactacaggtccctgtcttccatcaccgttttcagtgttccacgaagagcagccagctccttcgtagattactggaaatcctgttggatctcatcgattaactcatccttcttggataagtgcagcaaacacagcaggagaacttgaggaaaatactgtaaacagagcttatattctagcatatataaatatcatgtgccatcgtgaagaagcatgccatttggcaccgtaacaatcacaacattatgggttggtctttaaaacaacatagcattcaatgatagcccactgctgtctctagactagacttctaatgaagctgtatggcctactttatatacaaaaacatgacagtgtaatactaatttatgtcgttttctcctagtgttccttatatgaccaccaagatgacccctggaatgaatgtttgttgacagtaagcctctccaacaatacgttgttttgtatgctacctcacattatctcgaactttagaactggttctagaaacattcaaaggaatatctaactgaacactcacatagtagacctaatctccacttgggaaaaatttatcatagaatgttggcaatatgcaaaaaaaatgatttgctaaagacaaacaagcagcaaataacttgattcaatcattaaaatgcatttctaataattttatagatcaaagagatgattggcatcagttggcctcgaaatacccgtttggtaaccagttcactcagcaaaaagttctacctacttataagtattttgagacatactgcaacttgaccactacaattggctaacaatagacaaactaagattaatacattatgaaagagaaactgttaccaaaatcctactttgattagataaaaacaatgaattgctagtttattagggaaaatagatacgaaatatgcaaggaacacatgatacctgaagctccaactgcttagctttgtgggttatgcaagaaagttcattctggactctctggatctcatttctcataacatcttggatgcgaaatgaagatgccagatcagattgcaattgttcaatggcaactacctttgacaagattgtctcctttagtactctattcagcatagcctcttctttcagcttgaatccaaaatcatcctgcataagaatggaagttatttgctgatgataaatatatgctcaaggacccaaacttattgaaacaatttttttcataatagtcaattcactactaatttgactatattcacaaatcattagacgtaaagaatttatgtaggaagacaaaaaaattatttgccttatcattttatatgaatgactctaagaaacttggtgcagtgcttgatatcattggaacatggcacgaccagaatgcataagtagtgaaggtagatgaatgaaacagataatttgagataaacaaaaattacaagataataatggaaggcagcttgtgccttcatgaccgctcgttgttccctcaccctctcagcatcattggacgtatcagccccacactgcctgcttctctaagtcttga

SEQ ID NO: 83643 - DNA, 4687 bp, Zea Mays
ccccaacctgcaagaaaaggtagaacaacgccatggttaggtatttggcaacatgactcgtgtgaatttgcactaaaccacagcgtgttgcagcaattgtgtattgttaccaatactctaggagcatatggttaacagtttgatgtagcttacttacaaacacggatgtacattacatcagtataatactcttcttttgcatatatcttatttccagaaatatattcttaaacttagaaactaaaaaacagaaatctcaagcaaagttcaaagcaggtgtcaggcagataaaacaccacagtttttttttaccagtgtttcatttatccatgaattattggtgtgatcatggagtatgtgacattattagtacaataacagcagaatccatggaactgtgttagcaaatgttcatttgaaggtactatccaacagtcggtctttcaacagcaacctgaacaaacttgcatgcaacacctcattggcccaaccctggaatgaggttcctgttagccaacagtgcctcacaggaataggtaagggaaaaaaacagttacctcacaggaatagcttgaaaggaatgagatgacaatggatcaactcattccattccccaaacaaaacaaaacaaaaacatggagtgagaatatgatggatcaccctattccttaaaacaaacaccatataatgtataagcaaactgatttatacaatacaatcatttatccataaagtgcatacaaagaaacttactttcatgtaatacaggaaagagtccatcaaaactccagctttaataaagaacataatattttcaaatacatatcttgcttcataaacaaaacagactgtatttgaccatcacggcaaaagcccacatttgcattatgaaatggttcaccagaaaacagaactgtcttacgaccttcaaaaagactgtatatgcagcaaatataccgagttcatgagagctctaattctgggaaactatacaaatcaggtatgtcgaataaacgtttggatataggtaagagcgtaaatagacgtcctttaatgaatcaagcagtatttaccatcatcgatctccagagcggggaatagacttcctttagggcccgttcgtttcggcaggtttatcccattccgggtctgattccaggcggaaggaaatgtcccggtttagaattcgaccctttatgcgacagctgttcgtttgggcccagatcgaaagcgagagtgatccggtttgaagttttctcttccacaacggcccgacatgaatcctggtctaccgacctccggatccgatatcgacgagacagcgcagcactggcgcggaggaggcgaagaggcgacgacgccagtgacggcgtggcggcgcagcgcagcgttgacggccaccctccccgtcgctttctcaccggtaagcgtcaccctctcttccccaacgcacctgcccttgcgatgctttccttctccctccacatccgccctcgacgaagtcgtgtccagttgtgcctgcccttggcggcgcttccctctccctccccgcgacaaaccgccaagggcttgaccgccttgcagatgccgcacgttgtgcgaccgaggcatttttttatattcactttacaagaatctgagagagaaacacaatcagcggagtcgttttggatgctcagatctactgcagccacactgcttagatgtgctgctctccctacctattcttgtcctagccggtgatgagagataagatagatcatccgcattcctcttcttcattcataatcgttatcgtctcagtaatccctcctatctttcctcttgctagtgatgcatccatggggttcagacatagctagcggttattcttcttagatgcaagtatatgtatatggatcacctaattagcttcgtctacactctacaccttggagaagtcggaccatcttggagaagcagtagaagctagctgcaagtaggcacaagcaagcaggactatctctgcttctactgctataactgagcccaatggatgcagccatattctccaatgtctgacttctccaaggtcagatatagcaggcacaagcaaatcggaccatttttgcttctactgcaagcaggcacaagcaagtcggtccatctctgcaagtgggcacattatattgtatatattgtactagcaaattaaagttgatcatatgacgaacaggcctgcaacttatttgtttgactaattatttatgttttgttacatgtagatccctacaacactgattagatattttcctttcgtgtttgtgctatactgatttgatgttaaatgtgtatatagggaaaaggaatgtcaatgtcgtcagttttgttttgattttcaaaaaatgtccagattagctttccaaatctgcgttgtttaaatcattctctaactacaaacctagattcatttgtcctgagtagatttatttatcctgattcatttgtgtgtctagattcatgtgttttcttcaagaatttagtgtatactttatgatcatgtatgacagctacttatttgagttgttacatgtagatccctacaacaccaattatagttggggaaggtgaacctcctccctcttgggatccggtaccaactccaaaagttctacaatgagtatgtcattgcaagatcatattagaaagaggagggaagaagaagatgatgacatgatgttgtttattttccctgccttacatctgatgggttcaactagaggtgggggacaaaagaagaaacgccatacatcagatgagacaggcgaggttaaggtccgacgactcctcgagggacatgtcaagaactgtcaagttacatttcggatggaaccacacatcttcagagagctggcaacttatcttagaaggagaaagatcgttgttgatacaaggatcacggtcgaggagaagttggcgttcttcttatacatgctaagttgcaacgcctcatatcaggatctccaagtgtactttggtcatactatggttggaaaaggctccccaaggttcaacatgagcagttccccaaagctgcgtaggtatattcctacaacaagtgctactaaaaagaagccttctcctaaatgttgtggggcaaaaaagagtggaggttctccaagagtagtgaaacaaagagcagattggaatccaggacttgagagatctcttgttgatattctccatgaatttaaagatagtgggtatagaggtgacaatggttggaactctgaagggtggaataggatggttaaggagtttcatgtgaggaacaagtatgtctcctttacaaaggctcagattcaggataaagaaggtcagttgaagagagactacaagatgctcaaagcaacagagcggacatttcctaaaatcaagaagtttaacaacaaggcaaccttcccgctctttgatgctttgggagagctttatgatggacacttggctgaagggacttggagttgcacttctctcgaggcactgcaagaggaagaaccgaatgagcaactccaggatgcagaaaatgggccacaaggctttgatctgaatgttgttcatgatgtagatgatgaagttgatgatgcactcactgaaaggaatgaagatgtgcttcaaggaagggctaatattttgtcacgagatgaagaaagtggacaacgaagacctgttgcatcaagaaacaaacaagaaaaggaaccaaagaagcctagaaagagtgacaacatagaaaatatgatgaacaaatacctataaatgaggagcaagcaagtagaatatgaatctgcaagagaaaaggaggcaagagaaatggaggtaactcaaagtgatgatttctccatcaaaaggtgcatatcagttatgaatacaatagaagaagtgaccaaattggagaaggcaaaagcatattcaatcttcgccaagagcaaagagaatagagaaactttcatatgtgcttgtgaagcagatcaagaatcagctttgatttggctaagaaatgagatgtcttagcagcttcgatatggacattattgggaagcaaagtattggaaaaaactgcatttagttgatgatccactagaagtttaggctatgtcccactcgagtctttatactgtggtgctgtctcttgttatgctatattccctgcatgatttttgtttttggcatgtctacagctggttcagctgttcggctgctcattatgctcattatggccagcaatatattaaatctgcattgtgcaatatattgtcaaacaagacttgggttgctagctttaactgcatggaatggaattagtccaggctgaaacgaacaggctttagtggccaccaggtttcattccagagccggatttataacagaccaagtttcagtgaaccacctggatccactctatttggaccaggaataaatacatgcctgttttcgaacctaagcaaacgaacgcggccttaatgagcaaggagtaactaagaccgtctgcggcagtctacccaaagtttatccaaaaaaacactgttttgcacttgtagtacaagtttgattgaatatggggatgggtaagctgctggagatagactaagaggacacatcgtcacaataccattacacttacaccaatgccatctcatcagagtaagttcag

SEQ ID NO: 83644 - DNA, 778 bp, Zea Mays
cggcgaactcgtccttcgagaccgtttgttctcctcccacagccgcgtctcattgccgtcttcgctagggttcgtgcaccgacgtcgacgactgagacccgtcgccaaggaacctcttcccccgttgttcggagggttgcctcactcacaccggcgacgccgctccgtcttcctctggtaccccctcgtcgcgtcggcatcttcccagatttccgtatcatctcggggtctgcgtgttcggttccaagatcaacagcagccaaggtagtatgattcacaaattgttgcacactttactgtccacatggatgaaattttttttgtttacggtttactgggattaccattgttctgttgtataattcttatttctggagtcattatttgttagtttgtttgtcacaacaactatgttgatggtacgtgttcgtactctattagttactacctctatgttagcttcaaccaaaggttgtccatgttagaaggcaattgatgtcaatacatgcaagttagtagattgtccccttgttagttaactaaccacctaaatccacatcagatggattcagcagactccatagccgacaaggcaattgaagcttcagaacctggagtcattccaactgcacctcaatttggtgaagttggctttgttcggtgggaactgagcgcgagaggtgaggggccgagggagggtgatccccctcccgatggcgatgtcacgaccctaatgcatagattcagacaaggtaacaagaggacaagaagggagacg

SEQ ID NO: 83645 - DNA, 2510 bp, Zea Mays
gctctgaccttccctccctccctccctccctcttggaccgagcgttcttctcttgcttttgccaaccagaagcctcgagccgacgcatccaagcatctcctccccctctaacctcccctcctcccaacaccatcagcgagcggtgccgactgcctcgcaaggccagcagcgcctcgcaagcgagcccaccgccgctgatcaccaggcctggttgttgaggcgaccctcgcgtgggactgcgacagcgccacagcggcgatggcggggctgccgccggtcgccaggcggctccggctccggctcgcgaccgcggcgctcctcctcgtcctgctgctcgcggtgaccgcggcggtggcggcgcgcgaggggcggggcctggcgcgggtgcagggcccgccgccgcggcaccgccacgcgtacgccgcgatgatgtacatgggcacgccgcgggactacgagttctacgtcgccgtgcgcgtcatgatgcgctcgctcacccgggtccgcgccgacgccgaccgcgtcctcatcgcctccgccgacgtgccgcgcgactgggtccgcgcaatgacagaagaggatggcatgagggtggtgatagtggagaacctcaggaatccttatgagggcaacctaggagggaccaacaagaggttcaagttgacactgaacaagctttatgcgtggaccctggtggactatgagcgtgtcgtcatgattgattctgataacatcttcctccagaacacagacgagctattccagtgtggacagttctgtgctgtgttcatcaacccgtgctacttccacactggtcttttcgtgctccagccttctattgatgtattcaagggcatgcttcatgacctggagaccggccgtgaaaactctgatggtgctgaccagggctttttggttgggtgctacccagacttgctcgataaaccaatgtttcaccctcctgagaatggcacaaagctcaatgggacctatcgccttcctctcggctatcaaatggatgcatcctactactgtgagtgatgcaagttacagagcttcaataccaatgcacctgcttgtggcgactgcttctgaaaatttcaaccacccttttcattgaacactgcagatctcaagctacattggcatgtcccgtgtgggccaaacagtgttatcacattccccagcgcaccttggtttaaaccttggtactggtggtcatggccggtcttgccactaggactttcctggcacaagcagcgctgggacgatcttgggtatgcttctgaaatgccagtgatcctgatggaggttttaatgtacatagttatcataacggtcaccagactggcaaggccagggatgaccaaactgtgctacaaccggcggcctgagaagcaaagtgccctggtgcagtggctgatcaagctaactgcaattgtggctatggtggctgcgtactccattccattctttgtgatcccacgcacagttcacccgatcatgggctggtccgtctacctgtttggcgcgctcgcgttgtcggtgctcgttatcaacgtttttctgctcccgccacttgacgtgcttacaacgtggctcgcaattgtggggatgctcttcgttatggcgttcccatggtaccatgatggtgttgtgagggctctcgcagtctttggatacgcattttgctctgcgccattcttgtgggcatccgtggtgaggatgatggactcactgcagaccatgctcgagagggatccgttcttctcccggattggtgaaccaacacaggagactgaattcagcaagctgtactgattcttttgtgcacagattagagatgcttcgtcaccatatgaacagctggttcggaccagttagttttcgattgattctggtggttttcgctcaggcattccattgtgtgctcgggtagtaatgtataaacattgcctgcggcagccatgattgatgcagatacaggaaagataggccagttgtactgaactgaaaaaaaggaagcatatttgctgcatggaacgggacaggggattgttgcgaagtaccttatttcttgccaacttggatcgccaaaactatttctgagcaaattcctttttgcagtctgcattatggaaacatgctacataaggggctgagatggtatagaaaatgaggtgctctcaactggacatgttctctactgatggagaaactagaagacatgcccctctaaatttcagcatcttgcctagaccgaaccattaacttgtgctgcaactctggttgcctgggaagaacaatcttggtgccgtttggttcagcttctgggcggcttctggccgccagaagcagaagctgcaaccaaacgcagaaattttcgctccgcttctgggcgccgcgcttcagttagaagccgaccgcccacagtccgcaggaagcggcccgcagttcgcttctgttagaagcccccgcccacttcgctagggtttaggtgacgcaacgcg

SEQ ID NO: 83646 - DNA, 1333 bp, Zea Mays
caacgctcaacagcagtgatacggtgctgcacgggtcctcatctgtatgactgtatcacatatgcatacgattctgtccgcatcaacgctcaaaggcacatgcgggctgcggcatggtgtgaggggtggggatgaagtggaggcaggaaggtggcgcgtccagcggattggccttgggcatcatggtcaggttacaacaacaattaacaaccttatccttggtcgagtatattgccatcaccatggcacaatgaacataagtgggaatagacgatattcatgcaaactgacgtttaaagagcagtctttccttgatcggaatcctcgccaggttcaaggagttgtcaacgatgctgatggaagcaaggtcgcaacattgatggggaagtgggatgaaagtatgcattatatcatcaacaatgatgcctccaagaccaactcccatggttcacatgagggttctggtgccactttgctatgggagaaaaacgagcctccagtcaatcccactcgctacaacttgtccacatttgcaataacattaaatgagttaacaccagagctcaagctgccaccaacggattcaaggctgagaccagatcaacgtcacctggagaatggggagtacgagaaggccaatgctgaaaaactgcgtctcgagacacggcagcggatggcaaggaagatgcaggagagtggctggaaaccaagatggttccaaagggacagcgaggatgggacataccgctacgtcggaggctactgggaggcaagggagcagagaacatgggttggctgcaatgacatatttggtaacttgtctagcagcccaaagctgccgccatccggtctcaacactagctcaagtatatagaggtaagggcatactgtagtcagtatgtgttgacgtcacattagtcacttatggtacataattgagaggggcttctctcgtttctgttgtgttacgtgttaagctgtgagctaacatgcttctgtcgatactaggagctgacatcgcattaatcacttgggtttagctgtgagctaacatcacttgtggtacactgaatcatttgtcacattgaagccaaggacattcaagcttaacccaagcttttgtcgatactagaaagaacacgagaaatattgccaaaactattgttaaaagaattctttatgatatcattttcttctgcattgcacaaggacgttttgcatgtttggtgcttgtgttgtttgtctcgttggtgatgctgctcaaggttgttcaagaactagagcatcaggctgggcttcatattgtgatgctaaaatttgtaggaaattggtc

SEQ ID NO: 83647 - DNA, 1200 bp, Zea Mays
caacgctcaacagcagtgatacggtgctgcacgggtcctcatctgtatgactgtatcacatatgcatacgattctgtccgcatcaacgctcaaaggcacatgcgggctgcggcatggtgtgaggggtggggatgaagtggaggcaggaaggtggcgcgtccagcggattggccttgggcatcatggtcaggttacaacaacaattaacaaccttatccttggtcgagtatattgccatcaccatggcacaatgaacataagtgggaatagacgatattcatgcaaactgacgtttaaagagcagtctttccttgatcggaatcctcgccaggagttgtcaacgatgctgatggaagcaaggtcgcaacattgatggggaagtgggatgaaagtatgcattatatcatcaacaatgatgcctccaagaccaactcccatggttcacatgagggttctggtgccactttgctatgggagaaaaacgagcctccagtcaatcccactcgctacaacttgtccacatttgcaataacattaaatgagttaacaccagagctcaaggagaagctgccaccaacggattcaaggctgagaccagatcaacgtcacctggagaatggggagtacgagaaggccaatgctgaaaaactgcgtctcgagacacggcagcggatggcaaggaagatgcaggagagtggctggaaaccaagatggttccaaagggacagcgaggatgggacataccgctacgtcggaggctactgggaggcaagggagcagagaacatgggttggctgcaatgacatatttggtaacttgtctagcagcccaaagctgccgccatccggtctcaacactagctcaagtatatagaggagctgacatcgcattaatcacttgggtttagctgtgagctaacatcacttgtggtacactgaatcatttgtcacattgaagccaaggacattcaagcttaacccaagcttttgtcgatactagaaagaacacgagaaatattgccaaaactattgttaaaagaattctttatgatatcattttcttctgcattgcacaaggacgttttgcatgtttggtgcttgtgttgtttgtctcgttggtgatgctgctcaaggttgttcaagaactagagcatcaggctgggcttcatattgtgatgctaaaatttgtaggaaattggtc

SEQ ID NO: 83648 - DNA, 1953 bp, Zea Mays
gtttcagtacattgtttctttcctatcttcatttgatcatgtggaatgaaataatatagcaacacagaatcttctgatgatgttggcaaacaagagattagtgaactatcagatggagatgattttcatttctatgacacaaggcaaagtttcagtgaatttactacgactcctgctgacctgagaaagggatgtgtaaacaccggaaatgaagatcataaatctgttgaatcactgactgttgatgaggccgagaaatatatgctgtcacatccaaaaaggcgctcacagttgcctgagccaatagaaaaggagaaaggggttagcctttggtcaatgattaaagacaatgttggaaaggatctaacaagagtctgccttcctgtttacttcaatgagcctttatcttctctccagaagtgctttgaagagttggagtactcttatttgctggatcgtgcatatgaatgtggtttaagagggaatggtctgatgagaattatttatgtcgctgcatttgcggtctctggatatgcgtccacagattcccgcccctgcaaaccatttaatccattgcttggggaaacctatgaagctgattaccctgaaaaggggatccgtttcttctctgagaaggtcagtcatcatcctatggtcatggcatgtcactgtgaggggaaaggttggaaattttggggagacagcaatctaaagagcaaattctggggacaatccattcgactggatcctaatggtgtgctaactttagagtttgatgatggagaaactttccaatggagtaaggttacaacaacaattaacaaccttatccttggtcgagtatattgccatcaccatggcacaatgaacataagtgggaatagacgatattcatgcaaactgacgtttaaagagcagtctttccttgatcggaatcctcgccaggttcaaggagttgtcaacgatgctgatggaagcaaggtcgcaacattgatggggaagtgggatgaaagtatgcattatatcatcaacaatgatgcctccaagaccaactcccatggttcacatgagggttctggtgccactttgctatgggagaaaaacgagcctccagtcaatcccactcgctacaacttgtccacatttgcaataacattaaatgagttaacaccagagctcaaggagaagctgccaccaacggattcaaggctgagaccagatcaacgtcacctggagaatggggagtacgagaaggccaatgctgaaaaactgcgtctcgagacacggcagcggatggcaaggaagatgcaggagagtggctggaaaccaagatggttccaaagggacagcgaggatgggacataccgctacgtcggaggctactgggaggcaagggagcagagaacatgggttggctgcaatgacatatttggtaacttgtctagcagcccaaagctgccgccatccggtctcaacactagctcaagtatatagaggtaagggcatactgtagtcagtatgtgttgacgtcacattagtcacttatggtacataattgagaggggcttctctcgtttctgttgtgttacgtgttaagctgtgagctaacatgcttctgtcgatactaggagctgacatcgcattaatcacttgggtttagctgtgagctaacatcacttgtggtacactgaatcatttgtcacattgaagccaaggacattcaagcttaacccaagcttttgtcgatactagaaagaacacgagaaatattgccaaaactattgttaaaagaattctttatgatatcattttcttctgcattgcacaaggacgttttgcatgtttggtgcttgtgttgtttgtctcgttggtgatgctgctcaaggttgttcaagaactagagcatcaggctgggcttcatattgtgatgctaaaatttgtaggaaattggtc

SEQ ID NO: 83649 - DNA, 2713 bp, Zea Mays
caccctcctcctccctccgcgcgagtccacgtctcgtctcctcctcgccccactcgccaaccacgccggccgcaccgaatccgctgctcgaatactagactagtccgaagagccaaatggtggtcgcgtgaggggcgggcggcaggagatcggcccgcccggggaggggggagactacgatgcgggcgtgggagatgcacccgctctgctgcctcgccgccggggagtggccggcctcgggcgcggcccgcgacgaccgctccccgccgcccgagggctcgggggaggcgccggcggtggcgggggtgctgtacaagtggaccaacatcggcaagggctggcgcccgcgctggttcgcgatccgcggcggcgtgctggcctactcgaagatccgccggcgcgtcgcggcggctcctccgcgtcccgcctccgaggccgcgggcggcgtcaggctcatcggggtggcgcgcggcgccggggagcgccccatcggattcgtgcctctcaagatgtcatcatttagtgaaagtaaatcagatgataaacgtttttatataattactccgaccaaaacacttcaactgaggactggttgcgcaaaggaccgggcgacttggattgaagcgcttgtcactgcaagaagcgagtattcttttaatggggatttatcaggtgaccaaaacgtcgcatcattttctacagaaaagctcagaaatcgcttgcacgtcgaaggtgttggtgaggcagttattaaagactgtgaacagattattcagtcagaattttcgcagtaccaaacacagatgaagcagcgttgcgaagagtatttgagttttattggcagtcttccacgggaagttgaggtagttaattcagtagattcaactgtccctgagaagtcacagctggaactgttcaagcatgactgctccagctccggaaaatgtagtgaatatagcaacacagaatcttctgatgatgttggcaaacaagagattagtgaactatcagatggagatgattttcatttctatgacacaaggcaaagtttcagtgaatttactacgactcctgctgacctgagaaagggatgtgtaaacaccggaaatgaagatcataaatctgttgaatcactgactgttgatgaggccgagaaatatatgctgtcacatccaaaaaggcgctcacagttgcctgagccaatagaaaaggagaaaggggttagcctttggtcaatgattaaagacaatgttggaaaggatctaacaagagtctgccttcctgtttacttcaatgagcctttatcttctctccagaagtgctttgaagagttggagtactcttatttgctggatcgtgcatatgaatgtggtttaagagggaatggtctgatgagaattatttatgtcgctgcatttgcggtctctggatatgcgtccacagattcccgcccctgcaaaccatttaatccattgcttggggaaacctatgaagctgattaccctgaaaaggggatccgtttcttctctgagaaggtcagtcatcatcctatggtcatggcatgtcactgtgaggggaaaggttggaaattttggggagacagcaatctaaagagcaaattctggggacaatccattcgactggatcctaatggtgtgctaactttagagtttgatgatggagaaactttccaatggagtaaggttacaacaacaattaacaaccttatccttggtcgagtatattgccatcaccatggcacaatgaacataagtgggaatagacgatattcatgcaaactgacgtttaaagagcagtctttccttgatcggaatcctcgccaggagttgtcaacgatgctgatggaagcaaggtcgcaacattgatggggaagtgggatgaaagtatgcattatatcatcaacaatgatgcctccaagaccaactcccatggttcacatgagggttctggtgccactttgctatgggagaaaaacgagcctccagtcaatcccactcgctacaacttgtccacatttgcaataacattaaatgagttaacaccagagctcaaggagaagctgccaccaacggattcaaggctgagaccagatcaacgtcacctggagaatggggagtacgagaaggccaatgctgaaaaactgcgtctcgagacacggcagcggatggcaaggaagatgcaggagagtggctggaaaccaagatggttccaaagggacagcgaggatgggacataccgctacgtcggaggctactgggaggcaagggagcagagaacatgggttggctgcaatgacatatttggtaacttgtctagcagcccaaagctgccgccatccggtctcaacactagctcaagtatatagaggagctgacatcgcattaatcacttgggtttagctgtgagctaacatcacttgtggtacactgaatcatttgtcacattgaagccaaggacattcaagcttaacccaagcttttgtcgatactagaaagaacacgagaaatattgccaaaactattgttaaaagaattctttatgatatcattttcttctgcattgcacaaggacgttttgcatgtttggtgcttgtgttgtttgtctcgttggtgatgctgctcaaggttgttcaagaactagagcatcaggctgggcttcatattgtgatgctaaaatttgtaggaaattggtc

SEQ ID NO: 83650 - DNA, 2847 bp, Zea Mays
cagcgatattctttattgcagaggagattctatttatatacaaccaaagggtgcatccccaagggatgtgtcctttagggagaaacagtcgcgccctttggagtggattgatcacaaaatattgtaacaccctcctcctccctccgcgcgagtccacgtctcgtctcctcctcgccccactcgccaaccacgccggccgcaccgaatccgctgctcgaatactagactagtccgaagagccaaatggtggtcgcgtgaggggcgggcggcaggagatcggcccgcccggggaggggggagactacgatgcgggcgtgggagatgcacccgctctgctgcctcgccgccggggagtggccggcctcgggcgcggcccgcgacgaccgctccccgccgcccgagggctcgggggaggcgccggcggtggcgggggtgctgtacaagtggaccaacatcggcaagggctggcgcccgcgctggttcgcgatccgcggcggcgtgctggcctactcgaagatccgccggcgcgtcgcggcggctcctccgcgtcccgcctccgaggccgcgggcggcgtcaggctcatcggggtggcgcgcggcgccggggagcgccccatcggattcgtgcctctcaagatgtcatcatttagtgaaagtaaatcagatgataaacgtttttatataattactccgaccaaaacacttcaactgaggactggttgcgcaaaggaccgggcgacttggattgaagcgcttgtcactgcaagaagcgagtattcttttaatggggatttatcaggtgaccaaaacgtcgcatcattttctacagaaaagctcagaaatcgcttgcacgtcgaaggtgttggtgaggcagttattaaagactgtgaacagattattcagtcagaattttcgcagtaccaaacacagatgaagcagcgttgcgaagagtatttgagttttattggcagtcttccacgggaagttgaggtagttaattcagtagattcaactgtccctgagaagtcacagctggaactgttcaagcatgactgctccagctccggaaaatgtagtgaatatagcaacacagaatcttctgatgatgttggcaaacaagagattagtgaactatcagatggagatgattttcatttctatgacacaaggcaaagtttcagtgaatttactacgactcctgctgacctgagaaagggatgtgtaaacaccggaaatgaagatcataaatctgttgaatcactgactgttgatgaggccgagaaatatatgctgtcacatccaaaaaggcgctcacagttgcctgagccaatagaaaaggagaaaggggttagcctttggtcaatgattaaagacaatgttggaaaggatctaacaagagtctgccttcctgtttacttcaatgagcctttatcttctctccagaagtgctttgaagagttggagtactcttatttgctggatcgtgcatatgaatgtggtttaagagggaatggtctgatgagaattatttatgtcgctgcatttgcggtctctggatatgcgtccacagattcccgcccctgcaaaccatttaatccattgcttggggaaacctatgaagctgattaccctgaaaaggggatccgtttcttctctgagaaggtcagtcatcatcctatggtcatggcatgtcactgtgaggggaaaggttggaaattttggggagacagcaatctaaagagcaaattctggggacaatccattcgactggatcctaatggtgtgctaactttagagtttgatgatggagaaactttccaatggagtaaggttacaacaacaattaacaaccttatccttggtcgagtatattgccatcaccatggcacaatgaacataagtgggaatagacgatattcatgcaaactgacgtttaaagagcagtctttccttgatcggaatcctcgccaggttcaaggagttgtcaacgatgctgatggaagcaaggtcgcaacattgatggggaagtgggatgaaagtatgcattatatcatcaacaatgatgcctccaagaccaactcccatggttcacatgagggttctggtgccactttgctatgggagaaaaacgagcctccagtcaatcccactcgctacaacttgtccacatttgcaataacattaaatgagttaacaccagagctcaaggagaagctgccaccaacggattcaaggctgagaccagatcaacgtcacctggagaatggggagtacgagaaggccaatgctgaaaaactgcgtctcgagacacggcagcggatggcaaggaagatgcaggagagtggctggaaaccaagatggttccaaagggacagcgaggatgggacataccgctacgtcggaggctactgggaggcaagggagcagagaacatgggttggctgcaatgacatatttggtaacttgtctagcagcccaaagctgccgccatccggtctcaacactagctcaagtatatagaggagctgacatcgcattaatcacttgggtttagctgtgagctaacatcacttgtggtacactgaatcatttgtcacattgaagccaaggacattcaagcttaacccaagcttttgtcgatactagaaagaacacgagaaatattgccaaaactattgttaaaagaattctttatgatatcattttcttctgcattgcacaaggacgttttgcatgtttggtgcttgtgttgtttgtctcgttggtgatgctgctcaaggttgttcaagaactagagcatcaggctgggcttcatattgtgatgctaaaatttgtaggaaattggtc

SEQ ID NO: 83651 - DNA, 2216 bp, Zea Mays
caacaacacctacttcctcctccggaattgtgattcttgaccacaaagtggcagatttgacacatctcggtccccaacctcacctcgctccttccttgcatatgcaagcggcaacgacaggttcgcagagccctagaaaagattagatccccatctcccactgcccatgcagcagtaaatcaaggcaggtgaaaaaaggcatgtgagccgagagagaaacaggaaagaagacggaaaaaaaaagaaagaaagaagccgctggggctgtgctgacggctggcgctacgggcagccgtctgcaccagtatccagccgcgaaaaaaatcagaagatccgagacggagttcgacgaggggaggcgcgacaaagaaatatccaacggaaagatggaggatctgaataagttttatgcttctttctggaagcagtctagcagttcacttagtagcctgcactctgttcatgagcataagctgatgaacttgggttcgaagcgcaatcaaacccaagaagtttccaccaactacaataaacgtaaatcgttgtccggaattgtggaactgagttcagatgttaggagttcaatccggaggaaatctgatgcttatcgcgaagtgattgacttggagaagccatcggtttatggtgatgccgtggaagctatcggttgctctggccttggcaaccttgccaaccaaaatggcaagtctcaggatgtttctccacagaacaactcacttgcagagtctcttcagttgtgtagagactggaagacatcgcgcgtaagtgttgttggatctagtcacactccggattgccagtcccctaccaaaacaagtaacaatgaagcaagacaatcactatttgacctgaatgttcctccagaagaaagccttcttatgccttctactctatttccttcttcctcaacgtattgtggaaatttttcagacagacctagagaaacttctgaaaaagaacgtgtctctggtattggatcaacgaaaggatcttccatcacggtgatcacgcccgactcagctgcagacagttcaagggatgtggtaactgaatcgtcagtccaacagaagttcccttttgaccttaacgtgtcacctgaaaacaccaacatgccatcagaaatcaacgattatagagataaggttgtaaataatggtgtaagtaaaggaacagcacccgatcattctttctccacgaaaaatggcctgcttgcagaaacgtccaccaaacatgtggttcttggacatgatagtgtattggcacacaagcaggatgacagtcacgtgcttctcacagtcccgacagctaatggtatcgataaagctcactcgccacagcctggaaccattaacaaggagtttttagaccctggatctcctcttcttgataacaatttccatccaagacttgggacatcccacaatggagcatcagatattcaggagttaagcatgcttcaatgtaaggtcgacgatggtggcaccacagctgatactgcagctagaacccttctttccatgtttcagcatagttctgaatgtgttgctcatcgccctggaagcagcaaccagacagcagctcagaaggtggacgacgagcctcagccttcgttggactcgttcgagaaaaccgtgttggattcagaggaggccaaagatgacgggcaatccgtcaccgtgaccccacctttcaaggaagggccagcatgtcggatcaagctaaagagagggaggggcatgagaaatttccagagggagatagttcctgggctccttctagggaggcaggagatatgcgaggacctgaaagctataggttacgaggcaaagaaggctcggtctaggaaacctcgcaagggtccaggtgcgtcttcggctcgacccaggccgcgcaagcgtggagctgccaagcactgaccaggagcatctgtgcgttccgtggcagggcgccatggggcaggcgagatccagaagaatcgttctaaccatgtgaatattcattcgtgtgtatcaagcctagtttcaaacactcggtttgctagctagtggatatttagaccctatttgttttgctctcctagattatataagtagattatataagttcgattatggtggaaagttatgagagtaaattattattttgatatcacaaataaactgaaataaggtaccccagtactagtttagatttaa

SEQ ID NO: 83652 - DNA, 672 bp, Zea Mays
gaaaagaggctcggccgcaccgagctggagccgactcgccatcgtcgagtttttttttcggccctacttctgtctccacggctgccgacgagccgcgcaaccgaactcactgcaggaggactcgcacagatcggtgagcgagcaagcgagagatggctgggaggctaaccgcggcagggtcccgcatcctgggcggcggcggcgcacgcgccgcggcttccgccctccgacaccgcgccggcatgggcctccccgtcggccgccacatcgtccccgacaagcccctccccgtgaacgacgagttggtatgggataacggcacgcccttcccggaaccctgcatcgaccgccttgccccgcacatcggcaagtacgaggcgttggcgtggctgtgcggagggctagggttcttcgctgccctcggtatggctgctgttgtgaacgacaaggcctccaatataccatatgggctgaccggcggcgtacctggagagcggccaactgcgtctggcggccgacgacgtctgctcagtctgggcgcgacttcgtctggcgcgatggagtttgctcagtctggcggccgacggctctgcgcgatggcggctgggaactggcgtctgaggagcgcgatggatgagccggctgggtaaaggcccattatggcccactaac

SEQ ID NO: 83653 - DNA, 465 bp, Zea Mays
aaaagaggctcggccgcaccgagctggagccgactcgccatcgtcgagtttttttttcggccctacttctgtctccacggctgccgacgagccgcgcaaccgaactcactgcaggaggactcgcacagatcggtgagcgagcaagcgagagatggctgggaggctaaccgcggcagggtcccgcatcctgggcggcggcggcgcacgcgccgcggcttccgccctccgacaccgcgccggcatgggcctccccgtcggccgccacatcgtccccgacaagcccctccccgtgaacgacgagttggtatgggataacggcacgcccttcccggaaccctgcatcgaccgccttgccccgcacatcggcaagtacgaggcgttggcgtggctgtgcggagggctagggttcttcgctgccctcggtatggctgctgttgtgaacgacaaggcctccaatataccata

SEQ ID NO: 83654 - DNA, 1227 bp, Zea Mays
ctttcccgtcgccaggttcggttgctcagccaccagtccggctcccctccatcaggaacccatccctgctgctaccggtggcgagcgtgtgcatcaagatcacggcgctgtgcccgatcgcgctgctggagaaggcgagcgacctgctgcggtggcagaagaggcacccgtcgctgaacctgccgtggaagacgcacgacttcccgatcctgtcggactcgagcccgctgcacctcacggcgtcggagccgccggcgctgtcggcggaggaggagagggagctggagctggcgcacgagcgggtgctggcggtgtgcgcgcggtgcgcggagcgcggcgtgccgctgctggtggacgcggagtacgcggcggtgcagccggcgatcgactacctcacgctcgccggcgcgctggcgtgcaacgccgagcgctccatcgtgcacggcacggtccaggcgtacctacgcgacgcgcgggagcggctggagaccatggcgcgcggcgtggagcgcgcgcgcgtgcgcctgggggtcaagctggtgcgcggcgcgtacctggcccgcgaggcccgggtcgcggccgccctcggcgtgccgtcgcccgtccacggcagcatccgggagacccacgactgctacaacggatgcgccgccttcctcctcgaccgcgtccgccgcgggtccgcctccgtcgtgctcgccacccacaatgtggagtcaggccaactcgcggcggcgcgtgctgaggagctggggatccccaggggagaccgcaacctgcagttcgcgcagctgatgggcatggcggacgggctgtcgctgggcctccgcaacgccgggttccaggtcagcaagtacctgccgtacgggccggtggagcagatcgtcccctacctcatcaggcgcgccgaggagaacaggggcctcctctccgcctcctccttcgacaggcagctgctccgggaggagttggtgaggaggttcaaggctgcggtgctgggacgtgagtgaagtgaacctgctgaggctactctgctgtgaagctgggacaagggccagttgaaggctagaagctgtaaatacacccttcaacagtcttcagacattgatgtatccggggctttcttgaataaatcgattgaatggaataatgaggcttatcgagcttaaacatgcctaaacggacggcacgccgcgagcacatgtaattaggaacttgcgtcctagt

SEQ ID NO: 83655 - DNA, 204 bp, Zea Mays
ggttgcgatctgtgttgcgttgcatccaccaggatccgacttgcagcggctccaatggcctccaggatcagacgaaggcggcaccagaatgtggtggaactgtccgaaaattgccaaaccagaattattacttaccaccaggttcaggtgccgaaaactatactgatcgatcacaagccgcagtttacctggtatacatcataa

SEQ ID NO: 83656 - DNA, 3809 bp, Zea Mays
gattccttccttcccctgatcccctcccctcctcgccgaaagggagggagaaggatggacagctcagggctgcgggctccggcgccgattcacatggccgggggatgctgtgaggactgaggaccttggatgggcgttcgtcccgccggccgagcgcccgcgcgagagagaaggggacagaaacgagtcagaaaggccggccggtgaagctccgtccgtgattgctcaggtaggcttttttccttgcttcgaaggtatttctgctggctttctttcttggtgtcgcactgtagctactatttgtattagtgtgacgaatctgagctttcttctccgtgccaatacactgactgagcggctgattgataacgtgttgggggatttcgttttttttttgctttttagaaaataggtttaacgtttcgatatgcttccatcaattttttctgtctgtatctggaagtgttcagattgtttgaacgtcctttgctatcgcctgtcggaacctggctgacgaactattttcattcaaactgcggtgttcatcatcaggtccaactgctgctgatctccctcatgaactgagcaatcaacagaagaaacaaaagggccgtttccgctacagagagaacgaataaatcaccggaaatgggaaggcgaggccacggggggtcagcgtcacaagacgacgacggtgtgggctgtgcatggggcctcatgcgcatgctctacttccgccgagaccccaagctcttgctggatgcaaagcagttgagtgggaggcatgcgttccgtgaggtcagtgagagggggcattcagcaaagaggtccaaggattttgacgagatagaagaagatggtaacatagaagaatgcacttcgcagaaaccaacagtcaaaaaccttatggaggatgaattgggaaaagtaaagctgctgaagaaaaatccaaatgatgagattcagagaagattagtggacctgggaaatgatgtctctcttggtaggagttcagagcatacaaataaatcaatagatagatcatatcaccaggcaggaatctctacaccttcaattccaccaatggattctggggttttgaattatgctgaagaatatgatcttgaatctgtcctgatgaatttcctaggtgaaatttatagttgtcacgatgaatgcccacacagtgattgcaagaataagaatgaattgtgtccttcactgaagtccctaatccataaaaaggtcaatgaattgaataatcttcctcgcaatattggctgcgcgcaatctcaagagggtaatgatgctaagctatctgaccagaataatctttctaacaccatggcagcccgatccaaacaattcaaggatgcattggaaatactgggttcaaacaatgaacttttcatgaagctgcttcagaagccaaaccaacatatagttgacagtatccaaaagcatgaaaacagtaaggtggctgccggattagagcccaataaaattcatggacagaccaattttctggtaggaagaggaggctcaagacagcatcctttggctacaaaggagcaggctaaagagagaaaatatatgttcttctggaggaagggtaaatcaaatagaaggcagatgcttgaggcaactgacacagatcagactgttaccaaaattgttattctgaagccaaatccagaaagagggtttaatcagaaagcagctactgcaagaactttacatcaacagccatgtacatcgcatgctcctgaatgtggtggaattgataactcaaagttttcaattaaggaagttaagacaagattcagatttgtgaatagtgagagtagaagagaaagcaatttagcacctgcagaggaccttcaaggatacccacggaagttcaaagattcttttgttgcaattaataaagattttagacatttcccagaagggagcttggcaaacaagtctggatcagacatcaagaatgcaatcaaacctttcatcagcagtaagcaaaatgggagcataagcggaaacagtggtcatatagtagcaccaaaaggtgcatctatcttctatgaagaggccaggaggcatttatcagagatgctaaaggataatgactgttctgtaaactatccagcagttcaaatctcaaaatccttggaaggcatactttctctgcctcatggcaatgtgtcaacccctaggagtagcctgtggggaaaggattaccttggcccctcacctggagaaacagatgtttttgttgcatgtgaggttcagagagaagaatgcacacaagagagaagccaatcacaagaggattttggaagcattgctcgatgtactagtgcagcagttgatgatcaggtgacagttcgagatggatattacacgaatgaagcacaagaaggatcaaggcatgctcagaatgagccaggccttctgtatactgaaggaattcacaaattcatttgcggcaaaaacatttgcgacgaacagtccgttccagcagaacaaagtagacacgatgaaatactagaagaaataaaacaaggaaaagaacatatcaaaatgtccccaacctctgctgaggggatagttgaaacgttggggcagcaagagccagaaacaccagaaccaagagcatcaaccgaactaatctcagatggttctcccgagcaaagcgatgaaaagcaagagaggcccagtccagtatctgttcttgagtcattctttgaagatattgacaatccagactgcataaacaagaaagaatgtgagctgcatggtctccaaaggaccctgtattttccagataatgaaccagatgttagcctccttggggaggacaggagtgtcagagtggattacataaagttggtgctagaactctcggagttgtgtgcagaacaaaatttagaggtatggtacctagaggacgaattaatcagcccctgcttgtttgaagaactacagagtcagggcgatcaaacggatgatctaaagctcctatttgactgtatctgtgaggctctaacagagatccaagagagatattttagactctcttggctaactttcctaaagcaagacataaggacacctccgattggagaaaacctcatcacagaagttgatagatatgtttacgggtatatccaacatagtcttccaatcactctagagcagataatcaagagggacctggaagttcagacgtggatgaacattagatcgaaaactgaagggattattatggagatgtgggagtttgtattggatgagttgatagatgagactgtctttgatttgtggatttgaagttctgattagatctcgtccatggtgccttgtggcgagtatagtgagtaggatacgtgagttttcgtgctgacaataaccagttgtatgcggcagaataacatgatgggctactactagtcaagtgtgtaactacagtggaaatggttctcgtggatgaaaacaaaagtttaggttcagcaaatctccagaattgtgcagtttgtgtggatgaagttggttggggacggtctgtcaccagaactctcagccatgcctctcaacagcgaattgtacagcagatttgagagtttgtctgtgcatgtgtgatgcgtacacttttcagcgtgatcagatcacgcttatcgtataggtttgttttgtgtgtaaatgtgcaaaaaagtaatcatacatgttaatcaaatggcatgttttgagtatgcttgagcattatttgaaggaccaaattcgttaatcagaggaagggaaatggtataggt

SEQ ID NO: 83657 - DNA, 3602 bp, Zea Mays
attagtttgtctagctaaccgcggaagaacaaagggtaacatccgattccttccttcccctgatcccctcccctcctcgccgaaagggagggagaaggatggacagctcagggctgcgggctccggcgccgattcacatggccgggggatgctgtgaggactgaggaccttggatgggcgttcgtcccgccggccgagcgcccgcgcgagagagaaggggacagaaacgagtcagaaaggccggccggtgaagctccgtccgtgattgctcaggtccaactgctgctgatctccctcatgaactgagcaatcaacagaagaaacaaaagggccgtttccgctacagagagaacgaataaatcaccggaaatgggaaggcgaggccacggggggtcagcgtcacaagacgacgacggtgtgggctgtgcatggggcctcatgcgcatgctctacttccgccgagaccccaagctcttgctggatgcaaagcagttgagtgggaggcatgcgttccgtgagagagggggcattcagcaaagaggtccaaggattttgacgagatagaagaagatggtaacatagaagaatgcacttcgcagaaaccaacagtcaaaaaccttatggaggatgaattgggaaaagtaaagctgctgaagaaaaatccaaatgatgagattcagagaagattagtggacctgggaaatgatgtctctcttggtaggagttcagagcatacaaataaatcaatagatagatcatatcaccaggcaggaatctctacaccttcaattccaccaatggattctggggttttgaattatgctgaagaatatgatcttgaatctgtcctgatgaatttcctaggtgaaatttatagttgtcacgatgaatgcccacacagtgattgcaagaataagaatgaattgtgtccttcactgaagtccctaatccataaaaaggtcaatgaattgaataatcttcctcgcaatattggctgcgcgcaatctcaagagggtaatgatgctaagctatctgaccagaataatctttctaacaccatggcagcccgatccaaacaattcaaggatgcattggaaatactgggttcaaacaatgaacttttcatgaagctgcttcagaagccaaaccaacatatagttgacagtatccaaaagcatgaaaacagtaaggtggctgccggattagagcccaataaaattcatggacagaccaattttctggtaggaagaggaggctcaagacagcatcctttggctacaaaggagcaggctaaagagagaaaatatatgttcttctggaggaagggtaaatcaaatagaaggcagatgcttgaggcaactgacacagatcagactgttaccaaaattgttattctgaagccaaatccagaaagagggtttaatcagaaagcagctactgcaagaactttacatcaacagccatgtacatcgcatgctcctgaatgtggtggaattgataactcaaagttttcaattaaggaagttaagacaagattcagatttgtgaatagtgagagtagaagagaaagcaatttagcacctgcagaggaccttcaaggatacccacggaagttcaaagattcttttgttgcaattaataaagattttagacatttcccagaagggagcttggcaaacaagtctggatcagacatcaagaatgcaatcaaacctttcatcagcagtaagcaaaatgggagcataagcggaaacagtggtcatatagtagcaccaaaaggtgcatctatcttctatgaagaggccaggaggcatttatcagagatgctaaaggataatgactgttctgtaaactatccagcagttcaaatctcaaaatccttggaaggcatactttctctgcctcatggcaatgtgtcaacccctaggagtagcctgtggggaaaggattaccttggcccctcacctggagaaacagatgtttttgttgcatgtgaggttcagagagaagaatgcacacaagagagaagccaatcacaagaggattttggaagcattgctcgatgtactagtgcagcagttgatgatcaggtgacagttcgagatggatattacacgaatgaagcacaagaaggatcaaggcatgctcagaatgagccaggccttctgtatactgaaggaattcacaaattcatttgcggcaaaaacatttgcgacgaacagtccgttccagcagaacaaagtagacacgatgtatgtcaggtaagccttgaataactgcatattttcctttttgtgatcattttttctaaatgtcccatgtttcataaaggaaatactagaagaaataaaacaaggaaaagaacatatcaaaatgtccccaacctctgctgaggggatagttgaaacgttggggcagcaagagccagaaacaccagaaccaagagcatcaaccgaactaatctcagatggttctcccgagcaaagcgatgaaaagcaagagaggcccagtccagtatctgttcttgagtcattctttgaagatattgacaatccagactgcataaacaagaaagaatgtgagctgcatggtctccaaaggaccctgtattttccagataatgaaccagatgttagcctccttggggaggacaggagtgtcagagtggattacataaagttggtgctagaactctcggagttgtgtgcagaacaaaatttagaggtatggtacctagaggacgaattaatcagcccctgcttgtttgaagaactacagagtcagggcgatcaaacggatgatctaaagctcctatttgactgtatctgtgaggctctaacagagatccaagagagatattttagactctcttggctaactttcctaaagcaagacataaggacacctccgattggagaaaacctcatcacagaagttgatagatatgtttacgggtatatccaacatagtcttccaatcactctagagcagataatcaagagggacctggaagttcagacgtggatgaacattagatcgaaaactgaagggattattatggagatgtgggagtttgtattggatgagttgatagatgagactgtctttgatttgtggatttgaagttctgattagatctcgtccatggtgccttgtggcgagtatagtgagtaggatacgtgagttttcgtgctgacaataaccagttgtatgcggcagaataacatgatgggctactactagtcaagtgtgtaactacagtggaaatggttctcgtggatgaaaacaaaagtttaggttcagcaaatctccagaattgtgcagtttgtgtggatgaagttggttggggacggtctgtcaccagaactctcagccatgcctctcaacagcgaattgtacagcagatttgagagtttgtctgtgcatgtgtgatgcgtacacttttcagcgtgatcagatcacgcttatcgtataggtttgttttgtgtgtaaatgtgcaaaaaagtaatcatacatgttaatcaaatggcatgttttgagtatgcttgagcattatttgaaggaccaaattcgttaatcagaggaagggaaatggtataggt

SEQ ID NO: 83658 - DNA, 3923 bp, Zea Mays
aagagggagaagaagagaagaggagaaaagaagaaagaaaagcgaaagcaaaggtgaccggcacctggattagtttgtctagctaaccgcggaagaacaaagggtaacatccgattccttccttcccctgatcccctcccctcctcgccgaaagggagggagaaggatggacagctcagggctgcgggctccggcgccgattcacatggccgggggatgctgtgaggactgaggaccttggatgggcgttcgtcccgccggccgagcgcccgcgcgagagagaaggggacagaaacgagtcagaaaggccggccggtgaagctccgtccgtgattgctcaggtaggcttttttccttgcttcgaaggtatttctgctggctttctttcttggtgtcgcactgtagctactatttgtattagtgtgacgaatctgagctttcttctccgtgccaatacactgactgagcggctgattgataacgtgttgggggatttcgttttttttttgctttttagaaaataggtttaacgtttcgatatgcttccatcaattttttctgtctgtatctggaagtgttcagattgtttgaacgtcctttgctatcgcctgtcggaacctggctgacgaactattttcattcaaactgcggtgttcatcatcaggtccaactgctgctgatctccctcatgaactgagcaatcaacagaagaaacaaaagggccgtttccgctacagagagaacgaataaatcaccggaaatgggaaggcgaggccacggggggtcagcgtcacaagacgacgacggtgtgggctgtgcatggggcctcatgcgcatgctctacttccgccgagaccccaagctcttgctggatgcaaagcagttgagtgggaggcatgcgttccgtgagagagggggcattcagcaaagaggtccaaggattttgacgagatagaagaagatggtaacatagaagaatgcacttcgcagaaaccaacagtcaaaaaccttatggaggatgaattgggaaaagtaaagctgctgaagaaaaatccaaatgatgagattcagagaagattagtggacctgggaaatgatgtctctcttggtaggagttcagagcatacaaataaatcaatagatagatcatatcaccaggcaggaatctctacaccttcaattccaccaatggattctggggttttgaattatgctgaagaatatgatcttgaatctgtcctgatgaatttcctaggtgaaatttatagttgtcacgatgaatgcccacacagtgattgcaagaataagaatgaattgtgtccttcactgaagtccctaatccataaaaaggtcaatgaattgaataatcttcctcgcaatattggctgcgcgcaatctcaagagggtaatgatgctaagctatctgaccagaataatctttctaacaccatggcagcccgatccaaacaattcaaggatgcattggaaatactgggttcaaacaatgaacttttcatgaagctgcttcagaagccaaaccaacatatagttgacagtatccaaaagcatgaaaacagtaaggtggctgccggattagagcccaataaaattcatggacagaccaattttctggtaggaagaggaggctcaagacagcatcctttggctacaaaggagcaggctaaagagagaaaatatatgttcttctggaggaagggtaaatcaaatagaaggcagatgcttgaggcaactgacacagatcagactgttaccaaaattgttattctgaagccaaatccagaaagagggtttaatcagaaagcagctactgcaagaactttacatcaacagccatgtacatcgcatgctcctgaatgtggtggaattgataactcaaagttttcaattaaggaagttaagacaagattcagatttgtgaatagtgagagtagaagagaaagcaatttagcacctgcagaggaccttcaaggatacccacggaagttcaaagattcttttgttgcaattaataaagattttagacatttcccagaagggagcttggcaaacaagtctggatcagacatcaagaatgcaatcaaacctttcatcagcagtaagcaaaatgggagcataagcggaaacagtggtcatatagtagcaccaaaaggtgcatctatcttctatgaagaggccaggaggcatttatcagagatgctaaaggataatgactgttctgtaaactatccagcagttcaaatctcaaaatccttggaaggcatactttctctgcctcatggcaatgtgtcaacccctaggagtagcctgtggggaaaggattaccttggcccctcacctggagaaacagatgtttttgttgcatgtgaggttcagagagaagaatgcacacaagagagaagccaatcacaagaggattttggaagcattgctcgatgtactagtgcagcagttgatgatcaggtgacagttcgagatggatattacacgaatgaagcacaagaaggatcaaggcatgctcagaatgagccaggccttctgtatactgaaggaattcacaaattcatttgcggcaaaaacatttgcgacgaacagtccgttccagcagaacaaagtagacacgatgtatgtcaggaaatactagaagaaataaaacaaggaaaagaacatatcaaaatgtccccaacctctgctgaggggatagttgaaacgttggggcagcaagagccagaaacaccagaaccaagagcatcaaccgaactaatctcagatggttctcccgagcaaagcgatgaaaagcaagagaggcccagtccagtatctgttcttgagtcattctttgaagatattgacaatccagactgcataaacaagaaagaatgtgagctgcatggtctccaaaggaccctgtattttccagataatgaaccagatgttagcctccttggggaggacaggagtgtcagagtggattacataaagttggtgctagaactctcggagttgtgtgcagaacaaaatttagaggtatggtacctagaggacgaattaatcagcccctgcttgtttgaagaactacagagtcagggcgatcaaacggatgatctaaagctcctatttgactgtatctgtgaggctctaacagagatccaagagagatattttagactctcttggctaactttcctaaagcaagacataaggacacctccgattggagaaaacctcatcacagaagttgatagatatgtttacgggtatatccaacatagtcttccaatcactctagagcagataatcaagagggacctggaagttcagacgtggatgaacattagatcgaaaactgaagggattattatggagatgtgggagtttgtattggatgagttgatagatgagactgtctttgatttgtggatttgaagttctgattagatctcgtccatggtgccttgtggcgagtatagtgagtaggatacgtgagttttcgtgctgacaataaccagttgtatgcggcagaataacatgatgggctactactagtcaagtgtgtaactacagtggaaatggttctcgtggatgaaaacaaaagtttaggttcagcaaatctccagaattgtgcagtttgtgtggatgaagttggttggggacggtctgtcaccagaactctcagccatgcctctcaacagcgaattgtacagcagatttgagagtttgtctgtgcatgtgtgatgcgtacacttttcagcgtgatcagatcacgcttatcgtataggtttgttttgtgtgtaaatgtgcaaaaaagtaatcatacatgttaatcaaatggcatgttttgagtatgcttgagcattatttgaaggaccaaattcgttaatcagaggaagggaaatggtataggt

SEQ ID NO: 83659 - DNA, 3714 bp, Zea Mays
ggtaggtttcaatgtcctgattgcagccatcgccttacgattaccgatttttcctgcggttggaaaaatgctggcgcacttgcgaaagtccaataatctactggtgcgacgcaatggccggccatgtggtgggctgccgtaacactgtagccctgctgcgctccgctcgtcgcattccattccacaagcaggcaaagcagagcgaagcaagagggagaagaagagaagaggagaaaagaagaaagaaaagcgaaagcaaagggagggagaaggatggacagctcagggctgcgggctccggcgccgattcacatggccgggggatgctgtgaggactgaggaccttggatgggcgttcgtcccgccggccgagcgcccgcgcgagagagaaggggacagaaacgagtcagaaaggccggccggtgaagctccgtccgtgattgctcaggtccaactgctgctgatctccctcatgaactgagcaatcaacagaagaaacaaaagggccgtttccgctacagagagaacgaataaatcaccggaaatgggaaggcgaggccacggggggtcagcgtcacaagacgacgacggtgtgggctgtgcatggggcctcatgcgcatgctctacttccgccgagaccccaagctcttgctggatgcaaagcagttgagtgggaggcatgcgttccgtgaggtcagtgagagggggcattcagcaaagaggtccaaggattttgacgagatagaagaagatggtaacatagaagaatgcacttcgcagaaaccaacagtcaaaaaccttatggaggatgaattgggaaaagtaaagctgctgaagaaaaatccaaatgatgagattcagagaagattagtggacctgggaaatgatgtctctcttggtaggagttcagagcatacaaataaatcaatagatagatcatatcaccaggcaggaatctctacaccttcaattccaccaatggattctggggttttgaattatgctgaagaatatgatcttgaatctgtcctgatgaatttcctaggtgaaatttatagttgtcacgatgaatgcccacacagtgattgcaagaataagaatgaattgtgtccttcactgaagtccctaatccataaaaaggtcaatgaattgaataatcttcctcgcaatattggctgcgcgcaatctcaagagggtaatgatgctaagctatctgaccagaataatctttctaacaccatggcagcccgatccaaacaattcaaggatgcattggaaatactgggttcaaacaatgaacttttcatgaagctgcttcagaagccaaaccaacatatagttgacagtatccaaaagcatgaaaacagtaaggtggctgccggattagagcccaataaaattcatggacagaccaattttctggtaggaagaggaggctcaagacagcatcctttggctacaaaggagcaggctaaagagagaaaatatatgttcttctggaggaagggtaaatcaaatagaaggcagatgcttgaggcaactgacacagatcagactgttaccaaaattgttattctgaagccaaatccagaaagagggtttaatcagaaagcagctactgcaagaactttacatcaacagccatgtacatcgcatgctcctgaatgtggtggaattgataactcaaagttttcaattaaggaagttaagacaagattcagatttgtgaatagtgagagtagaagagaaagcaatttagcacctgcagaggaccttcaaggatacccacggaagttcaaagattcttttgttgcaattaataaagattttagacatttcccagaagggagcttggcaaacaagtctggatcagacatcaagaatgcaatcaaacctttcatcagcagtaagcaaaatgggagcataagcggaaacagtggtcatatagtagcaccaaaaggtgcatctatcttctatgaagaggccaggaggcatttatcagagatgctaaaggataatgactgttctgtaaactatccagcagttcaaatctcaaaatccttggaaggcatactttctctgcctcatggcaatgtgtcaacccctaggagtagcctgtggggaaaggattaccttggcccctcacctggagaaacagatgtttttgttgcatgtgaggttcagagagaagaatgcacacaagagagaagccaatcacaagaggattttggaagcattgctcgatgtactagtgcagcagttgatgatcaggtgacagttcgagatggatattacacgaatgaagcacaagaaggatcaaggcatgctcagaatgagccaggccttctgtatactgaaggaattcacaaattcatttgcggcaaaaacatttgcgacgaacagtccgttccagcagaacaaagtagacacgatgtatgtcaggaaatactagaagaaataaaacaaggaaaagaacatatcaaaatgtccccaacctctgctgaggggatagttgaaacgttggggcagcaagagccagaaacaccagaaccaagagcatcaaccgaactaatctcagatggttctcccgagcaaagcgatgaaaagcaagagaggcccagtccagtatctgttcttgagtcattctttgaagatattgacaatccagactgcataaacaagaaagaatgtgagctgcatggtctccaaaggaccctgtattttccagataatgaaccagatgttagcctccttggggaggacaggagtgtcagagtggattacataaagttggtgctagaactctcggagttgtgtgcagaacaaaatttagaggtatggtacctagaggacgaattaatcagcccctgcttgtttgaagaactacagagtcagggcgatcaaacggatgatctaaagctcctatttgactgtatctgtgaggctctaacagagatccaagagagatattttagactctcttggctaactttcctaaagcaagacataaggacacctccgattggagaaaacctcatcacagaagttgatagatatgtttacgggtatatccaacatagtcttccaatcactctagagcagataatcaagagggacctggaagttcagacgtggatgaacattagatcgaaaactgaagggattattatggagatgtgggagtttgtattggatgagttgatagatgagactgtctttgatttgtggatttgaagttctgattagatctcgtccatggtgccttgtggcgagtatagtgagtaggatacgtgagttttcgtgctgacaataaccagttgtatgcggcagaataacatgatgggctactactagtcaagtgtgtaactacagtggaaatggttctcgtggatgaaaacaaaagtttaggttcagcaaatctccagaattgtgcagtttgtgtggatgaagttggttggggacggtctgtcaccagaactctcagccatgcctctcaacagcgaattgtacagcagatttgagagtttgtctgtgcatgtgtgatgcgtacacttttcagcgtgatcagatcacgcttatcgtataggtttgttttgtgtgtaaatgtgcaaaaaagtaatcatacatgttaatcaaatggcatgttttgagtatgcttgagcattatttgaaggaccaaattcgttaatcagaggaagggaaatggtataggt

SEQ ID NO: 83660 - DNA, 3675 bp, Zea Mays
ctcatcgtcagttcgtcaccaccctcctttttccttgtagcgacggctcctttttcctggtagcgaccgaactgcgctagcgatcccgttttcccacgccgccgtcgcctccaaccaggggtttcgctccttccgccgtcgggtgtgatccatggagaacggcggcggcgtcagggaagggcgcccggagcatcgggcgggcgagaacggcggagtcgccgcggaggaggaatccgtcttgaaggcagccactttggcgggtgagggcaattgtgttgtggcggtggaggtctgggatgagggggacgtgccgctggggcaggatggtggcggagatgaggctggggaagaaaaccggggccccggagaaggtgcagtggagtctgcggtggtgacgggcgatcaccagccattggtgacgccgaacaccagagtggccggacagcgtggggcagagaagtgggacgaggacgacactcccagtttcgtagatgtggaggaaagttttgctgatgatgtgaatcaagaccatgtgaatgagaatgtcatggggcaatctttcagggagtacatggtcacatctgttttggctgatcgtgaaaaggagaggttagacaacgaccacaattttttttcaaatcctggtgacaaggctgaggtcgctgcacattctgggagcgagtatgaagatgtaaaaggtggtactttggcgcatcaaagcaaaaatcatccagggaagagcacagaagagattgcttcctctcatagcaggccagagttggtcacaaattctgcagctgagcctgctgttgtaattgaggagttggatgactcaagctcctcagatgatgagaatactgcgacctctgctccccctgcacaatcctcaagtgggagttctacatctgcacaacccagcagtgctgcttctgctcgttctactaatggtccctctctgatatctcgtcctgctggccttggatcatcctcttccctatcgcagcctcctgcccgttctgttcaacaggtccgtgccagcaggccagccgctgtggataagggaacccaggaggctactgagtctgccgaggatgatagagatgagaatgatgatatccatgaaaaacttcaaatgatccgggttaagtttcttcgcctcgctggcaggttggggcaaacatctcataacatggtcgtttcacaggttctgtaccggcttgggctggcagaacaacttagaagaactgctaatgggacatttagcattgaccgtgcgagagagatggcagaacgtcttgaagctgctggaaatgagccccttgatttttcatgcaccattttggttcttggtaaaactggggtcggtaagagtgctaccattaattcaatttttgatgatatcaggttggatacaaatgcctttgattctagtactatgaaggttcaagtagttggtacggttgagggaatcaaagtaaaagtcatcgatactcctggactttcctgttcatcttttgaacaacaccacaaccagaaggttctcaactctgtcaagagacttattagcagaaaccctccggatattgttctttattttgataggttggatatgcagagcagggacaacggtgatgtccctctgctgcaaactatcacgaaagtgttcggagcatcggtttggtttaatgccattgtcgtgttaactcatgctgcgtctgcaccaccagatgggcagaatggaattcctctgagctatgagatgtttgtcacccagagatctcacgtagtgcaacaagctataaggcaagctgctggtgatggacgtcttatgaatccggtatccctagtggaaaaccactcagcatgcaggacaaatagagctggccagagggtattgccaaatggacaagtctggaagccacagctattgctgctttgttttgcttcaaaggtgttagcagaagccaatgtgcttctcaagttgcaggatagtcccattggtaaactttctcatacaaggattcctccattgcctttcctcctctcttcccttcttcagtctcgtgccccactgaagttaccagaggagcaatttggtggtgatgatgatgatcttgaagacgatttggcagacgattctgattcagatgatggttcggattgtgatgatttacctccatttaagcgtctcacaaaagctcagcttgccaagctgaacaatgagcagaggaaggcctaccttgaggagctagattacagagagaagttgttctaccgaaaacagctgaaagaggaaagcaagcaccgtaaattgatgaagaaaatggcagcagaagccagtgctcgaggaactgatttcagcaacagcaacctagaagatgattctaatactccaactaatgtttctgtgcccatgcctgacatggtactaccctcatcttttgattctgactatcctacccatcgctatcgttttctggatacaccaagtgaatggcttatcagacctgtattggaaacccagggctgggaccatgatgttggttatgagggacttaatgttgaaaggttgtttgctgtaaaaggtaaagttcctctatccgtgtctggccagcttacaaaagacaagaaggattgctccctgcaaatggaggttgcaagttcaattaagcatgctgagggtaagactacttcatttgggcttgatttgcagtctgtcggcaaggatatggcatacacaattcgtggcgaatcgagatttaagaacttcaggcgcaacaatacagctgctgggatatctgccacgcttcttggggactcagtatcagctggtctgaagattgaggacaaactgatagtgaacaagcagctcagggtcctggttagcagtggggccatgagtgggaggggagatgtggcctatggaggccgcctcgaagcaataagggacaaaaattacccgattgggcggttgctttcaactatcgcgttgtctgttgtggattggcacggggatctggcaattggctgcaacatccagtctcagatccccgctggaagagctagcaacttggttggccacgccaatctaagcaacaaggggactggccaagtcgggattcgtctgaacagctcggaacatcttgagatcgcactcgttgcgctcgtgccgatatttcagaacatcatgaagctgttacagaattacttagaatccggctaggccctcgtgccgatattcatttttctctcaaaagagctgcgcatcatgtgctattctaaatcgaactaaagtcaaactttctagtgcttaagtatattccagaacatcatgaagctgttacagaattactcagaatctttttctgttagcctgggaaaaaagtgagcagggcatcataggttaaaaaagctagcataagttataatttttttacttccaatttgttttgttcttttgttgccaactttttgtaactatgctctcccctaagctcttctttttaggtgaactctggagtactactcatctatctaatgcaagggttttccctgagctcttgctgacgaagctgcattggagaattgaccgtgtcattttgtccgatttcgggcatactatattgctatattatactcggtattaacatctgaatcctactgcattctgataaa

SEQ ID NO: 83661 - DNA, 3743 bp, Zea Mays
tggctcgctgcctgactctcatcgtcagttcgtcaccaccctcctttttccttgtagcgacggctcctttttcctggtagcgaccgaactgcgctagcgatcccgttttcccacgccgccgtcgcctccaaccaggttggtttggtagccgccacctccctccggatccgtccaccacaatctttttggtttcgctccttccgccgtcgggtgtgatccatggagaacggcggcggcgtcagggaagggcgcccggagcatcgggcgggcgagaacggcggagtcgccgcggaggaggaatccgtcttgaaggcagccactttggcgggtgagggcaattgtgttgtggcggtggaggtctgggatgagggggacgtgccgctggggcaggatggtggcggagatgaggctggggaagaaaaccggggccccggagaaggtgcagtggagtctgcggtggtgacgggcgatcaccagccattggtgacgccgaacaccagagtggccggacagcgtggggcagagaagtgggacgaggacgacactcccagtttcgtagatgtggaggaaagttttgctgatgatgtgaatcaagaccatgtgaatgagaatgtcatggggcaatctttcagggagtacatggtcacatctgttttggctgatcgtgaaaaggagaggttagacaacgaccacaattttttttcaaatcctggtgacaaggctgaggtcgctgcacattctgggagcgagtatgaagatgtaaaaggtggtactttggcgcatcaaagcaaaaatcatccagggaagagcacagaagagattgcttcctctcatagcaggccagagttggtcacaaattctgcagctgagcctgctgttgtaattgaggagttggatgactcaagctcctcagatgatgagaatactgcgacctctgctccccctgcacaatcctcaagtgggagttctacatctgcacaacccagcagtgctgcttctgctcgttctactaatggtccctctctgatatctcgtcctgctggccttggatcatcctcttccctatcgcagcctcctgcccgttctgttcaacaggtccgtgccagcaggccagccgctgtggataagggaacccaggaggctactgagtctgccgaggatgatagagatgagaatgatgatatccatgaaaaacttcaaatgatccgggttaagtttcttcgcctcgctggcaggttggggcaaacatctcataacatggtcgtttcacaggttctgtaccggcttgggctggcagaacaacttagaagaactgctaatgggacatttagcattgaccgtgcgagagagatggcagaacgtcttgaagctgctggaaatgagccccttgatttttcatgcaccattttggttcttggtaaaactggggtcggtaagagtgctaccattaattcaatttttgatgatatcaggttggatacaaatgcctttgattctagtactatgaaggttcaagtagttggtacggttgagggaatcaaagtaaaagtcatcgatactcctggactttcctgttcatcttttgaacaacaccacaaccagaaggttctcaactctgtcaagagacttattagcagaaaccctccggatattgttctttattttgataggttggatatgcagagcagggacaacggtgatgtccctctgctgcaaactatcacgaaagtgttcggagcatcggtttggtttaatgccattgtcgtgttaactcatgctgcgtctgcaccaccagatgggcagaatggaattcctctgagctatgagatgtttgtcacccagagatctcacgtagtgcaacaagctataaggcaagctgctggtgatggacgtcttatgaatccggtatccctagtggaaaaccactcagcatgcaggacaaatagagctggccagagggtattgccaaatggacaagtctggaagccacagctattgctgctttgttttgcttcaaaggtgttagcagaagccaatgtgcttctcaagttgcaggatagtcccattggtaaactttctcatacaaggattcctccattgcctttcctcctctcttcccttcttcagtctcgtgccccactgaagttaccagaggagcaatttggtggtgatgatgatgatcttgaagacgatttggcagacgattctgattcagatgatggttcggattgtgatgatttacctccatttaagcgtctcacaaaagctcagcttgccaagctgaacaatgagcagaggaaggcctaccttgaggagctagattacagagagaagttgttctaccgaaaacagctgaaagaggaaagcaagcaccgtaaattgatgaagaaaatggcagcagaagccagtgctcgaggaactgatttcagcaacagcaacctagaagatgattctaatactccaactaatgtttctgtgcccatgcctgacatggtactaccctcatcttttgattctgactatcctacccatcgctatcgttttctggatacaccaagtgaatggcttatcagacctgtattggaaacccagggctgggaccatgatgttggttatgagggacttaatgttgaaaggttgtttgctgtaaaaggtaaagttcctctatccgtgtctggccagcttacaaaagacaagaaggattgctccctgcaaatggaggttgcaagttcaattaagcatgctgagggtaagactacttcatttgggcttgatttgcagtctgtcggcaaggatatggcatacacaattcgtggcgaatcgagatttaagaacttcaggcgcaacaatacagctgctgggatatctgccacgcttcttggggactcagtatcagctggtctgaagattgaggacaaactgatagtgaacaagcagctcagggtcctggttagcagtggggccatgagtgggaggggagatgtggcctatggaggccgcctcgaagcaataagggacaaaaattacccgattgggcggttgctttcaactatcgcgttgtctgttgtggattggcacggggatctggcaattggctgcaacatccagtctcagatccccgctggaagagctagcaacttggttggccacgccaatctaagcaacaaggggactggccaagtcgggattcgtctgaacagctcggaacatcttgagatcgcactcgttgcgctcgtgccgatatttcagaacatcatgaagctgttacagaattacttagaatccggctaggccctcgtgccgatattcatttttctctcaaaagagctgcgcatcatgtgctattctaaatcgaactaaagtcaaactttctagtgcttaagtatattccagaacatcatgaagctgttacagaattactcagaatctttttctgttagcctgggaaaaaagtgagcagggcatcataggttaaaaaagctagcataagttataatttttttacttccaatttgttttgttcttttgttgccaactttttgtaactatgctctcccctaagctcttctttttaggtgaactctggagtactactcatctatctaatgcaagggttttccctgagctcttgctgacgaagctgcattggagaattgaccgtgtcattttgtccgatttcgggcatactatattgctatattatactcggtattaacatctgaatcctactgcattctgataaa

SEQ ID NO: 83662 - DNA, 3704 bp, Zea Mays
ttggcgtcgtcgctggctcgctgcctgactctcatcgtcagttcgtcaccaccctcctttttccttgtagcgacggctcctttttcctggtagcgaccgaactgcgctagcgatcccgttttcccacgccgccgtcgcctccaaccagggtttcgctccttccgccgtcgggtgtgatccatggagaacggcggcggcgtcagggaagggcgcccggagcatcgggcgggcgagaacggcggagtcgccgcggaggaggaatccgtcttgaaggcagccactttggcgggtgagggcaattgtgttgtggcggtggaggtctgggatgagggggacgtgccgctggggcaggatggtggcggagatgaggctggggaagaaaaccggggccccggagaaggtgcagtggagtctgcggtggtgacgggcgatcaccagccattggtgacgccgaacaccagagtggccggacagcgtggggcagagaagtgggacgaggacgacactcccagtttcgtagatgtggaggaaagttttgctgatgatgtgaatcaagaccatgtgaatgagaatgtcatggggcaatctttcagggagtacatggtcacatctgttttggctgatcgtgaaaaggagaggttagacaacgaccacaattttttttcaaatcctggtgacaaggctgaggtcgctgcacattctgggagcgagtatgaagatgtaaaaggtggtactttggcgcatcaaagcaaaaatcatccagggaagagcacagaagagattgcttcctctcatagcaggccagagttggtcacaaattctgcagctgagcctgctgttgtaattgaggagttggatgactcaagctcctcagatgatgagaatactgcgacctctgctccccctgcacaatcctcaagtgggagttctacatctgcacaacccagcagtgctgcttctgctcgttctactaatggtccctctctgatatctcgtcctgctggccttggatcatcctcttccctatcgcagcctcctgcccgttctgttcaacaggtccgtgccagcaggccagccgctgtggataagggaacccaggaggctactgagtctgccgaggatgatagagatgagaatgatgatatccatgaaaaacttcaaatgatccgggttaagtttcttcgcctcgctggcaggttggggcaaacatctcataacatggtcgtttcacaggttctgtaccggcttgggctggcagaacaacttagaagaactgctaatgggacatttagcattgaccgtgcgagagagatggcagaacgtcttgaagctgctggaaatgagccccttgatttttcatgcaccattttggttcttggtaaaactggggtcggtaagagtgctaccattaattcaatttttgatgatatcaggttggatacaaatgcctttgattctagtactatgaaggttcaagtagttggtacggttgagggaatcaaagtaaaagtcatcgatactcctggactttcctgttcatcttttgaacaacaccacaaccagaaggttctcaactctgtcaagagacttattagcagaaaccctccggatattgttctttattttgataggttggatatgcagagcagggacaacggtgatgtccctctgctgcaaactatcacgaaagtgttcggagcatcggtttggtttaatgccattgtcgtgttaactcatgctgcgtctgcaccaccagatgggcagaatggaattcctctgagctatgagatgtttgtcacccagagatctcacgtagtgcaacaagctataaggcaagctgctggtgatggacgtcttatgaatccggtatccctagtggaaaaccactcagcatgcaggacaaatagagctggccagagggtattgccaaatggacaagtctggaagccacagctattgctgctttgttttgcttcaaaggtgttagcagaagccaatgtgcttctcaagttgcaggatagtcccattggtaaactttctcatacaaggattcctccattgcctttcctcctctcttcccttcttcagtctcgtgccccactgaagttaccagaggagcaatttggtggtgatgatgatgatcttgaagacgatttggcagacgattctgattcagatgatggttcggattgtgatgatttacctccatttaagcgtctcacaaaagctcagcttgccaagctgaacaatgagcagaggaaggcctaccttgaggagctagattacagagagaagttgttctaccgaaaacagctgaaagaggaaagcaagcaccgtaaattgatgaagaaaatggcagcagaagccagtgctcgaggaactgatttcagcaacagcaacctagaagatgattctaatactccaactaatgtttctgtgcccatgcctgacatggtactaccctcatcttttgattctgactatcctacccatcgctatcgttttctggatacaccaagtgaatggcttatcagacctgtattggaaacccagggctgggaccatgatgttggttatgagggacttaatgttgaaaggttgtttgctgtaaaaggtaaagttcctctatccgtgtctggccagcttacaaaagacaagaaggattgctccctgcaaatggaggttgcaagttcaattaagcatgctgagggtaagactacttcatttgggcttgatttgcagtctgtcggcaaggatatggcatacacaattcgtggcgaatcgagatttaagaacttcaggcgcaacaatacagctgctgggatatctgccacgcttcttggggactcagtatcagctggtctgaagattgaggacaaactgatagtgaacaagcagctcagggtcctggttagcagtggggccatgagtgggaggggagatgtggcctatggaggccgcctcgaagcaataagggacaaaaattacccgattgggcggttgctttcaactatcgcgttgtctgttgtggattggcacggggatctggcaattggctgcaacatccagtctcagatccccgctggaagagctagcaacttggttggccacgccaatctaagcaacaaggggactggccaagtcgggattcgtctgaacagctcggaacatcttgagatcgcactcgttgcgctcgtgccgatatttcagaacatcatgaagctgttacagaattacttagaatccggctaggccctcgtgccgatattcatttttctctcaaaagagctgcgcatcatgtgctattctaaatcgaactaaagtcaaactttctagtgcttaagtatattccagaacatcatgaagctgttacagaattactcagaatctttttctgttagcctgggaaaaaagtgagcagggcatcataggttaaaaaagctagcataagttataatttttttacttccaatttgttttgttcttttgttgccaactttttgtaactatgctctcccctaagctcttctttttaggtgaactctggagtactactcatctatctaatgcaagggttttccctgagctcttgctgacgaagctgcattggagaattgaccgtgtcattttgtccgatttcgggcatactatattgctatattatactcggtattaacatctgaatcctactgcattctgataaa

SEQ ID NO: 83663 - DNA, 697 bp, Zea Mays
atgcgcgcaacgagaaagcagaaagccacgacaagggagcgcggcgtgcagacagggcaagctggacgcgcggccgactggagcagcgcgagcagaggacagggaggaacttgctatggccaagcaagatccggggcggctgggcagaaggagcagttgcgcgtgcggcaagctgggactgggagatgggcagggcgcgcggcacaggaagaacgccgggaggaggaagaagcagctgggctgcgtggctggaggagcttggggaaaggaaagccgcagcgcagagatcagcacgtaggggagctcggcaaggagaaccggcgagcagggaagagggagcgaggacgcgccatggctggagcttggagcttcggtcggctgggcgagctccggcgtgtagggagaagaaggttgggcaagctgctcggtagaggaggactggagtctgtcgcgacgagcgcagggccccatggcgcggacgccaaagcgagcaggaacagcgcgcgcagggaacaggacaggggcgcgcagcttgggagagcagggagaacgcagaccgttgagccggggccgggagacacgcttccggtggccaccacggccggagttggaggccgaggcgagcagagagaaacgcagagggagctggaaaatttgtgcggaagaagaaggcgcgcggccagaagataaggctgtg

SEQ ID NO: 83664 - DNA, 801 bp, Zea Mays
aacactaggttagtgttgttaggtggcgaccacttggcgagtatcctttggcttgacactcattcagattatccaacttccggtttgtccatccgcatcaccatgcggtttagcccgcgcttggggtcgacttggctcttcttccgcatcacgcgattatttatcgtacctcatgagatgcatgatgcacatgtatgagcacgagtataacgagtataaatagtacaagatagataatctacgctaaaaaggatgaaacacttataacctataaccaagcatattttatacaatataccaattccaactttagcactaaaagacctaaagtgtttatacgcattacttatcagacagaccctagattttggttaaaacagatatatcgatgttacttaatcctaaatattcgaaatagcaatcaacattcattcaaatcatgaaatcgaccaacatacatagaatatcatacctagaataaactaactaattatgcaggacatcgactatatcaatttatcaaattgacataacgacactagaaaattctattaactagctaataggaatactaagcttatttctttcgtcatcagctcgcccgaatattacttaaattaatctatctttcgcattactaactctatcgtacttcacatatatttaatcctatcgtgatgcgactgcttcaaaatcatgaaaataaacacatcatattcatcgaactacttcaataattaagctaatggaaattttgaattggcttaccattctaaatctgacgcgctatccgcgaacacg

SEQ ID NO: 83665 - DNA, 1315 bp, Zea Mays
gtccgttcttgacagttcctagatctttgtcaggtatccttgtctgaaagagctgaagaaaccttagaggaaattacatctggagaaagtaacgaggatgttatatactactggtcaccaatggatatggaccaaacttctgacttttggttgacatgtgattctctaaatgctggcaattgcagatctcttttcgaagatgcatttagggctatgtatggattaccagagaatgtcttggcccttccaccaatgcccaatgatggtgatcattggtctactcttcatagctgggtcatgcccaccccatcatttctgaaattcatcatgttctcaagaatatttgttgattcacttcatagcttgaatgtgaatagtactgaaacaacgtcttgcttccttggggcatcagaacctgagagaaggcactgttattgtcgaatcctggaagtccttgtaaatgtctgggcttatcacagtggaaggaagatggtctaccttaaccctttcactggggataccagtgagcagcatctgctcgataagagaaatgggatgtgggtaaagttcttcaatttcacccttctgaagagcatggatgaggatctggcagaagaagctgatgatggcatgcatcctggaaacgagcagtggctgtggccattgactggtcaggtgttctggcctggtattgctgatcgggaaagggaggagaaatacattaaaaagctggataaaaagctcaagaacaaggtgaagttacttgaaaggcagaagtctggttacaagcagaagcccctgggacaatgaccatgactgaagagctaacaattcaagatttttttccttgccacgtccggtgcatgcacgtggaagaagagttggagcacaaaaggcaccgctgttgtgaatacgcattctttctacacctcattgatctccctctccaaagatgtttggtgagtctggaggatattgtcaggatggaaaagcaccattttttttcctgttcgtataaacagattagataggatttgtttggttcgctgtctaatttaccacactttgtctaacttttttgtctaagtttagtttttcgatttaaacgactaaccttatgtaaagtgtgacacagttagccacgaactaaacagacctgtaatgcgccatatagttgaactgattcttttctttgctttccccatccgccatggaaagtcagctggacgagcagcaaaattttggtagggtgacactaaccatcgttgtacatgtaaatatctagtgctgtgtgtttaatttgggtatctcgtcg

SEQ ID NO: 83666 - DNA, 1363 bp, Zea Mays
ctcgccatgggtgacttgactgtctgggactcctacacacctgtcctcagcactatgttgatatgaattcagctccataaggtatccttgtctgaaagagctgaagaaaccttagaggaaattacatctggagaaagtaacgaggatgttatatactactggtcaccaatggatatggaccaaacttctgacttttggttgacatgtgattctctaaatgctggcaattgcagatctcttttcgaagatgcatttagggctatgtatggattaccagagaatgtcttggcccttccaccaatgcccaatgatggtgatcattggtctactcttcatagctgggtcatgcccaccccatcatttctgaaattcatcatgttctcaagaatatttgttgattcacttcatagcttgaatgtgaatagtactgaaacaacgtcttgcttccttggggcatcagaacctgagagaaggcactgttattgtcgaatcctggaagtccttgtaaatgtctgggcttatcacagtggaaggaagatggtctaccttaaccctttcactggggataccagtgagcagcatctgctcgataagagaaatgggatgtgggtaaagttcttcaatttcacccttctgaagagcatggatgaggatctggcagaagaagctgatgatggcatgcatcctggaaacgagcagtggctgtggccattgactggtcaggtgttctggcctggtattgctgatcgggaaagggaggagaaatacattaaaaagctggataaaaagctcaagaacaaggtgaagttacttgaaaggcagaagtctggttacaagcagaagcccctgggacaatgaccatgactgaagagctaacaattcaagatttttttccttgccacgtccggtgcatgcacgtggaagaagagttggagcacaaaaggcaccgctgttgtgaatacgcattctttctacacctcattgatctccctctccaaagatgtttggtgagtctggaggatattgtcaggatggaaaagcaccattttttttcctgttcgtataaacagattagataggatttgtttggttcgctgtctaatttaccacactttgtctaacttttttgtctaagtttagtttttcgatttaaacgactaaccttatgtaaagtgtgacacagttagccacgaactaaacagacctgtaatgcgccatatagttgaactgattcttttctttgctttccccatccgccatggaaagtcagctggacgagcagcaaaattttggtagggtgacactaaccatcgttgtacatgtaaatatctagtgctgtgtgtttaatttgggtatctcgtcg

SEQ ID NO: 83667 - DNA, 2630 bp, Zea Mays
ctttactacatgatttttttggcatttaaagtaactatgcattgcatttgtgaacttcactaaagcaagatcttgaatttcttaagccttcaagcttgtatgttttgttggacatgcttttagctggctaacctttttatttctaatgaatatttatcctctagttaattacttgggcactttactttgcggtaacctcatatgtttttttgtcaaacaatgcagaaagcttgacatgacacacacaccagccttttcacaagattacatggtgaccacacatattagatgaaataaacacccttcttgtccctgctctctccctctatgttatttttttcttcaaaaacattttagaatgggctcttgttcgtctgtttagtaattcattcttcccgtgtttacaaattcacgtgctaatataatcctaatgtctgttttacaggaacttacctcacacatggggttacctgatgtctccataaagcgattttctgtgactcatgatattagaaacctgttaatgtttgtggatgttgttctctatggatctttaagacaagaacctgtcttccctcctttgttattgctgtccatgtcctccgaaattccagttgttgcaccaaatcttactgttataacaaaatatgtcagtgatggtgtccatggattccttttcgattctgctgacccaagcacgatttcttcagctttcatacaaattttaggagaaaaaaagcttttggatactgcctattctgttgctctggaagggaagctactttccaagaacatgttagcacatgattgtatcaaagctcatgttaagcttcttgaaagtgttattcattttccttcttatgcaaaattgccatcttctgtttctaaagttcaagaacgaacatggttgtgggatcctttcgagttgaaagctgcactagaaaatagtttgttggaagatgaaagccatgccagcacaaaggctgttgatattcttagagaattctctcaaagtaaccaaacaacttatgctgatacaaatgatacttcttcatatgattaccctcgtttgtccgattggtatgatttaggtgaaattgaaatctttgaagacattgagaggagagaaatggaggagattgatgaaagggtggaaagacctttgttatcatgggatgaagtgtacaaaaacgctcgtaaatcagaaaggctaaagtcagaaggaaatgaacgtgacgaaggtgaactagaaaggactgggcaacctgtgtgtatatatgagatctatagtggagagggggcatggccatttttacaccatggatctttgtatcgtggtgttacacttgtatccttgtctgaaagagctgaagaaaccttagaggaaattacatctggagaaagtaacgaggatgttatatactactggtcaccaatggatatggaccaaacttctgacttttggttgacatgtgattctctaaatgctggcaattgcagatctcttttcgaagatgcatttagggctatgtatggattaccagagaatgtcttggcccttccaccaatgcccaatgatggtgatcattggtctactcttcatagctgggtcatgcccaccccatcatttctgaaattcatcatgttctcaagaatatttgttgattcacttcatagcttgaatgtgaatagtactgaaacaacgtcttgcttccttggggcatcagaacctgagagaaggcactgttattgtcgaatcctggaagtccttgtaaatgtctgggcttatcacagtggaaggaagatggtctaccttaaccctttcactggggataccagtgagcagcatctgctcgataagagaaatgggatgtgggtaaagttcttcaatttcacccttctgaagagcatggatgaggatctggcagaagaagctgatgatggcatgcatcctggaaacgagcagtggctgtggccattgactggtcaggtgttctggcctggtattgctgatcgggaaagggaggagaaatacattaaaaagctggataaaaagctcaagaacaaggtgaagttacttgaaaggcagaagtctggttacaagcagaagcccctgggacaatgaccatgactgaagagctaacaattcaagatttttttccttgccacgtccggtgcatgcacgtggaagaagagttggagcacaaaaggcaccgctgttgtgaatacgcattctttctacacctcattgatctccctctccaaagatgtttggtgagtctggaggatattgtcaggatggaaaagcaccattttttttcctgttcgtataaacagattagataggatttgtttggttcgctgtctaatttaccacactttgtctaacttttttgtctaagtttagtttttcgatttaaacgactaaccttatgtaaagtgtgacacagttagccacgaactaaacagacctgtaatgcgccatatagttgaactgattcttttctttgctttccccatccgccatggaaagtcagctggacgagcagcaaaattttggtagggtgacactaaccatcgttgtacatgtaaatatctagtgctgtgtgtttaatttgggtatctcgtcg

SEQ ID NO: 83668 - DNA, 3443 bp, Zea Mays
agcgcggagacggcggcgcccagggctgccctgccgcccgagccacctcttcttcgcgctcctcgtggcactcttcaccgcctccctgctagtggtctggcagctgctccccatcggcgacggcgacgcagcggagggggacggggaggcgccgccgcgccttcaaggaggcgaagccggaccgatgcggttctcgtcctccagcctggcgctgcgcgcgttcgacggcgagagccggctcgaggccgcgagatccgggcggcggctgtgggccagcctcgcgcccgtcagagtagcgctcgctgttggaaatatgaacatagatgcacaatctctgatgcttgcaactgttgcgaaaagtcttgtgagtctgggctacgaggttgaggttttagcatttacagatgggaaagctcgtgatatttgggaaaatatttgtcttgtaaatgttgtgaacactggggctttgaaatctgttgactggtcacagtacaatgctgtgctagtaagctctctcgaagggaaaggggttgtttcaatgaaccttttcggcttctaccagtgatttggcttatacatgaagacactcttggacaatatcttagaagttatgcaaagttacatgattctattcaaaatgtcattgaagattggaggactcattttaatgcatgcgcttatgttgtttttccagatagctaccatcctttgttgtactcgcctcttgattctggtaactttttagtgatttctggttctccagttgatatctggtctgctaaaagatttggctcatcacattctgacgaaactacaagaaagcagcatgggattgaaaaagatgatgttgttattttggttgttggaagctacttattttttgatgatttaccatgggattatgtcacagtcatgcgtgcatcagctacacaaattttggatatagcaaaaactaaaaatctgagggtgcagtttgtttttttctgtggaaatggctctgatgcctacaactctgctttccagaaagcttgacatgacacacacaccagccttttcacaagattacatggaacttacctcacacatggggttacctgatgtctccataaagcgattttctgtgactcatgatattagaaacctgttaatgtttgtggatgttgttctctatggatctttaagacaagaacctgtcttccctcctttgttattgctgtccatgtcctccgaaattccagttgttgcaccaaatcttactgttataacaaaatatgtcagtgatggtgtccatggattccttttcgattctgctgacccaagcacgatttcttcagctttcatacaaattttaggagaaaaaaagcttttggatactgcctattctgttgctctggaagggaagctactttccaagaacatgttagcacatgattgtatcaaagctcatgttaagcttcttgaaagtgttattcattttccttcttatgcaaaattgccatcttctgtttctaaagttcaagaacgaacatggttgtgggatcctttcgagttgaaagctgcactagaaaatagtttgttggaagatgaaagccatgccagcacaaaggctgttgatattcttagagaattctctcaaagtaaccaaacaacttatgctgatacaaatgatacttcttcatatgattaccctcgtttgtccgattggtatgatttaggtgaaattgaaatctttgaagacattgagaggagagaaatggaggagattgatgaaagggtggaaagacctttgttatcatgggatgaagtgtacaaaaacgctcgtaaatcagaaaggctaaagtcagaaggaaatgaacgtgacgaaggtgaactagaaaggactgggcaacctgtgtgtatatatgagatctatagtggagagggggcatggccatttttacaccatggatctttgtatcgtggtgttacactttcgaaaggaggaaggcgaccaagatcagatgatgttgatgctgttaccaggctttcagttctagacaacccatactatcgagatcttctttgtgaatttggtgctatatttgccattgcaaacagagtcgatactgtacataagttaccatggataggtttccagtcatggcgggctgctggaagaaaggtatccttgtctgaaagagctgaagaaaccttagaggaaattacatctggagaaagtaacgaggatgttatatactactggtcaccaatggatatggaccaaacttctgacttttggttgacatgtgattctctaaatgctggcaattgcagatctcttttcgaagatgcatttagggctatgtatggattaccagagaatgtcttggcccttccaccaatgcccaatgatggtgatcattggtctactcttcatagctgggtcatgcccaccccatcatttctgaaattcatcatgttctcaagaatatttgttgattcacttcatagcttgaatgtgaatagtactgaaacaacgtcttgcttccttggggcatcagaacctgagagaaggcactgttattgtcgaatcctggaagtccttgtaaatgtctgggcttatcacagtggaaggaagatggtctaccttaaccctttcactggggataccagtgagcagcatctgctcgataagagaaatgggatgtgggtaaagttcttcaatttcacccttctgaagagcatggatgaggatctggcagaagaagctgatgatggcatgcatcctggaaacgagcagtggctgtggccattgactggtcaggtgttctggcctggtattgctgatcgggaaagggaggagaaatacattaaaaagctggataaaaagctcaagaacaaggtgaagttacttgaaaggcagaagtctggttacaagcagaagcccctgggacaatgaccatgactgaagagctaacaattcaagatttttttccttgccacgtccggtgcatgcacgtggaagaagagttggagcacaaaaggcaccgctgttgtgaatacgcattctttctacacctcattgatctccctctccaaagatgtttggtgagtctggaggatattgtcaggatggaaaagcaccattttttttcctgttcgtataaacagattagataggatttgtttggttcgctgtctaatttaccacactttgtctaacttttttgtctaagtttagtttttcgatttaaacgactaaccttatgtaaagtgtgacacagttagccacgaactaaacagacctgtaatgcgccatatagttgaactgattcttttctttgctttccccatccgccatggaaagtcagctggacgagcagcaaaattttggtagggtgacactaaccatcgttgtacatgtaaatatctagtgctgtgtgtttaatttgggtatctcgtcg

SEQ ID NO: 83669 - DNA, 4055 bp, Zea Mays
agcgcggagacggcggcgcccagggctgccctgccgcccgagccacctcttcttcgcgctcctcgtggcactcttcaccgcctccctgctagtggtctggcagctgctccccatcggcgacggcgacgcagcggagggggacggggaggcgccgccgcgccttcaaggaggcgaagccggaccgatgcggttctcgtcctccagcctggcgctgcgcgcgttcgacggcgagagccggctcgaggccgcgagatccgggcggcggctgtgggccagcctcgcgcccgtcagagtagcgctcgctgttggaaatatgaacatagatgcacaatctctgatgcttgcaactgttgcgaaaagtcttgtgagtctgggctacgaggttgaggttttagcatttacagatgggaaagctcgtgatatttgggaaaatatttgtcttgtaaatgttgtgaacactggggctttgaaatctgttgactggtcacagtacaatgctgtgctagtaagctctctcgaagggaaaggggttgtttcaattcttatgcaggaaccttttcggcttctaccagtgatttggcttatacatgaagacactcttggacaatatcttagaagttatgcaaagttacatgattctattcaaaatgtcattgaagattggaggactcattttaatgcatgcgcttatgttgtttttccagatagctaccatcctttgttgtactcgcctcttgattctggtaactttttagtgatttctggttctccagttgatatctggtctgctaaaagatttggctcatcacattctgacgaaactacaagaaagcagcatgggattgaaaaagatgatgttgttattttggttgttggaagctacttattttttgatgatttaccatgggattatgtcacagtcatgcgtgcatcagctacacaaattttggatatagcaaaaactaaaaatctgagggtgcagtttgtttttttctgtggaaatggctctgatgcctacaactctgctttccaggtaatgaatattccacaaattagacagtggcctttgggagaaataccttgctattgaaaaattccaagaaataccatttgtacttcagtgatgggttttctttatgtcatctgcttgaggagacaatatcattaccatattgtgcccatggaagcatccttttaaagtcaaaagtaactggcagaacttggccagaccttcatatttttcctttactacatgatttttttggcatttaaagtaactatgcattgcatttgtgaacttcactaaagcaagatcttgaatttcttaagccttcaagcttgtatgttttgttggacatgcttttagctggctaacctttttatttctaatgaatatttatcctctagttaattacttgggcactttactttgcggtaacctcatatgtttttttgtcaaacaatgcagaaagcttgacatgacacacacaccagccttttcacaagattacatggtgaccacacatattagatgaaataaacacccttcttgtccctgctctctccctctatgttatttttttcttcaaaaacattttagaatgggctcttgttcgtctgtttagtaattcattcttcccgtgtttacaaattcacgtgctaatataatcctaatgtctgttttacaggaacttacctcacacatggggttacctgatgtctccataaagcgattttctgtgactcatgatattagaaacctgttaatgtttgtggatgttgttctctatggatctttaagacaagaacctgtcttccctcctttgttattgctgtccatgtcctccgaaattccagttgttgcaccaaatcttactgttataacaaaatatgtcagtgatggtgtccatggattccttttcgattctgctgacccaagcacgatttcttcagctttcatacaaattttaggagaaaaaaagcttttggatactgcctattctgttgctctggaagggaagctactttccaagaacatgttagcacatgattgtatcaaagctcatgttaagcttcttgaaagtgttattcattttccttcttatgcaaaattgccatcttctgtttctaaagttcaagaacgaacatggttgtgggatcctttcgagttgaaagctgcactagaaaatagtttgttggaagatgaaagccatgccagcacaaaggctgttgatattcttagagaattctctcaaagtaaccaaacaacttatgctgatacaaatgatacttcttcatatgattaccctcgtttgtccgattggtatgatttaggtgaaattgaaatctttgaagacattgagaggagagaaatggaggagattgatgaaagggtggaaagacctttgttatcatgggatgaagtgtacaaaaacgctcgtaaatcagaaaggctaaagtcagaaggaaatgaacgtgacgaaggtgaactagaaaggactgggcaacctgtgtgtatatatgagatctatagtggagagggggcatggccatttttacaccatggatctttgtatcgtggtgttacacttgaggaaggcgaccaagatcagatgatgttgatgctgttaccaggctttcagttctagacaacccatactatcgagatcttctttgtgaatttggtgctatatttgccattgcaaacagagtcgatactgtacataagttaccatggataggtttccagtcatggcgggctgctggaagaaaggtatccttgtctgaaagagctgaagaaaccttagaggaaattacatctggagaaagtaacgaggatgttatatactactggtcaccaatggatatggaccaaacttctgacttttggttgacatgtgattctctaaatgctggcaattgcagatctcttttcgaagatgcatttagggctatgtatggattaccagagaatgtcttggcccttccaccaatgcccaatgatggtgatcattggtctactcttcatagctgggtcatgcccaccccatcatttctgaaattcatcatgttctcaagaatatttgttgattcacttcatagcttgaatgtgaatagtactgaaacaacgtcttgcttccttggggcatcagaacctgagagaaggcactgttattgtcgaatcctggaagtccttgtaaatgtctgggcttatcacagtggaaggaagatggtctaccttaaccctttcactggggataccagtgagcagcatctgctcgataagagaaatgggatgtgggtaaagttcttcaatttcacccttctgaagagcatggatgaggatctggcagaagaagctgatgatggcatgcatcctggaaacgagcagtggctgtggccattgactggtcaggtgttctggcctggtattgctgatcgggaaagggaggagaaatacattaaaaagctggataaaaagctcaagaacaaggtgaagttacttgaaaggcagaagtctggttacaagcagaagcccctgggacaatgaccatgactgaagagctaacaattcaagatttttttccttgccacgtccggtgcatgcacgtggaagaagagttggagcacaaaaggcaccgctgttgtgaatacgcattctttctacacctcattgatctccctctccaaagatgtttggtgagtctggaggatattgtcaggatggaaaagcaccattttttttcctgttcgtataaacagattagataggatttgtttggttcgctgtctaatttaccacactttgtctaacttttttgtctaagtttagtttttcgatttaaacgactaaccttatgtaaagtgtgacacagttagccacgaactaaacagacctgtaatgcgccatatagttgaactgattcttttctttgctttccccatccgccatggaaagtcagctggacgagcagcaaaattttggtagggtgacactaaccatcgttgtacatgtaaatatctagtgctgtgtgtttaatttgggtatctcgtcg

SEQ ID NO: 83670 - DNA, 3586 bp, Zea Mays
agcgcggagacggcggcgcccagggctgccctgccgcccgagccacctcttcttcgcgctcctcgtggcactcttcaccgcctccctgctagtggtctggcagctgctccccatcggcgacggcgacgcagcggagggggacggggaggcgccgccgcgccttcaaggaggcgaagccggaccgatgcggttctcgtcctccagcctggcgctgcgcgcgttcgacggcgagagccggctcgaggccgcgagatccgggcggcggctgtgggccagcctcgcgcccgtcagagtagcgctcgctgttggaaatatgaacatagatgcacaatctctgatgcttgcaactgttgcgaaaagtcttgtgagtctgggctacgaggttgaggtgagtttacacgcaacactattttccacaggttgcaaaatgcctactagtttggtgggtttgccattcggttgtgatattgtacccttgagcttgtgaaacttgttttcattggtgaccattcttgattttttcgatgttgacaatactttataccccatgccactcatggtgttgccatggatcaggttttagcatttacagatgggaaagctcgtgatatttgggaaaatatttgtcttgtaaatgttgtgaacactggggctttgaaatctgttgactggtcacagtacaatgctgtgctagtaagctctctcgaagggaaaggggttgtttcaatgaaccttttcggcttctaccagtgatttggcttatacatgaagacactcttggacaatatcttagaagttatgcaaagttacatgattctattcaaaatgtcattgaagattggaggactcattttaatgcatgcgcttatgttgtttttccagatagctaccatcctttgttgtactcgcctcttgattctggtaactttttagtgatttctggttctccagttgatatctggtctgctaaaagatttggctcatcacattctgacgaaactacaagaaagcagcatgggattgaaaaagatgatgttgttattttggttgttggaagctacttattttttgatgatttaccatgggattatgtcacagtcatgcgtgcatcagctacacaaattttggatatagcaaaaactaaaaatctgagggtgcagtttgtttttttctgtggaaatggctctgatgcctacaactctgctttccaggaacttacctcacacatggggttacctgatgtctccataaagcgattttctgtgactcatgatattagaaacctgttaatgtttgtggatgttgttctctatggatctttaagacaagaacctgtcttccctcctttgttattgctgtccatgtcctccgaaattccagttgttgcaccaaatcttactgttataacaaaatatgtcagtgatggtgtccatggattccttttcgattctgctgacccaagcacgatttcttcagctttcatacaaattttaggagaaaaaaagcttttggatactgcctattctgttgctctggaagggaagctactttccaagaacatgttagcacatgattgtatcaaagctcatgttaagcttcttgaaagtgttattcattttccttcttatgcaaaattgccatcttctgtttctaaagttcaagaacgaacatggttgtgggatcctttcgagttgaaagctgcactagaaaatagtttgttggaagatgaaagccatgccagcacaaaggctgttgatattcttagagaattctctcaaagtaaccaaacaacttatgctgatacaaatgatacttcttcatatgattaccctcgtttgtccgattggtatgatttaggtgaaattgaaatctttgaagacattgagaggagagaaatggaggaggattgatgaaagggtggaaagacctttgttatcatgggatgaagtgtacaaaaacgctcgtaaatcagaaaggctaaagtcagaaggaaatgaacgtgacgaaggtgaactagaaaggactgggcaacctgtgtgtatatatgagatctatagtggagagggggcatggccatttttacaccatggatctttgtatcgtggtgttacactttcgaaaggaggaaggcgaccaagatcagatgatgttgatgctgttaccaggctttcagttctagacaacccatactatcgagatcttctttgtgaatttggtgctatatttgccattgcaaacagagtcgatactgtacataagttaccatggataggtttccagtcatggcgggctgctggaagaaaggtatccttgtctgaaagagctgaagaaaccttagaggaaattacatctggagaaagtaacgaggatgttatatactactggtcaccaatggatatggaccaaacttctgacttttggttgacatgtgattctctaaatgctggcaattgcagatctcttttcgaagatgcatttagggctatgtatggattaccagagaatgtcttggcccttccaccaatgcccaatgatggtgatcattggtctactcttcatagctgggtcatgcccaccccatcatttctgaaattcatcatgttctcaagaatatttgttgattcacttcatagcttgaatgtgaatagtactgaaacaacgtcttgcttccttggggcatcagaacctgagagaaggcactgttattgtcgaatcctggaagtccttgtaaatgtctgggcttatcacagtggaaggaagatggtctaccttaaccctttcactggggataccagtgagcagcatctgctcgataagagaaatgggatgtgggtaaagttcttcaatttcacccttctgaagagcatggatgaggatctggcagaagaagctgatgatggcatgcatcctggaaacgagcagtggctgtggccattgactggtcaggtgttctggcctggtattgctgatcgggaaagggaggagaaatacattaaaaagctggataaaaagctcaagaacaaggtgaagttacttgaaaggcagaagtctggttacaagcagaagcccctgggacaatgaccatgactgaagagctaacaattcaagatttttttccttgccacgtccggtgcatgcacgtggaagaagagttggagcacaaaaggcaccgctgttgtgaatacgcattctttctacacctcattgatctccctctccaaagatgtttggtgagtctggaggatattgtcaggatggaaaagcaccattttttttcctgttcgtataaacagattagataggatttgtttggttcgctgtctaatttaccacactttgtctaacttttttgtctaagtttagtttttcgatttaaacgactaaccttatgtaaagtgtgacacagttagccacgaactaaacagacctgtaatgcgccatatagttgaactgattcttttctttgctttccccatccgccatggaaagtcagctggacgagcagcaaaattttggtagggtgacactaaccatcgttgtacatgtaaatatctagtgctgtgtgtttaatttgggtatctcgtcg

SEQ ID NO: 83671 - DNA, 3638 bp, Zea Mays
cctcaccctcactggcaggacccgaccgactcgccctttgccgctccgctccgatcgccgccgccgcggggttgcattccaatgtggcggcgcggggcgcacgccgacgccgcgcaccatctccccaccgcgggcccgggagcgtcctcctcctccaccgccgccgcctccgcgggcgcggccgcagcgcggagacggcggcgcccagggctgccctgccgcccgagccacctcttcttcgcgctcctcgtggcactcttcaccgcctccctgctagtggtctggcagctgctccccatcggcgacggcgacgcagcggagggggacggggaggcgccgccgcgccttcaaggaggcgaagccggaccgatgcggttctcgtcctccagcctggcgctgcgcgcgttcgacggcgagagccggctcgaggccgcgagatccgggcggcggctgtgggccagcctcgcgcccgtcagagtagcgctcgctgttggaaatatgaacatagatgcacaatctctgatgcttgcaactgttgcgaaaagtcttgtgagtctgggctacgaggttgaggttttagcatttacagatgggaaagctcgtgatatttgggaaaatatttgtcttgtaaatgttgtgaacactggggctttgaaatctgttgactggtcacagtacaatgctgtgctagtaagctctctcgaagggaaaggggttgtttcaattcttatgcaggaaccttttcggcttctaccagtgatttggcttatacatgaagacactcttggacaatatcttagaagttatgcaaagttacatgattctattcaaaatgtcattgaagattggaggactcattttaatgcatgcgcttatgttgtttttccagatagctaccatcctttgttgtactcgcctcttgattctggtaactttttagtgatttctggttctccagttgatatctggtctgctaaaagatttggctcatcacattctgacgaaactacaagaaagcagcatgggattgaaaaagatgatgttgttattttggttgttggaagctacttattttttgatgatttaccatgggattatgtcacagtcatgcgtgcatcagctacacaaattttggatatagcaaaaactaaaaatctgagggtgcagtttgtttttttctgtggaaatggctctgatgcctacaactctgctttccagaaagcttgacatgacacacacaccagccttttcacaagattacatggaacttacctcacacatggggttacctgatgtctccataaagcgattttctgtgactcatgatattagaaacctgttaatgtttgtggatgttgttctctatggatctttaagacaagaacctgtcttccctcctttgttattgctgtccatgtcctccgaaattccagttgttgcaccaaatcttactgttataacaaaatatgtcagtgatggtgtccatggattccttttcgattctgctgacccaagcacgatttcttcagctttcatacaaattttaggagaaaaaaagcttttggatactgcctattctgttgctctggaagggaagctactttccaagaacatgttagcacatgattgtatcaaagctcatgttaagcttcttgaaagtgttattcattttccttcttatgcaaaattgccatcttctgtttctaaagttcaagaacgaacatggttgtgggatcctttcgagttgaaagctgcactagaaaatagtttgttggaagatgaaagccatgccagcacaaaggctgttgatattcttagagaattctctcaaagtaaccaaacaacttatgctgatacaaatgatacttcttcatatgattaccctcgtttgtccgattggtatgatttaggtgaaattgaaatctttgaagacattgagaggagagaaatggaggagattgatgaaagggtggaaagacctttgttatcatgggatgaagtgtacaaaaacgctcgtaaatcagaaaggctaaagtcagaaggaaatgaacgtgacgaaggtgaactagaaaggactgggcaacctgtgtgtatatatgagatctatagtggagagggggcatggccatttttacaccatggatctttgtatcgtggtgttacactttcgaaaggaggaaggcgaccaagatcagatgatgttgatgctgttaccaggctttcagttctagacaacccatactatcgagatcttctttgtgaatttggtgctatatttgccattgcaaacagagtcgatactgtacataagttaccatggataggtttccagtcatggcgggctgctggaagaaaggtatccttgtctgaaagagctgaagaaaccttagaggaaattacatctggagaaagtaacgaggatgttatatactactggtcaccaatggatatggaccaaacttctgacttttggttgacatgtgattctctaaatgctggcaattgcagatctcttttcgaagatgcatttagggctatgtatggattaccagagaatgtcttggcccttccaccaatgcccaatgatggtgatcattggtctactcttcatagctgggtcatgcccaccccatcatttctgaaattcatcatgttctcaagaatatttgttgattcacttcatagcttgaatgtgaatagtactgaaacaacgtcttgcttccttggggcatcagaacctgagagaaggcactgttattgtcgaatcctggaagtccttgtaaatgtctgggcttatcacagtggaaggaagatggtctaccttaaccctttcactggggataccagtgagcagcatctgctcgataagagaaatgggatgtgggtaaagttcttcaatttcacccttctgaagagcatggatgaggatctggcagaagaagctgatgatggcatgcatcctggaaacgagcagtggctgtggccattgactggtcaggtgttctggcctggtattgctgatcgggaaagggaggagaaatacattaaaaagctggataaaaagctcaagaacaaggtgaagttacttgaaaggcagaagtctggttacaagcagaagcccctgggacaatgaccatgactgaagagctaacaattcaagatttttttccttgccacgtccggtgcatgcacgtggaagaagagttggagcacaaaaggcaccgctgttgtgaatacgcattctttctacacctcattgatctccctctccaaagatgtttggtgagtctggaggatattgtcaggatggaaaagcaccattttttttcctgttcgtataaacagattagataggatttgtttggttcgctgtctaatttaccacactttgtctaacttttttgtctaagtttagtttttcgatttaaacgactaaccttatgtaaagtgtgacacagttagccacgaactaaacagacctgtaatgcgccatatagttgaactgattcttttctttgctttccccatccgccatggaaagtcagctggacgagcagcaaaattttggtagggtgacactaaccatcgttgtacatgtaaatatctagtgctgtgtgtttaatttgggtatctcgtcg

SEQ ID NO: 83672 - DNA, 4085 bp, Zea Mays
caacgagcagctcctcaccctcactggcaggacccgaccgactcgccctttgccgctccgctccgatcgccgccgccgcggggttgcattccaatgtggcggcgcggggcgcacgccgacgccgcgcaccatctccccaccgcgggcccgggagcgtcctcctcctccaccgccgccgcctccgcgggcgcggccgcagcgcggagacggcggcgcccagggctgccctgccgcccgagccacctcttcttcgcgctcctcgtggcactcttcaccgcctccctgctagtggtctggcagctgctccccatcggcgacggcgacgcagcggagggggacggggaggcgccgccgcgccttcaaggaggcgaagccggaccgatgcggttctcgtcctccagcctggcgctgcgcgcgttcgacggcgagagccggctcgaggccgcgagatccgggcggcggctgtgggccagcctcgcgcccgtcagagtagcgctcgctgttggaaatatgaacatagatgcacaatctctgatgcttgcaactgttgcgaaaagtcttgtgagtctgggctacgaggttgaggttttagcatttacagatgggaaagctcgtgatatttgggaaaatatttgtcttgtaaatgttgtgaacactggggctttgaaatctgttgactggtcacagtacaatgctgtgctagtaagctctctcgaagggaaaggggttgtttcaattcttatgcaggaaccttttcggcttctaccagtgatttggcttatacatgaagacactcttggacaatatcttagaagttatgcaaagttacatgattctattcaaaatgtcattgaagattggaggactcattttaatgcatgcgcttatgttgtttttccagatagctaccatcctttgttgtactcgcctcttgattctggtaactttttagtgatttctggttctccagttgatatctggtctgctaaaagatttggctcatcacattctgacgaaactacaagaaagcagcatgggattgaaaaagatgatgttgttattttggttgttggaagctacttattttttgatgatttaccatgggattatgtcacagtcatgcgtgcatcagctacacaaattttggatatagcaaaaactaaaaatctgagggtgcagtttgtttttttctgtggaaatggctctgatgcctacaactctgctttccaggtaatgaatattccacaaattagacagtggcctttgggagaaataccttgctattgaaaaattccaagaaataccatttgtacttcagtgatgggttttctttatgtcatctgcttgaggagacaatatcattaccatattgtgcccatggaagcatccttttaaagtcaaaagtaactggcagaacttggccagaccttcatatttttcctttactacatgatttttttggcatttaaagtaactatgcattgcatttgtgaacttcactaaagcaagatcttgaatttcttaagccttcaagcttgtatgttttgttggacatgcttttagctggctaacctttttatttctaatgaatatttatcctctagttaattacttgggcactttactttgcggtaacctcatatgtttttttgtcaaacaatgcagaaagcttgacatgacacacacaccagccttttcacaagattacatggaacttacctcacacatggggttacctgatgtctccataaagcgattttctgtgactcatgatattagaaacctgttaatgtttgtggatgttgttctctatggatctttaagacaagaacctgtcttccctcctttgttattgctgtccatgtcctccgaaattccagttgttgcaccaaatcttactgttataacaaaatatgtcagtgatggtgtccatggattccttttcgattctgctgacccaagcacgatttcttcagctttcatacaaattttaggagaaaaaaagcttttggatactgcctattctgttgctctggaagggaagctactttccaagaacatgttagcacatgattgtatcaaagctcatgttaagcttcttgaaagtgttattcattttccttcttatgcaaaattgccatcttctgtttctaaagttcaagaacgaacatggttgtgggatcctttcgagttgaaagctgcactagaaaatagtttgttggaagatgaaagccatgccagcacaaaggctgttgatattcttagagaattctctcaaagtaaccaaacaacttatgctgatacaaatgatacttcttcatatgattaccctcgtttgtccgattggtatgatttaggtgaaattgaaatctttgaagacattgagaggagagaaatggaggagattgatgaaagggtggaaagacctttgttatcatgggatgaagtgtacaaaaacgctcgtaaatcagaaaggctaaagtcagaaggaaatgaacgtgacgaaggtgaactagaaaggactgggcaacctgtgtgtatatatgagatctatagtggagagggggcatggccatttttacaccatggatctttgtatcgtggtgttacactttcgaaaggaggaaggcgaccaagatcagatgatgttgatgctgttaccaggctttcagttctagacaacccatactatcgagatcttctttgtgaatttggtgctatatttgccattgcaaacagagtcgatactgtacataagttaccatggataggtttccagtcatggcgggctgctggaagaaaggtatccttgtctgaaagagctgaagaaaccttagaggaaattacatctggagaaagtaacgaggatgttatatactactggtcaccaatggatatggaccaaacttctgacttttggttgacatgtgattctctaaatgctggcaattgcagatctcttttcgaagatgcatttagggctatgtatggattaccagagaatgtcttggcccttccaccaatgcccaatgatggtgatcattggtctactcttcatagctgggtcatgcccaccccatcatttctgaaattcatcatgttctcaagaatatttgttgattcacttcatagcttgaatgtgaatagtactgaaacaacgtcttgcttccttggggcatcagaacctgagagaaggcactgttattgtcgaatcctggaagtccttgtaaatgtctgggcttatcacagtggaaggaagatggtctaccttaaccctttcactggggataccagtgagcagcatctgctcgataagagaaatgggatgtgggtaaagttcttcaatttcacccttctgaagagcatggatgaggatctggcagaagaagctgatgatggcatgcatcctggaaacgagcagtggctgtggccattgactggtcaggtgttctggcctggtattgctgatcgggaaagggaggagaaatacattaaaaagctggataaaaagctcaagaacaaggtgaagttacttgaaaggcagaagtctggttacaagcagaagcccctgggacaatgaccatgactgaagagctaacaattcaagatttttttccttgccacgtccggtgcatgcacgtggaagaagagttggagcacaaaaggcaccgctgttgtgaatacgcattctttctacacctcattgatctccctctccaaagatgtttggtgagtctggaggatattgtcaggatggaaaagcaccattttttttcctgttcgtataaacagattagataggatttgtttggttcgctgtctaatttaccacactttgtctaacttttttgtctaagtttagtttttcgatttaaacgactaaccttatgtaaagtgtgacacagttagccacgaactaaacagacctgtaatgcgccatatagttgaactgattcttttctttgctttccccatccgccatggaaagtcagctggacgagcagcaaaattttggtagggtgacactaaccatcgttgtacatgtaaatatctagtgctgtgtgtttaatttgggtatctcgtcg

SEQ ID NO: 83673 - DNA, 3748 bp, Zea Mays
cgtcctcgtcagtcctcagttcctcacttctcccctcctcggcacgggccacctcgccactcccgagtccgggcccgccgcgccacctgaccgactcgaccgcggctcgcatcgggacgcgtccgactcccatgtaacagcagctggtcagcaacaacgagcagctcctcaccctcactggcaggacccgaccgactcgccctttgccgctccgctccgatcgccgccgccgcggggttgcattccaatgtggcggcgcggggcgcacgccgacgccgcgcaccatctccccaccgcgggcccgggagcgtcctcctcctccaccgccgccgcctccgcgggcgcggccgcagcgcggagacggcggcgcccagggctgccctgccgcccgagccacctcttcttcgcgctcctcgtggcactcttcaccgcctccctgctagtggtctggcagctgctccccatcggcgacggcgacgcagcggagggggacggggaggcgccgccgcgccttcaaggaggcgaagccggaccgatgcggttctcgtcctccagcctggcgctgcgcgcgttcgacggcgagagccggctcgaggccgcgagatccgggcggcggctgtgggccagcctcgcgcccgtcagagtagcgctcgctgttggaaatatgaacatagatgcacaatctctgatgcttgcaactgttgcgaaaagtcttgtgagtctgggctacgaggttgaggttttagcatttacagatgggaaagctcgtgatatttgggaaaatatttgtcttgtaaatgttgtgaacactggggctttgaaatctgttgactggtcacagtacaatgctgtgctagtaagctctctcgaagggaaaggggttgtttcaatgaaccttttcggcttctaccagtgatttggcttatacatgaagacactcttggacaatatcttagaagttatgcaaagttacatgattctattcaaaatgtcattgaagattggaggactcattttaatgcatgcgcttatgttgtttttccagatagctaccatcctttgttgtactcgcctcttgattctggtaactttttagtgatttctggttctccagttgatatctggtctgctaaaagatttggctcatcacattctgacgaaactacaagaaagcagcatgggattgaaaaagatgatgttgttattttggttgttggaagctacttattttttgatgatttaccatgggattatgtcacagtcatgcgtgcatcagctacacaaattttggatatagcaaaaactaaaaatctgagggtgcagtttgtttttttctgtggaaatggctctgatgcctacaactctgctttccaggaacttacctcacacatggggttacctgatgtctccataaagcgattttctgtgactcatgatattagaaacctgttaatgtttgtggatgttgttctctatggatctttaagacaagaacctgtcttccctcctttgttattgctgtccatgtcctccgaaattccagttgttgcaccaaatcttactgttataacaaaatatgtcagtgatggtgtccatggattccttttcgattctgctgacccaagcacgatttcttcagctttcatacaaattttaggagaaaaaaagcttttggatactgcctattctgttgctctggaagggaagctactttccaagaacatgttagcacatgattgtatcaaagctcatgttaagcttcttgaaagtgttattcattttccttcttatgcaaaattgccatcttctgtttctaaagttcaagaacgaacatggttgtgggatcctttcgagttgaaagctgcactagaaaatagtttgttggaagatgaaagccatgccagcacaaaggctgttgatattcttagagaattctctcaaagtaaccaaacaacttatgctgatacaaatgatacttcttcatatgattaccctcgtttgtccgattggtatgatttaggtgaaattgaaatctttgaagacattgagaggagagaaatggaggagattgatgaaagggtggaaagacctttgttatcatgggatgaagtgtacaaaaacgctcgtaaatcagaaaggctaaagtcagaaggaaatgaacgtgacgaaggtgaactagaaaggactgggcaacctgtgtgtatatatgagatctatagtggagagggggcatggccatttttacaccatggatctttgtatcgtggtgttacactttcgaaaggaggaaggcgaccaagatcagatgatgttgatgctgttaccaggctttcagttctagacaacccatactatcgagatcttctttgtgaatttggtgctatatttgccattgcaaacagagtcgatactgtacataagttaccatggataggtttccagtcatggcgggctgctggaagaaaggtatccttgtctgaaagagctgaagaaaccttagaggaaattacatctggagaaagtaacgaggatgttatatactactggtcaccaatggatatggaccaaacttctgacttttggttgacatgtgattctctaaatgctggcaattgcagatctcttttcgaagatgcatttagggctatgtatggattaccagagaatgtcttggcccttccaccaatgcccaatgatggtgatcattggtctactcttcatagctgggtcatgcccaccccatcatttctgaaattcatcatgttctcaagaatatttgttgattcacttcatagcttgaatgtgaatagtactgaaacaacgtcttgcttccttggggcatcagaacctgagagaaggcactgttattgtcgaatcctggaagtccttgtaaatgtctgggcttatcacagtggaaggaagatggtctaccttaaccctttcactggggataccagtgagcagcatctgctcgataagagaaatgggatgtgggtaaagttcttcaatttcacccttctgaagagcatggatgaggatctggcagaagaagctgatgatggcatgcatcctggaaacgagcagtggctgtggccattgactggtcaggtgttctggcctggtattgctgatcgggaaagggaggagaaatacattaaaaagctggataaaaagctcaagaacaaggtgaagttacttgaaaggcagaagtctggttacaagcagaagcccctgggacaatgaccatgactgaagagctaacaattcaagatttttttccttgccacgtccggtgcatgcacgtggaagaagagttggagcacaaaaggcaccgctgttgtgaatacgcattctttctacacctcattgatctccctctccaaagatgtttggtgagtctggaggatattgtcaggatggaaaagcaccattttttttcctgttcgtataaacagattagataggatttgtttggttcgctgtctaatttaccacactttgtctaacttttttgtctaagtttagtttttcgatttaaacgactaaccttatgtaaagtgtgacacagttagccacgaactaaacagacctgtaatgcgccatatagttgaactgattcttttctttgctttccccatccgccatggaaagtcagctggacgagcagcaaaattttggtagggtgacactaaccatcgttgtacatgtaaatatctagtgctgtgtgtttaatttgggtatctcgtcg

SEQ ID NO: 83674 - DNA, 3827 bp, Zea Mays
cagagatccattcatccgtgtgccaccttcttcggcgcagcggcggttgctttgcccgatctcaacccgcgtcctcgtcagtcctcagttcctcacttctcccctcctcggcacgggccacctcgccactcccgagtccgggcccgccgcgccacctgaccgactcgaccgcggctcgcatcgggacgcgtccgactcccatgtaacagcagctggtcagcaacaacgagcagctcctcaccctcactggcaggacccgaccgactcgccctttgccgctccgctccgatcgccgccgccgcggggttgcattccaatgtggcggcgcggggcgcacgccgacgccgcgcaccatctccccaccgcgggcccgggagcgtcctcctcctccaccgccgccgcctccgcgggcgcggccgcagcgcggagacggcggcgcccagggctgccctgccgcccgagccacctcttcttcgcgctcctcgtggcactcttcaccgcctccctgctagtggtctggcagctgctccccatcggcgacggcgacgcagcggagggggacggggaggcgccgccgcgccttcaaggaggcgaagccggaccgatgcggttctcgtcctccagcctggcgctgcgcgcgttcgacggcgagagccggctcgaggccgcgagatccgggcggcggctgtgggccagcctcgcgcccgtcagagtagcgctcgctgttggaaatatgaacatagatgcacaatctctgatgcttgcaactgttgcgaaaagtcttgtgagtctgggctacgaggttgaggttttagcatttacagatgggaaagctcgtgatatttgggaaaatatttgtcttgtaaatgttgtgaacactggggctttgaaatctgttgactggtcacagtacaatgctgtgctagtaagctctctcgaagggaaaggggttgtttcaattcttatgcaggaaccttttcggcttctaccagtgatttggcttatacatgaagacactcttggacaatatcttagaagttatgcaaagttacatgattctattcaaaatgtcattgaagattggaggactcattttaatgcatgcgcttatgttgtttttccagatagctaccatcctttgttgtactcgcctcttgattctggtaactttttagtgatttctggttctccagttgatatctggtctgctaaaagatttggctcatcacattctgacgaaactacaagaaagcagcatgggattgaaaaagatgatgttgttattttggttgttggaagctacttattttttgatgatttaccatgggattatgtcacagtcatgcgtgcatcagctacacaaattttggatatagcaaaaactaaaaatctgagggtgcagtttgtttttttctgtggaaatggctctgatgcctacaactctgctttccaggaacttacctcacacatggggttacctgatgtctccataaagcgattttctgtgactcatgatattagaaacctgttaatgtttgtggatgttgttctctatggatctttaagacaagaacctgtcttccctcctttgttattgctgtccatgtcctccgaaattccagttgttgcaccaaatcttactgttataacaaaatatgtcagtgatggtgtccatggattccttttcgattctgctgacccaagcacgatttcttcagctttcatacaaattttaggagaaaaaaagcttttggatactgcctattctgttgctctggaagggaagctactttccaagaacatgttagcacatgattgtatcaaagctcatgttaagcttcttgaaagtgttattcattttccttcttatgcaaaattgccatcttctgtttctaaagttcaagaacgaacatggttgtgggatcctttcgagttgaaagctgcactagaaaatagtttgttggaagatgaaagccatgccagcacaaaggctgttgatattcttagagaattctctcaaagtaaccaaacaacttatgctgatacaaatgatacttcttcatatgattaccctcgtttgtccgattggtatgatttaggtgaaattgaaatctttgaagacattgagaggagagaaatggaggagattgatgaaagggtggaaagacctttgttatcatgggatgaagtgtacaaaaacgctcgtaaatcagaaaggctaaagtcagaaggaaatgaacgtgacgaaggtgaactagaaaggactgggcaacctgtgtgtatatatgagatctatagtggagagggggcatggccatttttacaccatggatctttgtatcgtggtgttacactttcgaaaggaggaaggcgaccaagatcagatgatgttgatgctgttaccaggctttcagttctagacaacccatactatcgagatcttctttgtgaatttggtgctatatttgccattgcaaacagagtcgatactgtacataagttaccatggataggtttccagtcatggcgggctgctggaagaaaggtatccttgtctgaaagagctgaagaaaccttagaggaaattacatctggagaaagtaacgaggatgttatatactactggtcaccaatggatatggaccaaacttctgacttttggttgacatgtgattctctaaatgctggcaattgcagatctcttttcgaagatgcatttagggctatgtatggattaccagagaatgtcttggcccttccaccaatgcccaatgatggtgatcattggtctactcttcatagctgggtcatgcccaccccatcatttctgaaattcatcatgttctcaagaatatttgttgattcacttcatagcttgaatgtgaatagtactgaaacaacgtcttgcttccttggggcatcagaacctgagagaaggcactgttattgtcgaatcctggaagtccttgtaaatgtctgggcttatcacagtggaaggaagatggtctaccttaaccctttcactggggataccagtgagcagcatctgctcgataagagaaatgggatgtgggtaaagttcttcaatttcacccttctgaagagcatggatgaggatctggcagaagaagctgatgatggcatgcatcctggaaacgagcagtggctgtggccattgactggtcaggtgttctggcctggtattgctgatcgggaaagggaggagaaatacattaaaaagctggataaaaagctcaagaacaaggtgaagttacttgaaaggcagaagtctggttacaagcagaagcccctgggacaatgaccatgactgaagagctaacaattcaagatttttttccttgccacgtccggtgcatgcacgtggaagaagagttggagcacaaaaggcaccgctgttgtgaatacgcattctttctacacctcattgatctccctctccaaagatgtttggtgagtctggaggatattgtcaggatggaaaagcaccattttttttcctgttcgtataaacagattagataggatttgtttggttcgctgtctaatttaccacactttgtctaacttttttgtctaagtttagtttttcgatttaaacgactaaccttatgtaaagtgtgacacagttagccacgaactaaacagacctgtaatgcgccatatagttgaactgattcttttctttgctttccccatccgccatggaaagtcagctggacgagcagcaaaattttggtagggtgacactaaccatcgttgtacatgtaaatatctagtgctgtgtgtttaatttgggtatctcgtcg

SEQ ID NO: 83675 - DNA, 3820 bp, Zea Mays
cagagatccattcatccgtgtgccaccttcttcggcgcagcggcggttgctttgcccgatctcaacccgcgtcctcgtcagtcctcagttcctcacttctcccctcctcggcacgggccacctcgccactcccgagtccgggcccgccgcgccacctgaccgactcgaccgcggctcgcatcgggacgcgtccgactcccatgtaacagcagctggtcagcaacaacgagcagctcctcaccctcactggcaggacccgaccgactcgccctttgccgctccgctccgatcgccgccgccgcggggttgcattccaatgtggcggcgcggggcgcacgccgacgccgcgcaccatctccccaccgcgggcccgggagcgtcctcctcctccaccgccgccgcctccgcgggcgcggccgcagcgcggagacggcggcgcccagggctgccctgccgcccgagccacctcttcttcgcgctcctcgtggcactcttcaccgcctccctgctagtggtctggcagctgctccccatcggcgacggcgacgcagcggagggggacggggaggcgccgccgcgccttcaaggaggcgaagccggaccgatgcggttctcgtcctccagcctggcgctgcgcgcgttcgacggcgagagccggctcgaggccgcgagatccgggcggcggctgtgggccagcctcgcgcccgtcagagtagcgctcgctgttggaaatatgaacatagatgcacaatctctgatgcttgcaactgttgcgaaaagtcttgtgagtctgggctacgaggttgagcatttacagatgggaaagctcgtgatatttgggaaaatatttgtcttgtaaatgttgtgaacactggggctttgaaatctgttgactggtcacagtacaatgctgtgctagtaagctctctcgaagggaaaggggttgtttcaattcttatgcaggaaccttttcggcttctaccagtgatttggcttatacatgaagacactcttggacaatatcttagaagttatgcaaagttacatgattctattcaaaatgtcattgaagattggaggactcattttaatgcatgcgcttatgttgtttttccagatagctaccatcctttgttgtactcgcctcttgattctggtaactttttagtgatttctggttctccagttgatatctggtctgctaaaagatttggctcatcacattctgacgaaactacaagaaagcagcatgggattgaaaaagatgatgttgttattttggttgttggaagctacttattttttgatgatttaccatgggattatgtcacagtcatgcgtgcatcagctacacaaattttggatatagcaaaaactaaaaatctgagggtgcagtttgtttttttctgtggaaatggctctgatgcctacaactctgctttccaggaacttacctcacacatggggttacctgatgtctccataaagcgattttctgtgactcatgatattagaaacctgttaatgtttgtggatgttgttctctatggatctttaagacaagaacctgtcttccctcctttgttattgctgtccatgtcctccgaaattccagttgttgcaccaaatcttactgttataacaaaatatgtcagtgatggtgtccatggattccttttcgattctgctgacccaagcacgatttcttcagctttcatacaaattttaggagaaaaaaagcttttggatactgcctattctgttgctctggaagggaagctactttccaagaacatgttagcacatgattgtatcaaagctcatgttaagcttcttgaaagtgttattcattttccttcttatgcaaaattgccatcttctgtttctaaagttcaagaacgaacatggttgtgggatcctttcgagttgaaagctgcactagaaaatagtttgttggaagatgaaagccatgccagcacaaaggctgttgatattcttagagaattctctcaaagtaaccaaacaacttatgctgatacaaatgatacttcttcatatgattaccctcgtttgtccgattggtatgatttaggtgaaattgaaatctttgaagacattgagaggagagaaatggaggagattgatgaaagggtggaaagacctttgttatcatgggatgaagtgtacaaaaacgctcgtaaatcagaaaggctaaagtcagaaggaaatgaacgtgacgaaggtgaactagaaaggactgggcaacctgtgtgtatatatgagatctatagtggagagggggcatggccatttttacaccatggatctttgtatcgtggtgttacactttcgaaaggaggaaggcgaccaagatcagatgatgttgatgctgttaccaggctttcagttctagacaacccatactatcgagatcttctttgtgaatttggtgctatatttgccattgcaaacagagtcgatactgtacataagttaccatggataggtttccagtcatggcgggctgctggaagaaaggtatccttgtctgaaagagctgaagaaaccttagaggaaattacatctggagaaagtaacgaggatgttatatactactggtcaccaatggatatggaccaaacttctgacttttggttgacatgtgattctctaaatgctggcaattgcagatctcttttcgaagatgcatttagggctatgtatggattaccagagaatgtcttggcccttccaccaatgcccaatgatggtgatcattggtctactcttcatagctgggtcatgcccaccccatcatttctgaaattcatcatgttctcaagaatatttgttgattcacttcatagcttgaatgtgaatagtactgaaacaacgtcttgcttccttggggcatcagaacctgagagaaggcactgttattgtcgaatcctggaagtccttgtaaatgtctgggcttatcacagtggaaggaagatggtctaccttaaccctttcactggggataccagtgagcagcatctgctcgataagagaaatgggatgtgggtaaagttcttcaatttcacccttctgaagagcatggatgaggatctggcagaagaagctgatgatggcatgcatcctggaaacgagcagtggctgtggccattgactggtcaggtgttctggcctggtattgctgatcgggaaagggaggagaaatacattaaaaagctggataaaaagctcaagaacaaggtgaagttacttgaaaggcagaagtctggttacaagcagaagcccctgggacaatgaccatgactgaagagctaacaattcaagatttttttccttgccacgtccggtgcatgcacgtggaagaagagttggagcacaaaaggcaccgctgttgtgaatacgcattctttctacacctcattgatctccctctccaaagatgtttggtgagtctggaggatattgtcaggatggaaaagcaccattttttttcctgttcgtataaacagattagataggatttgtttggttcgctgtctaatttaccacactttgtctaacttttttgtctaagtttagtttttcgatttaaacgactaaccttatgtaaagtgtgacacagttagccacgaactaaacagacctgtaatgcgccatatagttgaactgattcttttctttgctttccccatccgccatggaaagtcagctggacgagcagcaaaattttggtagggtgacactaaccatcgttgtacatgtaaatatctagtgctgtgtgtttaatttgggtatctcgtcg

SEQ ID NO: 83676 - DNA, 2557 bp, Zea Mays
cccgcgtcctcgtcagtcctcagttcctcacttctcccctcctcggcacgggccacctcgccactcccgagtccgggcccgccgcgccacctgaccgactcgaccgcggctcgcatcgggacgcgtccgactcccatgtaacagcagctggtcagcaacaacgagcagctcctcaccctcactggcaggacccgaccgactcgccctttgccgctccgctccgatcgccgccgccgcggggttgcattccaatgtggcggcgcggggcgcacgccgacgccgcgcaccatctccccaccgcgggcccgggagcgtcctcctcctccaccgccgccgcctccgcgggcgcggccgcagcgcggagacggcggcgcccagggctgccctgccgcccgagccacctcttcttcgcgctcctcgtggcactcttcaccgcctccctgctagtggtctggcagctgctccccatcggcgacggcgacgcagcggagggggacggggaggcgccgccgcgccttcaaggaggcgaagccggaccgatgcggttctcgtcctccagcctggcgctgcgcgcgttcgacggcgagagccggctcgaggccgcgagatccgggcggcggctgtgggccagcctcgcgcccgtcagagtagcgctcgctgttggaaatatgaacatagatgcacaatctctgatgcttgcaactgttgcgaaaagtcttgtgagtctgggctacgaggttgaggttttagcatttacagatgggaaagctcgtgatatttgggaaaatatttgtcttgtaaatgttgtgaacactggggctttgaaatctgttgactggtcacagtacaatgctgtgctagtaagctctctcgaagggaaaggggttgtttcaattcttatgcaggaaccttttcggcttctaccagtgatttggcttatacatgaagacactcttggacaatatcttagaagttatgcaaagttacatgattctattcaaaatgtcattgaagattggaggactcattttaatgcatgcgcttatgttgtttttccagatagctaccatcctttgttgtactcgcctcttgattctggtaactttttagtgatttctggttctccagttgatatctggtctgctaaaagatttggctcatcacattctgacgaaactacaagaaagcagcatgggattgaaaaagatgatgttgttattttggttgttggaagctacttattttttgatgatttaccatgggattatgtcacagtcatgcgtgcatcagctacacaaattttggatatagcaaaaactaaaaatctgagggtgcagtttgtttttttctgtggaaatggctctgatgcctacaactctgctttccaggaacttacctcacacatggggttacctgatgtctccataaagcgattttctgtgactcatgatattagaaacctgttaatgtttgtggatgttgttctctatggatctttaagacaagaacctgtcttccctcctttgttattgctgtccatgtcctccgaaattccagttgttgcaccaaatcttactgttataacaaaatatgtcagtgatggtgtccatggattccttttcgattctgctgacccaagcacgatttcttcagctttcatacaaattttaggagaaaaaaagcttttggatactgcctattctgttgctctggaagggaagctactttccaagaacatgttagcacatgattgtatcaaagctcatgttaagcttcttgaaagtgttattcattttccttcttatgcaaaattgccatcttctgtttctaaagttcaagaacgaacatggttgtgggatcctttcgagttgaaagctgcactagaaaatagtttgttggaagatgaaagccatgccagcacaaaggctgttgatattcttagagaattctctcaaagtaaccaaacaacttatgctgatacaaatgatacttcttcatatgattaccctcgtttgtccgattggtatgatttaggtgaaattgaaatctttgaagacattgagaggagagaaatggaggagattgatgaaagggtggaaagacctttgttatcatgggatgaagtgtacaaaaacgctcgtaaatcagaaaggctaaagtcagaaggaaatgaacgtgacgaaggtgaactagaaaggactgggcaacctgtgtgtatatatgagatctatagtggagagggggcatggccatttttacaccatggatctttgtatcgtggtgttacactttcgaaaggaggaaggcgaccaagatcagatgatgttgatgctgttaccaggctttcagttctagacaacccatactatcgagatcttctttgtgaatttggtgctatatttgccattgcaaacagagtcgatactgtacataagttaccatggataggtttccagtcatggcgggctgctggaagaaagatgtgctgcctcccaatctggtcaacctagaattcatcgcgcatcccaactttgacattgtcctctgcagtttcctg

SEQ ID NO: 83677 - DNA, 1870 bp, Zea Mays
cgaccgtgggtgaggccacggcggtggatgcggcagagactgaggtcgggcatagtcgaacggaatcaaaggcagaggttacctcgtcgggagggaaggtgtgctaggtgggagggagggtggtcggaggcagagggaatgtcgtcgggaaggcaggagggcgaggtgggactgtgggagggaagctggtgggattgggaagatgagaaggtggtagaccagtaaggtcatggatgagaggatggcagaggtggggcctaaacatgtcctccgctgtcactgaaggacgacctcgcccatgcccctcgagcggtgtgacagaccggacgacatggggagaggtgcatgcggacttacggagggacgtgaatgtacgctggaacatggcgcgaaagagggagaggcggacacaacgaagctaagttcaatgcgggcagcgaacggaaatctcgggtccaagagcacgcgtcagcacgtgatcagctgaagacgcgccgaacgcggtgagcgctccgaaacacttcaggttttaaggaacctgattactatagagatggtttagttttgattggtctgttctctacacaacaagtttacatatagagcggcagggctgtaatgttacaactgcaacagttttgtaccccaaaaaaaaacaagatggtcattaaaccaataataatagcacaggtgatgtacagaaaatgcttacttacacttcaggggagccacatatgccttgaaatgcaatgctcgagggcatagttccacattaaaaattgcaaacaagatgcaaattccagggtcaggaattaggatggtatcttcatgctttgctggctacctatatagtatttctcaaaataaaatcatctatcttttttttaaaaaaggcccatatcagctataaaagtggtatgcatacatgggagcttgccgcagtagcataaaatacaacgcagtaacacacttatcaacatagcaaatacacagaggataaatacacagatgaaatcaacgtgcagtgtgagcaatccctaaaactaaaaaagaagtgctgttccttttggttagggtctgtggcttggcatcgtttgtggcagcctcaccaagcttgtgctgctcatgtggatcacactgcggataaactgggagaaagaggtaaagtcatgacctgtcacattttgtctggacagtcaaatgtgatgccgcatattcttgtttctcaacaaatcctctttttcttttcaggcaaccaacgcaaaagaaacggtgttcagttcatctcttcccgtagcatgataggcgaagcgcgccagggctgtatggagcgggaggccaagcgcgtcaggtggctggagcatgagatcagggccaaggccctgacggtcgcccgtctcagattgagaagcggcagaagcggcagatcgagaagcggcagaagcggtagatcagggccaagagctaccattcttggcgagggggcctgctaggatgcggcatgtggttggaaaggggagcacggacgagtcacccttgccactggatctagaactcccacgaactggatctagaactccgatgaactggatctagaactccgacgagcagtctatcgcgcagtccactagttcgagatttaagagatctgttacctggacgacgacgaagacttggcgcccgctgctggcgtccgaggagggaggcctggtggcggcgcggcactggcgttcgaggaggaggaggagagctttcagctgaatccagcactgacgcggcactggcctggcctggtggtggcgcggcactgatgccgacccggacgattgattccggctagggttggagggtttgagttttgtatacggca

SEQ ID NO: 83678 - DNA, 277 bp, Zea Mays
atatcatcttcctttaactcaattgcatccagtctgtttagaagtcttcattcgcagttacaatttacaaagcactcaaaatagcaacatcgttgtactatctcaagttacaaaatgcctttcagtttacagacttgggtatcatcgtatattttacagactcgaatgcccttcgtattgctgtttacatacttggatctggatgactaatttattctgctatctcggcttaaccattgtggctgtgatctggcatgcttcttgtatgaaggacaag

SEQ ID NO: 83679 - DNA, 796 bp, Zea Mays
ggaggttgtggcacgtgagggaggctgcgacacactggggattttcgcttctttccgccaaaaaaaggagcggtgactgaacaaaatgctgcgtaccttatccttcgaggcatgaaaacacttcatctccgtgtgcaatgtcagaataacactgctcttcggatggcccagtttttagaggaacatctaaagattgcccgtgtctactatcctggcttgcctagccaccctgaacatcacattgccaagagtcaaatgactggctttggtggtgtggttagttttgaggttgctggagactttgatgccacaaggaaattcatcgattctgttaagataccctatcatgccccttctttcggaggctgtgagagcataattgatcagcctgctatcatgtcctactgctctgtggcttataaacagggattcaaaggagcagagggacatctatgggatcaaggacaacctgatcaggttcagcattggagtggaggattttgaggaccttaagaatgatcttgttcaggccctcgagaagatataagctccaatccatttgcattaataaagttatgaggtgatggttgtctggatcttgtagagatttgtgatgatacatgagctgttgactgcgattaagttctcttgtgcttattttattctttgaattcaataagctgtggttgctgcatcttgcatgtagtgttggacttaattttacttgtcaaattacaatagtttggtcccataataagaaaaaagtacaaatgagaagcattataatatgtcgaag

SEQ ID NO: 83680 - DNA, 1913 bp, Zea Mays
ctccaaacgaggtggagtatttagaagtagataagcgcctctgctgcacgaagcgatgaacgcactctgacggtcttgccactacaaataagccgcaccgcatttcggaaggccacgcgaccgccacctccccgaagctgccgcgaccgatcgagcgaagcgtcgctccccgcgccgccgccaaaaccctagcttctcctactccatggccactgtctcgctcaccccgcaggctgtcttctccacggagtccggtggcgccctggcctctgctaccatcctccgctttccgccaaactttgtccgccagcttagcaccaaggcacgccgcaactgcagcaacatcggcgtcgcgcagatcgtcgccgccgcgtggtccgactgccccgccgctcgcccccacttaggcggcggcggcggaggtcagcgcaattcccaacgctaaggttgcgcaaccgtccgccgtcgtcttggccgagcgtaacctgctcggctccgacgccagcctcgccgtccacgcgggggagaggctgggaagaaggatcgccacggatgcgatcaccacaccggtagtgaacacgtcggcctactggttcaacaactcgcaagagctaatcgactttaaggaggggaggcatgctagcttcgagtatgggaggtatgggaacccgaccacggaggcattagagaagaagatgagcgcactggagaaagcagagtccacagtgttcgtggcatcggggatgtatgcagctgtggctatgctcagtgcacttgttccggctggtgggcacattgtgaccaccacggattgctaccggaaaacaaggatttacatggaaactgagctccccaagaggggaatttcgatgactgtcattaggcctgctgacatggatgctctacaaaatgcgttggacaacaataatgtatctcttttcttcacggagactcccacaaatccatttctcagatgcattgatattgaacatgtatcaaatatgtgccatagcaagggagcgttgctttgtatcgacagtacttttgcctcccctatcaatcagaaggcactgactttaggcgctgacctagttattcattctgcaacaaagtacattgctggacacaacgatgttattggaggatgcgtcagtggcagagatgagttggtttccaaagtccgtatttatcaccatgtggttggtggtgttctaaacccgaatgctgcgtaccttatccttcgaggcatgaaaacacttcatctccgtgtgcaatgtcagaataacactgctcttcggatggcccagtttttagaggaacatctaaagattgcccgtgtctactatcctggcttgcctagccaccctgaacatcacattgccaagagtcaaatgactggctttggtggtgtggttagttttgaggttgctggagactttgatgccacaaggaaattcatcgattctgttaagataccctatcatgccccttctttcggaggctgtgagagcataattgatcagcctgctatcatgtcctactgggattcaaaggagcagagggacatctatgggatcaaggacaacctgatcaggttcagcattggagtggaggattttgaggaccttaagaatgatcttgttcaggccctcgagaagatataagctccaatccatttgcattaataaagttatgaggtgatggttgtctggatcttgtagagatttgtgatgatacatgagctgttgactgcgattaagttctcttgtgcttattttattctttgaattcaataagctgtggttgctgcatcttgcatgtagtgttggacttaattttacttgtcaaattacaatagtttggtcccataataagaaaaaagtacaaatgagaagcattataatatgtcgaag

SEQ ID NO: 83681 - DNA, 335 bp, Zea Mays
gacacctgcaaagagtgtggtgtctcatgttcatactggtgtaaccctctcctataccacacagttgagctgctccagagctgagtgttattttccctgtgccgtggtgaccatacccatccagttgccactacaccatggctagaacggggttgcgccgccctagactggagccgtggacagctccaccgtcgcccgaccaacttaaatcgtccccggccaatctctcgcgcgcaccataaccaaggaaggttagtgatattctccgcgcgcttaattcaaacactaccatgtgaatattttggaattaaggatcaccggacccagtgttctgc

SEQ ID NO: 83682 - DNA, 3525 bp, Zea Mays
cctcttgtcggtaggtgtccctccctttactccctccgccctcccacagtcccactgcccttctcctcggtccatcgcaagctcctgcggtcctgcctacggccgtacggcggcatccacccttctgccgcatcgtctttctcaagacgctgccccaggtccatcgcgcctagggttcgccgagtccggcggcgctaagataatgagtgggcaccgaaacagtcatggaaagcgctactctgattatactgaaactggaggcggtaagagaagaaatcctggtgatgatacctatgcccctggtcctgatgacactgtgtatcgctacctctgcgcctctagaaaaattgggagtatcattggcaggggtggagaaattgcaaagcagttgaggactgagacccaagctaagatcaggattggtgagagtgtccctggatgtgaagagcgagttattaccatatttagctcaagtcgaagaactaataccatcgatgatgctgaagataagacagcgaagaaatttcacctcaagttactgttcgcctgcttgtgccatcagaccagattggatgcattcttggaaaaggtgggcacatcatccaaggaatccgcagtgagactggtgcgcaaatacgcgtgcttagtaaggatcatatccctgcatgtgccattagtggcgatgaacttctccagatatctggggacatggtagttgtcaaaaaggctctttgtcaagtgtcatctcgcctccataacaacccatccaagtcacagcatcttcttgcatccagcttgacccaaccgtatccagggggtacccaccttggtggttcctctgctgcacctgttgtagggatcactccagtaattcctccttatggaggctacaaaggtgacgtggcaggagattggccctctttataccaaccccgacgggatgagagctctgcaaaggagtttagcttgcgtttactttgtgctgctgcaaatgtggggggtgtaattgggaagggtggtggaattatcaaacagattaggcaggaatctggggctttaattaaagtggctagctccaattcggatcctgacgatgactgcataattacagtttctgcgaaagagttctttgaagatcctgtatctccaacgattgatgctgcagttcgtttgcagcttagatgcagcgagaaaagtgattcagaattggctgagcagtcatatactacacgcttgctggtgtcaacatcacgtattgggtgcctaattggcaaaggtggctcaatcattactgagatacgaagaacatccagagccaatatacgcattctttcaaaagaaaatgtcccaaaggtagcagcagaagatgaagagatggttcagataagtggaggccttgatgttgcaaggcatgctcttgtgcaaatagctacaaggctgaaagccaatttttttgaaagagagggctcgttatctgcatttccatctgtgatcccttaccatcctttgcctgctggtgtttcggtttcggatgaaccaaaatatctaagcagagacactaagcctgttggacattacctatattcaagtgcttttcgtacatcggatgacatgattccttctgacagctatgcaagttatggtggctcccaggcacctggaggaggatatgcggcttacagcggatacagtgcccgctcctctagtagtgggttatctggtcatagttctcttcactatggaaagcatcatggttattaggatttagattgcttgataaagcagccaagacattgaagtttggagcctgcttattggagccccttcccaaaccagatggccaagagagcccaacctggaagcttaggaggactgtgtggatgccatagaccacctgatattcctcacactacattacttatgtcttcttctgggcctatgtttttagccctgccgcaaatgttctgaacctatgtatcgaaaggtcgcatttgagactgcatgtatttgcttgtttggaacctgcttcagcttcagtttagtcgtttttttgaaatacttgtttcctatgtgccacccaaaaaaccaggaatatgttacgcgaaacccccctaaggagctgttacttccctttaccacgaagatgtgggctacttccttctcagtgatatatgtgattgccatcctagataaaaaaaagtagcactagaatcacatggccttaatgaaattagcatcaggaactagatgtaccaaactttgctcctgcctgccaaatttcaccgagttgcacatttttgctttattcatctacccctgccaccaaacactatcggttttatccccctgcttcaatcttggcctgtttggttttaatccaggcagctttgcctggctcttcatgcaattccaggctttggaattttttgtgtacctggggtgtagactgcttagtggcatgctttgaaccaaacaagcagaccccaaaaccattgttgaactgaggttaggtagctgaacatacatatgtacttgttcgattacaatgttgttgcaacacacatgcaagtttatgtttaaactttaaaccattttttgaatgggaacattaagctaatttgaagtagttgttttaagcataagatttctaatttaactggttattatagatatatgtactttggtatgagtagctaatatctaaaactttagaagctgtaacttttttatgactagttggaagttttttggtcatattgatttagatcataatgatccaaaaaacgcgatagagcatgctcacgatcttcctcaacaccttgatctgatgcacatgttccaatgctttattgattaaatgagtattggtgattgaagttgcggttatgtacttgcctgccatgatggggaaaccaaatgacaaagattgaattgttgggaagagtccgcagtcgcaagttttttgaagattcactgttcatctcatgtagatttagaaggttctgaggttattgtgattgatacgagcttagtggtggtaaaggatcattatctaaatgtttattcacaataagttagagctcaattaattttactttaaaaatgaataggaatagagctcgatactaattcgattcaatcattaaatttaatagtgtaaaatctagagctaattatcacctttatacgagcttgaccacctccatgcgtgggagtcttgttaaccagaaatgtgcaggagcatgtgaaaataaccatgcaggtgttgtttatgaaagagtgaattagcctctggactctggagttgcacaacattgttaacgcagaagtgttattagtggaatgactctactatttgtttgtttatttgatgttttgttaaggtgtttcatgtaaatgctaactgtatcaggttttaattagaagattaattttagattatgtaagtttcataagatttgattctgagatattgtggacatgtactctaccgcaatacatggagcagttctttgtggcgttgac

SEQ ID NO: 83683 - DNA, 2458 bp, Zea Mays
caaacaccccttctatctgagaaaagtgaagcgaaacctagcccacgagcaaaccacgcgcggcggcccatgaaaaaaacacatcgaaaagagagttcgtgaatggtggcgacaaaagtgttgccaccctcggcggctcggcctcttgtcgataatgagtgggcaccgaaacagtcatggaaagcgctactctgattatactgaaactggaggcggtaagagaagaaatcctggtgatgatacctatgcccctggtcctgatgacactgtgtatcgctacctctgcgcctctagaaaaattgggagtatcattggcaggggtggagaaattgcaaagcagttgaggactgagacccaagctaagatcaggattggtgagagtgtccctggatgtgaagagcgagttattaccatatttagctcaagtcgaagaactaataccatcgatgatgctgaagataaggtttgccctgctcaggatgccctctttagagttcatgagaggcttgccactgatgagagttttggtaacgaagacagcgaagaaatttcacctcaagttactgttcgcctgcttgtgccatcagaccagattggatgcattcttggaaaaggtgggcacatcatccaaggaatccgcagtgagactggtgcgcaaatacgcgtgcttagtaaggatcatatccctgcatgtgccattagtggcgatgaacttctccagatatctggggacatggtagttgtcaaaaaggctctttgtcaagtgtcatctcgcctccataacaacccatccaagtcacagcatcttcttgcatccagcttgacccaaccgtatccagggggtacccaccttggtggttcctctgctgcacctgttgtagggatcactccagtaattcctccttatggaggctacaaaggtgacgtggcaggagattggccctctttataccaaccccgacgggatgagagctctgcaaaggagtttagcttgcgtttactttgtgctgctgcaaatgtggggggtgtaattgggaagggtggtggaattatcaaacagattaggcaggaatctggggctttaattaaagtggctagctccaattcggatcctgacgatgactgcataattacagtttctgcgaaagagttctttgaagatcctgtatctccaacgattgatgctgcagttcgtttgcagcttagatgcagcgagaaaagtgattcagaattggctgagcagtcatatactacacgcttgctggtgtcaacatcacgtattgggtgcctaattggcaaaggtggctcaatcattactgagatacgaagaacatccagagccaatatacgcattctttcaaaagaaaatgtcccaaaggtagcagcagaagatgaagagatggttcagataagtggaggccttgatgttgcaaggcatgctcttgtgcaaatagctacaaggctgaaagccaatttttttgaaagagagggctcgttatctgcatttccatctgtgatcccttaccatcctttgcctgctggtgtttcggtttcggatgaaccaaaatatctaagcagagacactaagcctgttggacattacctatattcaagtgcttttcgtacatcggatgacatgattccttctgacagctatgcaagttatggtggctcccaggcacctggaggaggatatgcggcttacagcggatacagtgcccgctcctctagtagtgggttatctggtcatagttctcttcactatggaaagcatcatggttattaggatttagattgcttgataaagcagttgcggttatgtacttgcctgccatgatggggaaaccaaatgacaaagattgaattgttgggaagagtccgcagtcgcaagttttttgaagattcactgttcatctcatgtagatttagaaggttctgaggttattgtgattgatacgagcttagtggtggtaaaggatcattatctaaatgtttattcacaataagttagagctcaattaattttactttaaaaatgaataggaatagagctcgatactaattcgattcaatcattaaatttaatagtgtaaaatctagagctaattatcacctttatacgagcttgaccacctccatgcgtgggagtcttgttaaccagaaatgtgcaggagcatgtgaaaataaccatgcaggtgttgtttatgaaagagtgaattagcctctggactctggagttgcacaacattgttaacgcagaagtgttattagtggaatgactctactatttgtttgtttatttgatgttttgttaaggtgtttcatgtaaatgctaactgtatcaggttttaattagaagattaattttagattatgtaagtttcataagatttgattctgagatattgtggacatgtactctaccgcaatacatggagcagttctttgtggcgttgac

SEQ ID NO: 83684 - DNA, 772 bp, Zea Mays
acatggtgacaagagcagagactatacaattccagctggcgtaatccaaggggtgccacctggtgtacaagctacatcctctgggtggcaaggtaacgttcaagcagctggggcatatgctgccccacccggtgccccttcgcaaagccacggtgccaatggacatgtgcagaactggaatcccggcaactcagtctatcccccagccccaggaccaggaatatatccaggccagatgtactcatctccctcacagtatgcagcgtcagggggcttccctaataccccatccactgctccgccacactatgcagcatcagggggcttccctaacaccccactcccagctcttcctggtgctcctacacaacagttgcacgcttcgcagcagatgctgcctcagcatggaaatcagtcgggaggcgcatccggaactagccaaccggcgccaccagcatcatactaccgttgagttgaaatcttcttttgctattgtacttaacctgttttgtcactgagtttgttattcatcatctaaaactgcaacactgttgtccgtagctgtgtttagatgatgttgggggagaacaacaacatagcaacatgattatattggtggttcttcctctcctaagattgggaaaggagaagatattgcgagtgtttcatattggtggagtttgaaacattgttgctggagatagttttacataagcaaacataatcttcagttataaaggaatataagagccattgctattcatgaacataa

SEQ ID NO: 83685 - DNA, 1464 bp, Zea Mays
cttattcgatcggaagatatggctaggcaacttggttagttgtgctatagcttatagtcacaaagttcccagatcgatagggtcgaggaacgtggtacgctacttgtgagtggtttttacatggtgggaacgaaaatgaccctgtatctgggtcggggacggcgtttccgggttgagggtcgctaccactgtacccatttcttgtgactatgctatagctatgtccttgaggcatctcgatctcgattgggcaaattgccccctgtaccttggacatcttacttcccttctgctgtaatgatttgccatctgccaactgtgaagtacttagatgtccaaaaaaacaacgtttttccttataagatgatgttttgtgaaaacccaatttggaagtggttttcctgtgttgtaccaaaaacaagaggctttcacatctttaggaatggcatctcctgagaccctggagtccttaattaatctgcttatactaacacgactttctgactaaatatgcaactgataatttcttttttctatgggcttcagaatctgattaagtttttccttaaacttgtagatgtatctacagctgctgtagcgaaggaatcattggaagggcattgcatctacgatggtggctactgtaagcttcacctgtcatactctcgtcatactgatctgaatgtgaaggcacatggtgacaagagcagagactatacaattccagctggcgtaatccaaggggtgccacctggtgtacaagctacatcctctgggtggcaaggtaacgttcaagcagctggggcatatgctgccccacccggtgccccttcgcaaagccacggtgccaatggacatgtgcagaactggaatcccggcaactcagtctatcccccagccccaggaccaggaatatatccaggccagatgtactcatctccctcacagtatgcagcgtcagggggcttccctaataccccatccactgctccgccacactatgcagcatcagggggcttccctaacaccccactcccagctcttcctggtgctcctacacaacagttgcacgcttcgcagcagatgctgcctcagcatggaaatcagtcgggaggcgcatccggaactagccaaccggcgccaccagcatcatactaccgttgagttgaaatcttcttttgctattgtacttaacctgttttgtcactgagtttgttattcatcatctaaaactgcaacactgttgtccgtagctgtgtttagatgatgttgggggagaacaacaacatagcaacatgattatattggtggttcttcctctcctaagattgggaaaggagaagatattgcgagtgtttcatattggtggagtttgaaacattgttgctggagatagttttacataagcaaacataatcttcagttataaaggaatataagagccattgctattcatgaacataa

SEQ ID NO: 83686 - DNA, 1084 bp, Zea Mays
gattataataatccgtatcttccaatcaattattctgccatggatggtacattacagcctgctgttggagctgacggaaggcaagtggaggctcaaggcaatgttcttcttgcatcaattgagaatatgcaatatgctgttactgtagatgttcttcatactgtgttctcatcatttggttcagtccaaaaaattgctatttttgagaagaatggggggacacaagctttgattcagtaccctgatgtatctacagctgctgtagcgaaggaatcattggaagggcattgcatctacgatggtggctactgcacatggtgacaagagcagagactatacaattccagctggcgtaatccaaggggtgccacctggtgtacaagctacatcctctgggtggcaaggtaacgttcaagcagctggggcatatgctgccccacccggtgccccttcgcaaagccacggtgccaatggacatgtgcagaactggaatcccggcaactcagtctatcccccagccccaggaccaggaatatatccaggccagatgtactcatctccctcacagtatgcagcgtcagggggcttccctaataccccatccactgctccgccacactatgcagcatcagggggcttccctaacaccccactcccagctcttcctggtgctcctacacaacagttgcacgcttcgcagcagatgctgcctcagcatggaaatcagtcgggaggcgcatccggaactagccaaccggcgccaccagcatcatactaccgttgagttgaaatcttcttttgctattgtacttaacctgttttgtcactgagtttgttattcatcatctaaaactgcaacactgttgtccgtagctgtgtttagatgatgttgggggagaacaacaacatagcaacatgattatattggtggttcttcctctcctaagattgggaaaggagaagatattgcgagtgtttcatattggtggagtttgaaacattgttgctggagatagttttacataagcaaacataatcttcagttataaaggaatataagagccattgctattcatgaacataa

SEQ ID NO: 83687 - DNA, 1131 bp, Zea Mays
gattataataatccgtatcttccaatcaattattctgccatggatggtacattacagcctgctgttggagctgacggaaggcaagtggaggctcaaggcaatgttcttcttgcatcaattgagaatatgcaatatgctgttactgtagatgttcttcatactgtgttctcatcatttggttcagtccaaaaaattgctatttttgagaagaatggggggacacaagctttgattcagtaccctgatgtatctacagctgctgtagcgaaggaatcattggaagggcattgcatctacgatggtggctactgtaagcttcacctgtcatactctcgtcatactgatctgaatgtgaaggcacatggtgacaagagcagagactatacaattccagctggcgtaatccaaggggtgccacctggtgtacaagctacatcctctgggtggcaaggtaacgttcaagcagctggggcatatgctgccccacccggtgccccttcgcaaagccacggtgccaatggacatgtgcagaactggaatcccggcaactcagtctatcccccagccccaggaccaggaatatatccaggccagatgtactcatctccctcacagtatgcagcgtcagggggcttccctaataccccatccactgctccgccacactatgcagcatcagggggcttccctaacaccccactcccagctcttcctggtgctcctacacaacagttgcacgcttcgcagcagatgctgcctcagcatggaaatcagtcgggaggcgcatccggaactagccaaccggcgccaccagcatcatactaccgttgagttgaaatcttcttttgctattgtacttaacctgttttgtcactgagtttgttattcatcatctaaaactgcaacactgttgtccgtagctgtgtttagatgatgttgggggagaacaacaacatagcaacatgattatattggtggttcttcctctcctaagattgggaaaggagaagatattgcgagtgtttcatattggtggagtttgaaacattgttgctggagatagttttacataagcaaacataatcttcagttataaaggaatataagagccattgctattcatgaacataa

SEQ ID NO: 83688 - DNA, 1072 bp, Zea Mays
gattataataatccgtatcttccaatcaattattctgccatggatggtacattacagcctgctgttggagctgacggaaggcaagtggaggctcaaggcaatgttcttcttgcatcaattgagaatatgcaatatgctgttactgtagatgttcttcatactgtgttctcatcatttggttcagtccaaaaaattgctatttttgagaagaatggggggacacaagctttgattcagtaccctgctgctgtagcgaaggaatcattggaagggcattgcatctacgatggtggctactgcacatggtgacaagagcagagactatacaattccagctggcgtaatccaaggggtgccacctggtgtacaagctacatcctctgggtggcaaggtaacgttcaagcagctggggcatatgctgccccacccggtgccccttcgcaaagccacggtgccaatggacatgtgcagaactggaatcccggcaactcagtctatcccccagccccaggaccaggaatatatccaggccagatgtactcatctccctcacagtatgcagcgtcagggggcttccctaataccccatccactgctccgccacactatgcagcatcagggggcttccctaacaccccactcccagctcttcctggtgctcctacacaacagttgcacgcttcgcagcagatgctgcctcagcatggaaatcagtcgggaggcgcatccggaactagccaaccggcgccaccagcatcatactaccgttgagttgaaatcttcttttgctattgtacttaacctgttttgtcactgagtttgttattcatcatctaaaactgcaacactgttgtccgtagctgtgtttagatgatgttgggggagaacaacaacatagcaacatgattatattggtggttcttcctctcctaagattgggaaaggagaagatattgcgagtgtttcatattggtggagtttgaaacattgttgctggagatagttttacataagcaaacataatcttcagttataaaggaatataagagccattgctattcatgaacataa

SEQ ID NO: 83689 - DNA, 2223 bp, Zea Mays
gtgccacctgtctgaagctgtctgcagattgacgtgtttgtgcaaaaatattgcacctttctttgttacactacattgtctcttaattattcaatcaattgtataaattgtctcttaattatttgaattgtctcttaattatttgaattctaggatcaatgagaaggtttgtgttctttttctttcctacctatataagatgaatgattggtctgttttctaaaacatataaataaaattttgtttgtttattaagggttgattggacaacaaagcttaaacattagaaggatgaataaagttgtacactatgacatgtagtttgcaatggaaggaaacctaatttatatgcttgagcttgggtcaggaattatagtggtcagtttagatatctatggatttttgacatctccctccgtttttatttagatatcatatttgccttagtgcatagacaaggatgagattaacgctgcgttaatccttgttttttctgctccgtgcaattgatgctgtatcatactcagtactcacgctcgcatgctcacctgcatgcagatttaatttttcgtggaaggaacagagggagtattagtcaataaacagtaaatttatagacatttatattttcttggctcctggactatggtgctgctgttgatctatggagtgccggttgcattcttgctgagttgctatcagggaagcctatcatgccaggacgaactgagagattgagatagattctgatcagccgactatacgctcggtattttggcggtgacctgcaaatcatctcgatggaaggtagtattatgccatcataatactaccttgaagtgaggagctgtaacgacgagctcgctttcacacagatgatcaatatggtcaaggtgcggcacaacaatgtggttccaaccatggccttgggagtgcagcagctgaagaaggagttgggccgatcaaggaaggttccattcgagttcgatgagatccacgagttccttgaccggttctacatgtcaaggattggcatccacatgctgatagggcagcatgtggctttgcatgaccctaaaccggagcctggtgtcataggcctcatcaatacaagattatccccaatccaggtggctcaagctgcttgtgaagatgcccgttctgtctgtttaagggaatatgtatcagctcctgatattaacatttatggcgatccaaattttacatttccatacgtcacattacacctacacctgatgttatttgaattggtgaagaactctctccgtgtggtgcaagaacggtatatgaactctgataaagatgttcccccagttagaattatagttgctgatggagaagtggatgtcactatcaaggttagcgatgaaggtggcgggataccaagaagcggcctcccaagaattttcacgtatctgtacagcactgcaaagaatcctcctgagctagatagacctaatactgaaggggtaactatggagtatcacatctgttggagagaatggccttcaagagcacagtgaatcggacccacttacggttagttcgtgaggtagaagccattggaggaaatgtctctgcatcagcttcccgtgaacaaatgagctatacctatgatgcattaaagagctatacaccagaaatggttgaagttctcattgacaatgtgaggaatccagcattccttgattgggaggtcaaagagcagtatctgaccgagaacaattattttgtgatgattggggtaattgggctgcccggtgtaggcaagtcaaccatcatgaacgagctttattaatatgatgcaagctacctgtggtaacgaaagagatgccaagtgcgctgaggatgcagaggccagaacatacatacagttcccattttctgaacacaaaccaatggcaccgtcgaattcagaaagagcagaaagcaagttctttttttaactttctttctgatttggctggtatgatgatgtctgtagcacctgtgattaacttctgcattaggagggtgtccaatattttttctttctagataaacttttaaaccctttgggcacagggaatggaagtgagtactaagaacagagcaagtgatatttatgtttctagataaacaggcgtgaggcgtggagtaaaaacagaggaggtaaagaaagggccttcaatcgtgaggcattcattttgattgttcgaaatg

SEQ ID NO: 83690 - DNA, 1238 bp, Zea Mays
cttccatccggtccgtcagatcggaatcggacacgtggacgggtggatgcagagggcttttttttgtgctgcggtgcggttcttccgcccaaaaaaggcgtttgctctgcagcaggccctgtccagtcaggcttctgcatttccgaaaatcccacgcaaattcctcgccacaggaatctacaccgatgctatattgctatccatcactccgatcccagttccattcgcttcggttgttcccaggccgcaccgccgcagcctcgccgatgcaaattgccgcccctgcgtcgtgcgcctctgttgatacagggcgctgcccatctgctcgacggaatgcctagccgagtagccatgacttttagggcagggcgaaagcgtggtgtggcttcttcggccgtcgcttcttctctggcataaatggagcaagaaattggcatcacacagggacgtgcagtggagatgctccagggcaaaccactgctttgcttcacaatccccgtgcgctcgctgcttccatttcaaacgccaagaaggaatctcttgatctgggcttgtttcctgcctgaaatattctgttttttcttgcgatcacttagtggtaacattttgttacaagagtcactgaagtttgcagattctctttgtcaaggcatagaaacatcacaaaaacggttttaaccccaattgaaaatcatatgattttatcaggtgatctggtggcatttttgcaggtgtggacaagtctagtccgaacagaccgctcgcttttcaccgaagcaaggctacaatttttcagtggcgtacttaaggcggtacggttctcagtctaaactactcttttagactgaaaatagcatcaggacaaatgcacttcaataaggagatctgggtgtcattttaattaagaagaaaagagacagaatactcatacatgcccattagcgcaaaggtccaaagaacaagagaaaatgccaaaaaacctcaatcaatgacctaataacagaatcatggtcaaatgcttttaaggcatttggacccaccatgcaccatggctagggcgatcttgtgggctcccttgcccacttcacaagcagggaatatattgggatcttatcataatcttgcatcaatttatagctattcatctacttgttttctgcatctaagtgctcggcactcaataaatcagtatatttgcaggcaaagcattgggtgttagcgtatcatcttacatggag

SEQ ID NO: 83691 - DNA, 883 bp, Zea Mays
gggtggatgcagagggcttttttttgtgctgcggtgcggttcttccgcccaaaaaaggcgtttgctctgcagcaggccctgtccagtcaggcttctgcatttccgaaaatcccacgcaaattcctcgccacaggaatctacaccgatgctatattgctatccatcactccgatcccagttccattcgcttcggttgttcccaggccgcaccgccgcagcctcgccgatgcaaattgccgcccctgcgtcgtgcgcctctgttgatacagggcgctgcccatctgctcgacggaatgcctagccgagtagccatgacttttagggcagggcgaaagcgtggtgtggcttcttcggccgtcgcttcttctctggcataaatggagcaagaaattggcatcacacagggacgtgcagtggagatgctccagggcaaaccactgctttgcttcacaatccccgtgcgctcgctgcttccatttcaaacgccaagaaggaatctcttgatctgggcttgtttcctgcctgaaatattctgttttttcttgcgatcacttagtggtaacattttgttacaagagtcactgaagtttgcagattctctttgtcaaggcatagaaacatcacaaaaacggttttaaccccaattgaaaatcatatgattttatcaggtgatctggtggcatttttgcaggtgtggacaagtctagtccgaacagaccgctcgcttttcaccgaagcaaggctacaatttttcagtggcgtacttaaggcggtacggttctcagtctaaactactcttttagactgaaaatagcatcaggacaaatgcacttcaataagctagggcgatcttgtgggctcccttgcccacttcacaagcagg

SEQ ID NO: 83692 - DNA, 945 bp, Zea Mays
ctaccttttgcagagaggttatgctgaacccagcgcctttgtctcagtggaaaggcttctcaccagtcaccactgtgctagacatgtcctccagactaaaaaagatgaaaggaagagttttatgctcaggtgaaattcttccagggagtttgaagaaggaaatttatctttgattctggcaacactgattttggtgattccaagatcccaaacactactgagatcaaaaccaagcctgatggttgggaaactacttcaagaggacaggatgggaacatatgggatatctcacagcgagaagatgacattctaatacaggaatttgaaaggcgaattgcttttagtaaacagcagattgctagcttcatcaaaacccacatttttagtcggaggcgtcctatcgatggatggaagtacatgattgaagaaattggccccaacgcaagaaaaggaaaggggagtgtgcaaagattaccaagtgtcagtgatcctgcaacccagccttacagggaagaaactcctgcaattgcttctagttcctccttcagaggcaatcggccatgatggtgttcgataaaccaaatcttttgctggtttcactggcatagtttatacaggcattttccccttccttttggcttcaaatgtatggtggatgactccttgcgaagaacatgacgaactttccttctgcgttgtataattttgtaatgaatgtgacgctttctgatgaaccagcaatggaagcgtttaagttttctagttactactctctctgttccaaccctccattccaaattgttccaacttgtaagtcgttggcttttctaaagttactattccctccgttacaattcctttctttcaaattctaggtctagattttcaaattgtaagtcgttttagctttcctttctaattgtaagtccttttgacacttctaaa

SEQ ID NO: 83693 - DNA, 869 bp, Zea Mays
cttcatgctatcacattccttgcttgaatttgttttgcttggtgaggattatgactattggtggaaggactgccttggattatcccagtatctttgattctggcaacactgattttggtgattccaagatcccaaacactactgagatcaaaaccaagcctgatggttgggaaactacttcaagaggacaggatgggaacatatgggatatctcacagcgagaagatgacattctaatacaggaatttgaaaggcgaattgcttttagtaaacagcagattgctagcttcatcaaaacccacatttttagtcggaggcgtcctatcgatggatggaagtacatgattgaagaaattggccccaacgcaagaaaaggaaaggggagtgtgcaaagattaccaagtgtcagtgatcctgcaacccagccttacagggaagaaactcctgcaattgcttctagttcctccttcagaggcaatcggccatgatggtgttcgataaaccaaatcttttgctggtttcactggcatagtttatacaggcattttccccttccttttggcttcaaatgtatggtggatgactccttgcgaagaacatgacgaactttccttctgcgttgtataattttgtaatgaatgtgacgctttctgatgaaccagcaatggaagcgtttaagttttctagttactactctctctgttccaaccctccattccaaattgttccaacttgtaagtcgttggcttttctaaagttactattccctccgttacaattcctttctttcaaattctaggtctagattttcaaattgtaagtcgttttagctttcctttctaattgtaagtccttttgacacttctaaa

SEQ ID NO: 83694 - DNA, 785 bp, Zea Mays
tcagtatctttgattctggcaacactgattttggtgattccaagatcccaaacactactgagatcaaaaccaagcctgatggttgggaaactacttcaagaggacaggatgggaacatatgggatatctcacagcgagaagatgacattctaatacaggaatttgaaaggcgaattgcttttagtaaacagcagattgctagcttcatcaaaacccacatttttagtcggaggcgtcctatcgatggatggaagtacatgattgaagaaattggccccaacgcaagaaaaggaaaggggagtgtgcaaagattaccaagtgtcagtgatcctgcaacccagccttacagggaagaaactcctgcaattgcttctagttcctccttcagaggcaatcggccatgatggtgttcgataaaccaaatcttttgctggtttcactggcatagtttatacaggcattttccccttccttttggcttcaaatgtatggtggatgactccttgcgaagaacatgacgaactttccttctgcgttgtataattttgtaatgaatgtgacgctttctgatgaaccagcaatggaagcgtttaagttttctagttactactctctctgttccaaccctccattccaaattgttccaacttgtaagtcgttggcttttctaaagttactattccctccgttacaattcctttctttcaaattctaggtctagattttcaaattgtaagtcgttttagctttcctttctaattgtaagtccttttgacacttctaaa

SEQ ID NO: 83695 - DNA, 931 bp, Zea Mays
cgaccaaccgtcctgcccgtccaggtccagcagtccaggatttcccaaccctaactagcagcagctgccgccgtcgagcaccagtccatggtctgccatgggcgccgtcctgacactgccgccgtcgagcagctaccacagcgtcgccctcggggttcatcgtgttgcgcttcgtggcgggtctcttcctcgccaacttcgtcgccagccagcactggatgtcgggcatctttgcaccctccatcatcgggctcgccaacgccgtcacggctcgctgactagtgtaaattccaggattcagattgtccaacgatgcagagcatcacggcctcaaaatatattaattgatcactgccctggtctgatcaaatggtgtgatgagcaagagctcttctgtcaggtatggtcattacactccagatggaactggttattttctttcttcacaacatcaacgaacatagcaactacattctgtcgtgtcggcacctggatccatcacgggcgaggaggctgaataggagggtggaggaggcgagtcgcgtgctgtctgattccttcgttatcttctgtgttttttcctagaacaaggtttcctctccggtattatttttggccaaaagatgattagatgggctgctggagacgggaggaggcgacggtctgtgtgttttcccctgatctatttgtgtactctaactgcagaagaacaaatgggagttcttcatgttcctcactctagaagtttttgtaatgatcattactagctttgctactgctgttattataagtaatgacttgagtccttttagcttaattatcacactagaatctattattgatccactgtttttttgtcacaaaaattgcaagggatccagattctccatcatccttaggtgctttttcatcatcctggagtggtttcgtt

SEQ ID NO: 83696 - DNA, 2064 bp, Zea Mays
cgaccaaccgtcctgcccgtccaggtccagcagtccaggatttcccaaccctaactagcagcagctgccgccgtcgagcaccagtccatggtctgccatgggcgccgtcctgacactgccgccgtcgagcagctaccacagcgtcgccctcggggttcatcgtgttgcgcttcgtggcgggtctcttcctcgccaacttcgtcgccagccagcactggatgtcgggcatctttgcaccctccatcatcgggctcgccaacgccgtcacggctcgctgactagtgtaaattccaggattcagattgtccaacgatgcagagcatcacggcctcaaaatatattaattgatcactgccctggtctgatcaaatggtgtgatgagcaagagctcttctgtcaggtgaggtcttatgttcttctaaattttttattttaacattagtccattgtcttgtgttctcgcaatagtttttcagtaccatactgcataaaaggtatagtccattgtctgccaagggtttcttaaaatttgaaatgtttaaatattttattcttggtattgtgctacataggttagcaatatttaaagaataattgtttgttgggacaggaatatctttgttctctcggaagcttgtatattgcattggttagcaagttttaaaaggtatagtccattcgtctcttcgatagcaggataagtgattccaatgcatgtagatcacatacaaacaacactttaaaatatacaaatatatatatatacaagttttacatgctaaaacacgtttgttgttctgaaacaaagtattcaaaccaacttcaacaatgatactacaacgacctcctacaacatttattgctcttcgtttttatattgttatggatatggaattaattaggaaagaaacgacttcaatgacagagctaggggtggccagcggtggctaggcccttgctactaccgcactgcacatgttttttttgctacattgattatgtgacacagtccttgccaaagtggtgggttcttgcttgtagcattcctgattccctgatcttttgttacttcacttcttgttttcttgaccctaccaaagtcgatctgagtaagctattgcctagcaaaggaagcttctatcccctggttagatgatgtttcctttcctcaactctgttaggctattgttgcattcagacagtattttaattcccatataagcgtacattggctatattgactttgtaaatctcacaagggtaagcataactaaactaaaaagtaaatttgagcgattcagatatagtaaaaaagtggcgatatgatgccggttggcatcctttttagtatatatagtatgaaatatcctcattgtgggactgataatttaagtggtgagatatcttctgtctcatttcaaaatgttattttccatcaaaaaagggtatatggcaaaattattattattatgaaaaatgttgttttggatgtgattaacaatgaatattgtaaacgtgaaataaatctttcaggtatggtcattacactccagatggaactggttattttctttcttcacaacatcaacgaacatagcaactacattctgtcgtgtcggcacctggatccatcacgggcgaggaggctgaataggagggtggaggaggcgagtcgcgtgctgtctgattccttcgttatcttctgtgttttttcctagaacaaggtttcctctccggtattatttttggccaaaagatgattagatgggctgctggagacgggaggaggcgacggtctgtgtgttttcccctgatctatttgtgtactctaactgcagaagaacaaatgggagttcttcatgttcctcactctagaagtttttgtaatgatcattactagctttgctactgctgttattataagtaatgacttgagtccttttagcttaattatcacactagaatctattattgatccactgtttttttgtcacaaaaattgcaagggatccagattctccatcatccttaggtgctttttcatcatcctggagtggtttcgtt

SEQ ID NO: 83697 - DNA, 1854 bp, Zea Mays
cgaccaaccgtcctgcccgtccaggtccagcagtccaggatttcccaaccctaactagcagcagctgccgccgtcgagcaccagtccatggtctgccatgggcgccgtcctgacactgccgccgtcgagcagctaccacagcgtcgccctcggggttcatcgtgttgcgcttcgtggcgggtctcttcctcgccaacttcgtcgccagccagcactggatgtcgggcatctttgcaccctccatcatcgggctcgccaacgccgtcacggctcgctgactagtgtaaattccaggattcagattgtccaacgatgcagagcatcacggcctcaaaatatattaattgatcactgccctggtctgatcaaatggtgtgatgagcaagagctcttctgtcaggaatatctttgttctctcggaagcttgtatattgcattggttagcaagttttaaaaggtatagtccattcgtctcttcgatagcaggataagtgattccaatgcatgtagatcacatacaaacaacactttaaaatatacaaatatatatatatacaagttttacatgctaaaacacgtttgttgttctgaaacaaagtattcaaaccaacttcaacaatgatactacaacgacctcctacaacatttattgctcttcgtttttatattgttatggatatggaattaattaggaaagaaacgacttcaatgacagagctaggggtggccagcggtggctaggcccttgctactaccgcactgcacatgttttttttgctacattgattatgtgacacagtccttgccaaagtggtgggttcttgcttgtagcattcctgattccctgatcttttgttacttcacttcttgttttcttgaccctaccaaagtcgatctgagtaagctattgcctagcaaaggaagcttctatcccctggttagatgatgtttcctttcctcaactctgttaggctattgttgcattcagacagtattttaattcccatataagcgtacattggctatattgactttgtaaatctcacaagggtaagcataactaaactaaaaagtaaatttgagcgattcagatatagtaaaaaagtggcgatatgatgccggttggcatcctttttagtatatatagtatgaaatatcctcattgtgggactgataatttaagtggtgagatatcttctgtctcatttcaaaatgttattttccatcaaaaaagggtatatggcaaaattattattattatgaaaaatgttgttttggatgtgattaacaatgaatattgtaaacgtgaaataaatctttcaggtatggtcattacactccagatggaactggttattttctttcttcacaacatcaacgaacatagcaactacattctgtcgtgtcggcacctggatccatcacgggcgaggaggctgaataggagggtggaggaggcgagtcgcgtgctgtctgattccttcgttatcttctgtgttttttcctagaacaaggtttcctctccggtattatttttggccaaaagatgattagatgggctgctggagacgggaggaggcgacggtctgtgtgttttcccctgatctatttgtgtactctaactgcagaagaacaaatgggagttcttcatgttcctcactctagaagtttttgtaatgatcattactagctttgctactgctgttattataagtaatgacttgagtccttttagcttaattatcacactagaatctattattgatccactgtttttttgtcacaaaaattgcaagggatccagattctccatcatccttaggtgctttttcatcatcctggagtggtttcgtt

SEQ ID NO: 83698 - DNA, 890 bp, Zea Mays
cggcaaagctccaggcgagtagccgaccaaccgtcctgcccgtccaggtccagcagtccaggatttcccaaccctaactagcagcagctgccgccgtcgagcaccagtccatggtctgccatgggcgccgtcctgacactgccgccgtcgagcagctaccacagcgtcgccctcggggttcatcgtgttgcgcttcgtggcgggtctcttcctcgccaacttcgtcgccagccagcactggatgtcgggcatctttgcaccctccatcatcgggctcgccaacgccgtcacggctcgctgactagtgtaaattccaggattcagattgtccaacgatgcagagcatcacgactcttgatatcagttactgcctcaaaatatattaattgatcactgccctggtctgatcaaatggtgtgatgagcaagagctcttctgtcaggtatggtcattacactccagatggaactggttattttctttcttcacaacatcaacgaacatagcaactacattctgtcgtgtcggcacctggatccatcacgggcgaggaggctgaataggagggtggaggaggcgagtcgcgtgctgtctgattccttcgttatcttctgtgttttttcctagaacaaggtttcctctccggtattatttttggccaaaagatgattagatgggctgctggagacgggaggaggcgacggtctgtgtgttttcccctgatctatttgtgtactctaactgcagaagaacaaatgggagttcttcatgttcctcactctagaagtttttgtaatgatcattactagctttgctactgctgttattataaggatccagattctccatcatccttaggtgctttttcatcatcctggagtggtttcgtt

SEQ ID NO: 83699 - DNA, 1196 bp, Zea Mays
cggcaaagctccaggcgagtagccgaccaaccgtcctgcccgtccaggtccagcagtccaggatttcccaaccctaactagcagcagctgccgccgtcgagcaccagtccatggtctgccatgggcgccgtcctgacactgccgccgtcgagcagctaccacagcgtcgccctcggggttcatcgtgttgcgcttcgtggcgggtctcttcctcgccaacttcgtcgccagccagcactggatgtcgggcatctttgcaccctccatcatcgggctcgccaacgccgtcacggctcgctgactagtgtaaattccaggattcagattgtccaacgatgcagagcatcacgtcagctctaattggtctctagctttcggcatctaacgaaccttctcaactgcagactcttgatatcagttactgtaagaacctagaatccttgttggcactcgaatatctttgttctattggaagcttatatattgcccattgtcataaatgtattgttctgtgttaagaaaaacttttgtttaggcctcaaaatatattaattgatcactgccctggtctgatcaaatggtgtgatgagcaagagctcttctgtcaggaatatctttgttctctcggaagcttgtatattgcattggttagcaagttttaaaaggtatggtcattacactccagatggaactggttattttctttcttcacaacatcaacgaacatagcaactacattctgtcgtgtcggcacctggatccatcacgggcgaggaggctgaataggagggtggaggaggcgagtcgcgtgctgtctgattccttcgttatcttctgtgttttttcctagaacaaggtttcctctccggtattatttttggccaaaagatgattagatgggctgctggagacgggaggaggcgacggtctgtgtgttttcccctgatctatttgtgtactctaactgcagaagaacaaatgggagttcttcatgttcctcactctagaagtttttgtaatgatcattactagctttgctactgctgttattataagtaatgacttgagtccttttagcttaattatcacactagaatctattattgatccactgtttttttgtcacaaaaattgcaagggatccagattctccatcatccttaggtgctttttcatcatcctggagtggtttcgtt

SEQ ID NO: 83700 - DNA, 1732 bp, Zea Mays
cggcaaagctccaggcgagtagccgaccaaccgtcctgcccgtccaggtccagcagtccaggatttcccaaccctaactagcagcagctgccgccgtcgagcaccagtccatggtctgccatgggcgccgtcctgacactgccgccgtcgagcagctaccacaggtgggctgtcctgatgcaaggaatagtagcatgcctctatttaatcgggtaactgtaaattacccgaaccccgaacccgatttttttggtacccgaattttcgggtacccgaaaaaatcgggtcgagttcgggttcgactgttgaatacccgaattatttaaaacccgaacaactcgacccgaaatttcgggtatacccgaatgcccagtcctacttctggctgcgctcaccgtcgtgatcatcgcggtcaccacagcgtcgccctcggggttcatcgtgttgcgcttcgtggcgggtctcttcctcgccaacttcgtcgccagccagcactggatgtcgggcatctttgcaccctccatcatcgggctcgccaacgccgtcacggctcgctgactagtgtaaattccaggattcagattgtccaacgatgcagagcatcacggtaagaaactgcaacaaacttagtcaaattccttactttgtctctgtcaggaatctaatgataataaagtcagctctaattggtctctagctttcggcatctaacgaaccttctcaactgcagactcttgatatcagttactgtaagaacctagaatccttgttggcactcgaatatctttgttctattggaagcttatatattgcccattgtcataaatgtattgttctgtgttaagaaaaacttttgtttaggcctcaaaatatattaattgatcactgccctggtctgatcaaatggtgtgatgagcaagagctcttctgtcaggtgaggtcttatgttcttctaaattttttattttaacattagtccattgtcttgtgttctcgcaatagtttttcagtaccatactgcataaaaggtatagtccattgtctgccaagggtttcttaaaatttgaaatgtttaaatattttattcttggtattgtgctacataggttagcaatatttaaagaataattgtttgttgggacaggaatatctttgttctctcggaagcttgtatattgcattggttagcaagttttaaaaggtatggtcattacactccagatggaactggttattttctttcttcacaacatcaacgaacatagcaactacattctgtcgtgtcggcacctggatccatcacgggcgaggaggctgaataggagggtggaggaggcgagtcgcgtgctgtctgattccttcgttatcttctgtgttttttcctagaacaaggtttcctctccggtattatttttggccaaaagatgattagatgggctgctggagacgggaggaggcgacggtctgtgtgttttcccctgatctatttgtgtactctaactgcagaagaacaaatgggagttcttcatgttcctcactctagaagtttttgtaatgatcattactagctttgctactgctgttattataagtaatgacttgagtccttttagcttaattatcacactagaatctattattgatccactgtttttttgtcacaaaaattgcaagggatccagattctccatcatccttaggtgctttttcatcatcctggagtggtttcgtt

SEQ ID NO: 83701 - DNA, 1039 bp, Zea Mays
cggcaaagctccaggcgagtagccgaccaaccgtcctgcccgtccaggtccagcagtccaggatttcccaaccctaactagcagcagctgccgccgtcgagcaccagtccatggtctgccatgggcgccgtcctgacactgccgccgtcgagcagctaccacagcgtcgccctcggggttcatcgtgttgcgcttcgtggcgggtctcttcctcgccaacttcgtcgccagccagcactggatgtcgggcatctttgcaccctccatcatcgggctcgccaacgccgtcacggctcgctgactagtgtaaattccaggattcagattgtccaacgatgcagagcatcacgctctaattggtctctagctttcggcatctaacgaaccttctcaactgcagactcttgatatcagttactaaaaacttttgtttaggcctcaaaatatattaattgatcactgccctggtctgatcaaatggtgtgatgagcaagagctcttctgtcaggtatggtcattacactccagatggaactggttattttctttcttcacaacatcaacgaacatagcaactacattctgtcgtgtcggcacctggatccatcacgggcgaggaggctgaataggagggtggaggaggcgagtcgcgtgctgtctgattccttcgttatcttctgtgttttttcctagaacaaggtttcctctccggtattatttttggccaaaagatgattagatgggctgctggagacgggaggaggcgacggtctgtgtgttttcccctgatctatttgtgtactctaactgcagaagaacaaatgggagttcttcatgttcctcactctagaagtttttgtaatgatcattactagctttgctactgctgttattataagtaatgacttgagtccttttagcttaattatcacactagaatctattattgatccactgtttttttgtcacaaaaattgcaagggatccagattctccatcatccttaggtgctttttcatcatcctggagtggtttcgtt

SEQ ID NO: 83702 - DNA, 2155 bp, Zea Mays
cggcaaagctccaggcgagtagccgaccaaccgtcctgcccgtccaggtccagcagtccaggatttcccaaccctaactagcagcagctgccgccgtcgagcaccagtccatggtctgccatgggcgccgtcctgacactgccgccgtcgagcagctaccacagcgtcgccctcggggttcatcgtgttgcgcttcgtggcgggtctcttcctcgccaacttcgtcgccagccagcactggatgtcgggcatctttgcaccctccatcatcgggctcgccaacgccgtcacggctcgctgactagtgtaaattccaggattcagattgtccaacgatgcagagcatcacgctttcggcatctaacgaaccttctcaactgcagactcttgatatcagttactaaaaacttttgtttaggcctcaaaatatattaattgatcactgccctggtctgatcaaatggtgtgatgagcaagagctcttctgtcaggtgaggtcttatgttcttctaaattttttattttaacattagtccattgtcttgtgttctcgcaatagtttttcagtaccatactgcataaaaggtatagtccattgtctgccaagggtttcttaaaatttgaaatgtttaaatattttattcttggtattgtgctacataggttagcaatatttaaagaataattgtttgttgggacaggaatatctttgttctctcggaagcttgtatattgcattggttagcaagttttaaaaggtatagtccattcgtctcttcgatagcaggataagtgattccaatgcatgtagatcacatacaaacaacactttaaaatatacaaatatatatatatacaagttttacatgctaaaacacgtttgttgttctgaaacaaagtattcaaaccaacttcaacaatgatactacaacgacctcctacaacatttattgctcttcgtttttatattgttatggatatggaattaattaggaaagaaacgacttcaatgacagagctaggggtggccagcggtggctaggcccttgctactaccgcactgcacatgttttttttgctacattgattatgtgacacagtccttgccaaagtggtgggttcttgcttgtagcattcctgattccctgatcttttgttacttcacttcttgttttcttgaccctaccaaagtcgatctgagtaagctattgcctagcaaaggaagcttctatcccctggttagatgatgtttcctttcctcaactctgttaggctattgttgcattcagacagtattttaattcccatataagcgtacattggctatattgactttgtaaatctcacaagggtaagcataactaaactaaaaagtaaatttgagcgattcagatatagtaaaaaagtggcgatatgatgccggttggcatcctttttagtatatatagtatgaaatatcctcattgtgggactgataatttaagtggtgagatatcttctgtctcatttcaaaatgttattttccatcaaaaaagggtatatggcaaaattattattattatgaaaaatgttgttttggatgtgattaacaatgaatattgtaaacgtgaaataaatctttcaggtatggtcattacactccagatggaactggttattttctttcttcacaacatcaacgaacatagcaactacattctgtcgtgtcggcacctggatccatcacgggcgaggaggctgaataggagggtggaggaggcgagtcgcgtgctgtctgattccttcgttatcttctgtgttttttcctagaacaaggtttcctctccggtattatttttggccaaaagatgattagatgggctgctggagacgggaggaggcgacggtctgtgtgttttcccctgatctatttgtgtactctaactgcagaagaacaaatgggagttcttcatgttcctcactctagaagtttttgtaatgatcattactagctttgctactgctgttattataagtaatgacttgagtccttttagcttaattatcacactagaatctattattgatccactgtttttttgtcacaaaaattgcaagggatccagattctccatcatccttaggtgctttttcatcatcctggagtggtttcgtt

SEQ ID NO: 83703 - DNA, 1392 bp, Zea Mays
cggcaaagctccaggcgagtagccgaccaaccgtcctgcccgtccaggtccagcagtccaggatttcccaaccctaactagcagcagctgccgccgtcgagcaccagtccatggtctgccatgggcgccgtcctgacactgccgccgtcgagcagctaccacaggtgggctgtcctgatgcaaggaatagtagcatgcctctatttaatcgggtaactgtaaattacccgaaccccgaacccgatttttttggtacccgaattttcgggtacccgaaaaaatcgggtcgagttcgggttcgactgttgaatacccgaattatttaaaacccgaacaactcgacccgaaatttcgggtatacccgaatgcccagtcctacttctggctgcgctcaccgtcgtgatcatcgcggtcaccacagcgtcgccctcggggttcatcgtgttgcgcttcgtggcgggtctcttcctcgccaacttcgtcgccagccagcactggatgtcgggcatctttgcaccctccatcatcgggctcgccaacgccgtcacggctcgctgactagtgtaaattccaggattcagattgtccaacgatgcagagcatcacgctctaattggtctctagctttcggcatctaacgaaccttctcaactgcagactcttgatatcagttactgtaagaacctagaatccttgttggcactcgaatatctttgttctattggaagcttatatattgcccattgtcataaatgtattgttctgtgttaagaaaaacttttgtttaggcctcaaaatatattaattgatcactgccctggtctgatcaaatggtgtgatgagcaagagctcttctgtcaggtatggtcattacactccagatggaactggttattttctttcttcacaacatcaacgaacatagcaactacattctgtcgtgtcggcacctggatccatcacgggcgaggaggctgaataggagggtggaggaggcgagtcgcgtgctgtctgattccttcgttatcttctgtgttttttcctagaacaaggtttcctctccggtattatttttggccaaaagatgattagatgggctgctggagacgggaggaggcgacggtctgtgtgttttcccctgatctatttgtgtactctaactgcagaagaacaaatgggagttcttcatgttcctcactctagaagtttttgtaatgatcattactagctttgctactgctgttattataagtaatgacttgagtccttttagcttaattatcacactagaatctattattgatccactgtttttttgtcacaaaaattgcaagggatccagattctccatcatccttaggtgctttttcatcatcctggagtggtttcgtt

SEQ ID NO: 83704 - DNA, 1006 bp, Zea Mays
cggcaaagctccaggcgagtagccgaccaaccgtcctgcccgtccaggtccagcagtccaggatttcccaaccctaactagcagcagctgccgccgtcgagcaccagtccatggtctgccatgggcgccgtcctgacactgccgccgtcgagcagctaccacagcgtcgccctcggggttcatcgtgttgcgcttcgtggcgggtctcttcctcgccaacttcgtcgccagccagcactggatgtcgggcatctttgcaccctccatcatcgggctcgccaacgccgtcacggctcgctgactagtgtaaattccaggattcagattgtccaacgatgcagagcatcacgctttcggcatctaacgaaccttctcaactgcagactcttgatatcagttactgcctcaaaatatattaattgatcactgccctggtctgatcaaatggtgtgatgagcaagagctcttctgtcaggtatggtcattacactccagatggaactggttattttctttcttcacaacatcaacgaacatagcaactacattctgtcgtgtcggcacctggatccatcacgggcgaggaggctgaataggagggtggaggaggcgagtcgcgtgctgtctgattccttcgttatcttctgtgttttttcctagaacaaggtttcctctccggtattatttttggccaaaagatgattagatgggctgctggagacgggaggaggcgacggtctgtgtgttttcccctgatctatttgtgtactctaactgcagaagaacaaatgggagttcttcatgttcctcactctagaagtttttgtaatgatcattactagctttgctactgctgttattataagtaatgacttgagtccttttagcttaattatcacactagaatctattattgatccactgtttttttgtcacaaaaattgcaagggatccagattctccatcatccttaggtgctttttcatcatcctggagtggtttcgtt

SEQ ID NO: 83705 - DNA, 1379 bp, Zea Mays
cggcaaagctccaggcgagtagccgaccaaccgtcctgcccgtccaggtccagcagtccaggatttcccaaccctaactagcagcagctgccgccgtcgagcaccagtccatggtctgccatgggcgccgtcctgacactgccgccgtcgagcagctaccacagcgtcgccctcggggttcatcgtgttgcgcttcgtggcgggtctcttcctcgccaacttcgtcgccagccagcactggatgtcgggcatctttgcaccctccatcatcgggctcgccaacgccgtcacggctcgctgactagtgtaaattccaggattcagattgtccaacgatgcagagcatcacggtaagaaactgcaacaaacttagtcaaattccttactttgtctctgtcaggaatctaatgataataaagtcagctctaattggtctctagctttcggcatctaacgaaccttctcaactgcagactcttgatatcagttactaaaaacttttgtttaggcctcaaaatatattaattgatcactgccctggtctgatcaaatggtgtgatgagcaagagctcttctgtcaggtgaggtcttatgttcttctaaattttttattttaacattagtccattgtcttgtgttctcgcaatagtttttcagtaccatactgcataaaaggtatagtccattgtctgccaagggtttcttaaaatttgaaatgtttaaatattttattcttggtattgtgctacataggttagcaatatttaaagaataattgtttgttgggacaggaatatctttgttctctcggaagcttgtatattgcattggttagcaagttttaaaaggtatggtcattacactccagatggaactggttattttctttcttcacaacatcaacgaacatagcaactacattctgtcgtgtcggcacctggatccatcacgggcgaggaggctgaataggagggtggaggaggcgagtcgcgtgctgtctgattccttcgttatcttctgtgttttttcctagaacaaggtttcctctccggtattatttttggccaaaagatgattagatgggctgctggagacgggaggaggcgacggtctgtgtgttttcccctgatctatttgtgtactctaactgcagaagaacaaatgggagttcttcatgttcctcactctagaagtttttgtaatgatcattactagctttgctactgctgttattataagtaatgacttgagtccttttagcttaattatcacactagaatctattattgatccactgtttttttgtcacaaaaattgcaagggatccagattctccatcatccttaggtgctttttcatcatcctggagtggtttcgtt

SEQ ID NO: 83706 - DNA, 2131 bp, Zea Mays
cggcaaagctccaggcgagtagccgaccaaccgtcctgcccgtccaggtccagcagtccaggatttcccaaccctaactagcagcagctgccgccgtcgagcaccagtccatggtctgccatgggcgccgtcctgacactgccgccgtcgagcagctaccacagcgtcgccctcggggttcatcgtgttgcgcttcgtggcgggtctcttcctcgccaacttcgtcgccagccagcactggatgtcgggcatctttgcaccctccatcatcgggctcgccaacgccgtcacggctcgctgactagtgtaaattccaggattcagattgtccaacgatgcagagcatcacggtaagaaactgcaacaaacttagtcaaattccttactttgtctctgtcaggaatctaatgataataaagtcagctctaattggtctctagctttcggcatctaacgaaccttctcaactgcagactcttgatatcagttactgtaagaacctagaatccttgttggcactcgaatatctttgttctattggaagcttatatattgcccattgtcataaatgtattgttctgtgttaagaaaaacttttgtttaggcctcaaaatatattaattgatcactgccctggtctgatcaaatggtgtgatgagcaagagctcttctgtcaggaatatctttgttctctcggaagcttgtatattgcattggttagcaagttttaaaaggtatagtccattcgtctcttcgatagcaggataagtgattccaatgcatgtagatcacatacaaacaacactttaaaatatacaaatatatatatatacaagttttacatgctaaaacacgtttgttgttctgaaacaaagtattcaaaccaacttcaacaatgatactacaacgacctcctacaacatttattgctcttcgtttttatattgttatggatatggaattaattaggaaagaaacgacttcaatgacagagctaggggtggccagcggtggctaggcccttgctactaccgcactgcacatgttttttttgctacattgattatgtgacacagtccttgccaaagtggtgggttcttgcttgtagcattcctgattccctgatcttttgttacttcacttcttgttttcttgaccctaccaaagtcgatctgagtaagctattgcctagcaaaggaagcttctatcccctggttagatgatgtttcctttcctcaactctgttaggctattgttgcattcagacagtattttaattcccatataagcgtacattggctatattgactttgtaaatctcacaagggtaagcataactaaactaaaaagtaaatttgagcgattcagatatagtaaaaaagtggcgatatgatgccggttggcatcctttttagtatatatagtatgaaatatcctcattgtgggactgataatttaagtggtgagatatcttctgtctcatttcaaaatgttattttccatcaaaaaagggtatatggcaaaattattattattatgaaaaatgttgttttggatgtgattaacaatgaatattgtaaacgtgaaataaatctttcaggtatggtcattacactccagatggaactggttattttctttcttcacaacatcaacgaacatagcaactacattctgtcgtgtcggcacctggatccatcacgggcgaggaggctgaataggagggtggaggaggcgagtcgcgtgctgtctgattccttcgttatcttctgtgttttttcctagaacaaggtttcctctccggtattatttttggccaaaagatgattagatgggctgctggagacgggaggaggcgacggtctgtgtgttttcccctgatctatttgtgtactctaactgcagaagaacaaatgggagttcttcatgttcctcactctagaagtttttgtaatgatcattactagctttgctactgctgttattataagtaatgacttgagtccttttagcttaattatcacactagaatctattattgatccactgtttttttgtcacaaaaattgcaagggatccagattctccatcatccttaggtgctttttcatcatcctggagtggtttcgtt

SEQ ID NO: 83707 - DNA, 2774 bp, Zea Mays
cgacagcgccctcgcgtgatttgtttgatgtcaccatgtcatcttatcctgtgctaaacaaccgaccaattgatcagtggagggttactgatttgaaggatgagctccgtaaaaggaagcttcctgttaaaggtttgaaggaggaactcgtaaggcgactctttgactccattcagagtgaaatagaagctgatgaagctgacgaagctgatgaggatgtgggagtgaatgtggatgatcagttgcctgatgccaatgctagcgaggaaaatacagttaccgttacggaagttcatcaggaaactgtggttcatgtcactcagcaagttgaagttcctaccaccaaagctggtcaggaatccacaatttctcccactagaagggcccccagtgtcgatgttgaagaggcctcagcagacgaagaagtacccgaatcagttgctgaaggaaatatgtcatttgaagaagtgcaagtgcatactgaaattactaatgagcctgttcatgagaagaccacagacgttgacaccaatgatacagttgttgttaatgatgcaatcgatgtgaattcagacttggcgcctgctgaagtcaagtttggtgctacggaagcaagcaaaattgaagaacatgatttcccccctgcacctgtagatgccttaaattcagatgctgctggtcctatggatactgatgtcgtcacagctgcaacttcagacgttggttctatggatactgatgttgtcacacgtgcaccagttagcgatgatgaggagaaactggaactgaaggttgatttgggtaacaaggtgtcaatgtatgatgaagataacaatagttctgataccatgaatgaggactgcaagcccatcgtatcaaaaccaaacaatcagaattagaggttcagccgaagatggtccaaccatcatccggcattacttcattaggtggagatttgcagccattggatgatgacaaagagctggttaagaaccagacatctttggaagacatagattccacagctaatgtggactcatacaagaaggatagtcctgaaggtgggtctccagagaaattaaatctagacaggagttcaggtgatgagtcaatggaggaggatgttgtggaaattaaacaagatgaggccaatatgaaatctgatgatctcggacaaaagaatgagcttaactcagaagatgtgaaagaggtgatcctccctgattctgttgttgaggcttccaaggaggttacggctgaagaaaagtcagcagcttcaacagaaaagagaaaacttgaagatgaagatattgcaaacactgaaccaatcaagcgacaacgtcggtggactgcagacgttgccaaagttccagagagacaagcattgagtcaaactggtcctgaaactcctaaggatatttttcagcctgctttcaaacgatcttttgggaggtctgattcaacagcaagtgtagattctcctaaggaacggattgtaccacctgcagagaaacctgccacaacttctttgagaattgaccgatttgtacgcccatttaccctgaaagctgtgcaggagcttcttggtaaaactggatctgtacaagacttctggatggaccatatcaagactcattgctatgtgacattttcttcggtggatgaagcaatggctactagggatgctgtttacaacctacagtggcccccaaataacggcaataagttggtcgccgaatttgttgatcctcaggaagtgaagctcaaggttgacccccctcccccgccagctgctcctgttagcccagctgctatcacaagggcacctcctcttcaacagactcaaagtgtgccacgccaggctgctacaccaaaagagcaactgccacctccaccaccgcctccccttgctaagccacctatggctgacccggcggctatagcgagagagaggcttccacccactccgaagaagccagagcctcctgttgtgacacttgatgatctcttcaggaagacacagtcctctccaaggatctactatctgcctttatcagaagaggaggtggcagccaagctcgccgcacagggcaaaggaaaaaaggagtaggaggtgttggcttccattttcggctatctcggagtttgttgtggaacatggcgtgcggtggtcacagcatcagacaggtgctactgctgcagaccatttgaaataaccggcggccgtgactgccgcggcggaagagtagtcgtagggctagtgtaggagcagcagcagcggcttgtatttcttaaagagattattagttttggttgggtctccgactgcagtgtgtgctaaagttatttgagctgcatgaggttttgtttgggtactctagtattgatcccaatctatatgtgttgaggtgtaaattagtttaagttacatcctaatccaccttaatagatgtgggttgagttaaatattagagtacccaaactaggcctgaagcgtctgaagaacttggtttaatctatgctgtcaggtactgttaaaaggcaccagttttagtgttgagtctatgaagaatattgttgggattccttgtcttagggggtgtttgtttgggattataatccacctagattatataatccagcaatttttgaactaactattagttcaaaagttgttagattatataatccagatagattataatctcaaacaaacacccccttattctagtctttgccttgctcaccgtgagtctcggcaagagcaggttggt

SEQ ID NO: 83708 - DNA, 2786 bp, Zea Mays
ttccgacagcgccctcgcgtgatttgtttgatgtcaccatgtcatcttatcctgtgctaaacaaccgaccaattgatcagtggagggttactgatttgaaggatgagctccgtaaaaggaagcttcctgttaaaggtttgaaggaggaactcgtaaggcgactctttgactccattcagagtgaaatagaagctgatgaagctgacgaagctgatgaggatgtgggagtgaatgtggatgatcagttgcctgatgccaatgctagcgaggaaaatacagttaccgttacggaagttcatcaggaaactgtggttcatgtcactcagcaagttgaagttcctaccaccaaagctggtcaggaatccacaatttctcccactagaagggcccccagtgtcgatgttgaagaggcctcagcagacgaagaagtacccgaatcagttgctgaaggaaatatgtcatttgaagaagtgcaagtgcatactgaaattactaatgagcctgttcatgagaagaccacagacgttgacaccaatgatacagttgttgttaatgatgcaatcgatgtgaattcagacttggcgcctgctgaagtcaagtttggtgctacggaagcaagcaaaattgaagaacatgatttcccccctgcacctgtagatgccttaaattcagatgctgctggtcctatggatactgatgtcgtcacagctgcaacttcagacgttggttctatggatactgatgttgtcacacgtgcaccagttagcgatgatgaggagaaactggaactgaaggttgatttgggtaacaaggtgtcaatgtatgatgaagataacaatagttctgataccatgaatgaggactgcaagcccatcgtatcaaaaccaaacaatcaggtacctgagaattagaggttcagccgaagatggtccaaccatcatccggcattacttcattaggtggagatttgcagccattggatgatgacaaagagctggttaagaaccagacatctttggaagacatagattccacagctaatgtggactcatacaagaaggatagtcctgaaggtgggtctccagagaaattaaatctagacaggagttcaggtgatgagtcaatggaggaggatgttgtggaaattaaacaagatgaggccaatatgaaatctgatgatctcggacaaaagaatgagcttaactcagaagatgtgaaagaggtgatcctccctgattctgttgttgaggcttccaaggaggttacggctgaagaaaagtcagcagcttcaacagaaaagagaaaacttgaagatgaagatattgcaaacactgaaccaatcaagcgacaacgtcggtggactgcagacgttgccaaagttccagagagacaagcattgagtcaaactggtcctgaaactcctaaggatatttttcagcctgctttcaaacgatcttttgggaggtctgattcaacagcaagtgtagattctcctaaggaacggattgtaccacctgcagagaaacctgccacaacttctttgagaattgaccgatttgtacgcccatttaccctgaaagctgtgcaggagcttcttggtaaaactggatctgtacaagacttctggatggaccatatcaagactcattgctatgtgacattttcttcggtggatgaagcaatggctactagggatgctgtttacaacctacagtggcccccaaataacggcaataagttggtcgccgaatttgttgatcctcaggaagtgaagctcaaggttgacccccctcccccgccagctgctcctgttagcccagctgctatcacaagggcacctcctcttcaacagactcaaagtgtgccacgccaggctgctacaccaaaagagcaactgccacctccaccaccgcctccccttgctaagccacctatggctgacccggcggctatagcgagagagaggcttccacccactccgaagaagccagagcctcctgttgtgacacttgatgatctcttcaggaagacacagtcctctccaaggatctactatctgcctttatcagaagaggaggtggcagccaagctcgccgcacagggcaaaggaaaaaaggagtaggaggtgttggcttccattttcggctatctcggagtttgttgtggaacatggcgtgcggtggtcacagcatcagacaggtgctactgctgcagaccatttgaaataaccggcggccgtgactgccgcggcggaagagtagtcgtagggctagtgtaggagcagcagcagcggcttgtatttcttaaagagattattagttttggttgggtctccgactgcagtgtgtgctaaagttatttgagctgcatgaggttttgtttgggtactctagtattgatcccaatctatatgtgttgaggtgtaaattagtttaagttacatcctaatccaccttaatagatgtgggttgagttaaatattagagtacccaaactaggcctgaagcgtctgaagaacttggtttaatctatgctgtcaggtactgttaaaaggcaccagttttagtgttgagtctatgaagaatattgttgggattccttgtcttagggggtgtttgtttgggattataatccacctagattatataatccagcaatttttgaactaactattagttcaaaagttgttagattatataatccagatagattataatctcaaacaaacacccccttattctagtctttgccttgctcaccgtgagtctcggcaagagcaggttggt

SEQ ID NO: 83709 - DNA, 2794 bp, Zea Mays
gtccgcccctggctgtgatgctcttctgtgtttccgacagcgccctcgcgtgatttgtttgatgtcaccatgtcatcttatcctgtgctaaacaaccgaccaattgatcagtggagggttactgatttgaaggatgagctccgtaaaaggaagcttcctgttaaaggtttgaaggaggaactcgtaaggcgactctttgactccattcagagtgaaatagaagctgatgaagctgacgaagctgatgaggatgtgggagtgaatgtggatgatcagttgcctgatgccaatgctagcgaggaaaatacagttaccgttacggaagttcatcaggaaactgtggttcatgtcactcagcaagttgaagttcctaccaccaaagctggtcaggaatccacaatttctcccactagaagggcccccagtgtcgatgttgaagaggcctcagcagacgaagaagtacccgaatcagttgctgaaggaaatatgtcatttgaagaagtgcaagtgcatactgaaattactaatgagcctgttcatgagaagaccacagacgttgacaccaatgatacagttgttgttaatgatgcaatcgatgtgaattcagacttggcgcctgctgaagtcaagtttggtgctacggaagcaagcaaaattgaagaacatgatttcccccctgcacctgtagatgccttaaattcagatgctgctggtcctatggatactgatgtcgtcacagctgcaacttcagacgttggttctatggatactgatgttgtcacacgtgcaccagttagcgatgatgaggagaaactggaactgaaggttgatttgggtaacaaggtgtcaatgtatgatgaagataacaatagttctgataccatgaatgaggactgcaagcccatcgtatcaaaaccaaacaatcagccgaagatggtccaaccatcatccggcattacttcattaggtggagatttgcagccattggatgatgacaaagagctggttaagaaccagacatctttggaagacatagattccacagctaatgtggactcatacaagaaggatagtcctgaaggtgggtctccagagaaattaaatctagacaggagttcaggtgatgagtcaatggaggaggatgttgtggaaattaaacaagatgaggccaatatgaaatctgatgatctcggacaaaagaatgagcttaactcagaagatgtgaaagaggtgatcctccctgattctgttgttgaggcttccaaggaggttacggctgaagaaaagtcagcagcttcaacagaaaagagaaaacttgaagatgaagatattgcaaacactgaaccaatcaagcgacaacgtcggtggactgcagacgttgccaaagttccagagagacaagcattgagtcaaactggtcctgaaactcctaaggatatttttcagcctgctttcaaacgatcttttgggaggtctgattcaacagcaagtgtagattctcctaaggaacggattgtaccacctgcagagaaacctgccacaacttctttgagaattgaccgatttgtacgcccatttaccctgaaagctgtgcaggagcttcttggtaaaactggatctgtacaagacttctggatggaccatatcaagactcattgctatgtgacattttcttcggtggatgaagcaatggctactagggatgctgtttacaacctacagtggcccccaaataacggcaataagttggtcgccgaatttgttgatcctcaggaagtgaagctcaaggttgacccccctcccccgccagctgctcctgttagcccagctgctatcacaagggcacctcctcttcaacagactcaaagtgtgccacgccaggctgctacaccaaaagagcaactgccacctccaccaccgcctccccttgctaagccacctatggctgacccggcggctatagcgagagagaggcttccacccactccgaagaagccagagcctcctgttgtgacacttgatgatctcttcaggaagacacagtcctctccaaggatctactatctgcctttatcagaagaggaggtggcagccaagctcgccgcacagggcaaaggaaaaaaggagtaggaggtgttggcttccattttcggctatctcggagtttgttgtggaacatggcgtgcggtggtcacagcatcagacaggtgctactgctgcagaccatttgaaataaccggcggccgtgactgccgcggcggaagagtagtcgtagggctagtgtaggagcagcagcagcggcttgtatttcttaaagagattattagttttggttgggtctccgactgcagtgtgtgctaaagttatttgagctgcatgaggttttgtttgggtactctagtattgatcccaatctatatgtgttgaggtgtaaattagtttaagttacatcctaatccaccttaatagatgtgggttgagttaaatattagagtacccaaactaggcctgaagcgtctgaagaacttggtttaatctatgctgtcaggtactgttaaaaggcaccagttttagtgttgagtctatgaagaatattgttgggattccttgtcttagggggtgtttgtttgggattataatccacctagattatataatccagcaatttttgaactaactattagttcaaaagttgttagattatataatccagatagattataatctcaaacaaacacccccttattctagtctttgccttgctcaccgtgagtctcggcaagagcaggttggt

SEQ ID NO: 83710 - DNA, 2914 bp, Zea Mays
cccttgtccctccctgctgtgcgaaaccgtgcgcccaaaccctaactcaccatgtcatcttatcctgtgctaaacaaccgaccaattgatcagtggagggttactgatttgaaggatgagctccgtaaaaggaagcttcctgttaaaggtttgaaggaggaactcgtaaggcgactctttgactccattcagagtgaaatagaagctgatgaagctgacgaagctgatgaggatgtgggagtgaatgtggatgatcagttgcctgatgccaatgctagcgaggaaaatacagttaccgttacggaagttcatcaggaaactgtggttcatgtcactcagcaagttgaagttcctaccaccaaagctggtcaggaatccacaatttctcccactagaagggcccccagtgtcgatgttgaagaggcctcagcagacgaagaagtacccgaatcagttgctgaaggaaatatgtcatttgaagaagtgcaagtgcatactgaaattactaatgagcctgttcatgagaagaccacagacgttgacaccaatgatacagttgttgttaatgatgcaatcgatgtgaattcagacttggcgcctgctgaagtcaagtttggtgctacggaagcaagcaaaattgaagaacatgatttcccccctgcacctgtagatgccttaaattcagatgctgctggtcctatggatactgatgtcgtcacagctgcaacttcagacgttggttctatggatactgatgttgtcacacgtgcaccagttagcgatgatgaggagaaactggaactgaaggttgatttgggtaacaaggtgtcaatgtatgatgaagataacaatagttctgataccatgaatgaggactgcaagcccatcgtatcaaaaccaaacaatcaggtacctgaggttagtccagatttagggtctcaaattaagtgtgagtcgatttctactgataatctatcatctaacaaaaagaatactataaaagataatttaaatgctaataattttgatttagaattagaggttcagccgaagatggtccaaccatcatccggcattacttcattaggtggagatttgcagccattggatgatgacaaagagctggttaagaaccagacatctttggaagacatagattccacagctaatgtggactcatacaagaaggatagtcctgaaggtgggtctccagagaaattaaatctagacaggagttcaggtgatgagtcaatggaggaggatgttgtggaaattaaacaagatgaggccaatatgaaatctgatgatctcggacaaaagaatgagcttaactcagaagatgtgaaagaggtgatcctccctgattctgttgttgaggcttccaaggaggttacggctgaagaaaagtcagcagcttcaacagaaaagagaaaacttgaagatgaagatattgcaaacactgaaccaatcaagcgacaacgtcggtggactgcagacgttgccaaagttccagagagacaagcattgagtcaaactggtcctgaaactcctaaggatatttttcagcctgctttcaaacgatcttttgggaggtctgattcaacagcaagtgtagattctcctaaggaacggattgtaccacctgcagagaaacctgccacaacttctttgagaattgaccgatttgtacgcccatttaccctgaaagctgtgcaggagcttcttggtaaaactggatctgtacaagacttctggatggaccatatcaagactcattgctatgtgacattttcttcggtggatgaagcaatggctactagggatgctgtttacaacctacagtggcccccaaataacggcaataagttggtcgccgaatttgttgatcctcaggaagtgaagctcaaggttgacccccctcccccgccagctgctcctgttagcccagctgctatcacaagggcacctcctcttcaacagactcaaagtgtgccacgccaggctgctacaccaaaagagcaactgccacctccaccaccgcctccccttgctaagccacctatggctgacccggcggctatagcgagagagaggcttccacccactccgaagaagccagagcctcctgttgtgacacttgatgatctcttcaggaagacacagtcctctccaaggatctactatctgcctttatcagaagaggaggtggcagccaagctcgccgcacagggcaaaggaaaaaaggagtaggaggtgttggcttccattttcggctatctcggagtttgttgtggaacatggcgtgcggtggtcacagcatcagacaggtgctactgctgcagaccatttgaaataaccggcggccgtgactgccgcggcggaagagtagtcgtagggctagtgtaggagcagcagcagcggcttgtatttcttaaagagattattagttttggttgggtctccgactgcagtgtgtgctaaagttatttgagctgcatgaggttttgtttgggtactctagtattgatcccaatctatatgtgttgaggtgtaaattagtttaagttacatcctaatccaccttaatagatgtgggttgagttaaatattagagtacccaaactaggcctgaagcgtctgaagaacttggtttaatctatgctgtcaggtactgttaaaaggcaccagttttagtgttgagtctatgaagaatattgttgggattccttgtcttagggggtgtttgtttgggattataatccacctagattatataatccagcaatttttgaactaactattagttcaaaagttgttagattatataatccagatagattataatctcaaacaaacacccccttattctagtctttgccttgctcaccgtgagtctcggcaagagcaggttggt

SEQ ID NO: 83711 - DNA, 2817 bp, Zea Mays
tgcgcccaaaccctaacttctattcgtagtcaccatgtcatcttatcctgtgctaaacaaccgaccaattgatcagtggagggttactgatttgaaggatgagctccgtaaaaggaagcttcctgttaaaggtttgaaggaggaactcgtaaggcgactctttgactccattcagagtgaaatagaagctgatgaagctgacgaagctgatgaggatgtgggagtgaatgtggatgatcagttgcctgatgccaatgctagcgaggaaaatacagttaccgttacggaagttcatcaggaaactgtggttcatgtcactcagcaagttgaagttcctaccaccaaagctggtcaggaatccacaatttctcccactagaagggcccccagtgtcgatgttgaagaggcctcagcagacgaagaagtacccgaatcagttgctgaaggaaatatgtcatttgaagaagtgcaagtgcatactgaaattactaatgagcctgttcatgagaagaccacagacgttgacaccaatgatacagttgttgttaatgatgcaatcgatgtgaattcagacttggcgcctgctgaagtcaagtttggtgctacggaagcaagcaaaattgaagaacatgatttcccccctgcacctgtagatgccttaaattcagatgctgctggtcctatggatactgatgtcgtcacagctgcaacttcagacgttggttctatggatactgatgttgtcacacgtgcaccagttagcgatgatgaggagaaactggaactgaaggttgatttgggtaacaaggtgtcaatgtatgatgaagataacaatagttctgataccatgaatgaggactgcaagcccatcgtatcaaaaccaaacaatcaggtacctgaggttagtccagatttagggtctcaaattaagtgtgagtcgatttctactgataatctatcatctaacaaaaagaatactataaaagataatttaaatgctaataattttgatttagaattagaggttcagccgaagatggtccaaccatcatccggcattacttcattaggtggagatttgcagccattggatgatgacaaagagctggttaagaaccagacatctttggaagacatagattccacagctaatgtggactcatacaagaaggatagtcctgaaggtgggtctccagagaaattaaatctagacaggagttcaggtgatgagtcaatggaggaggatgttgtggaaattaaacaagatgaggccaatatgaaatctgatgatctcggacaaaagaatgagcttaactcagaagatgtgaaagaggtgatcctccctgattctgttgttgaggcttccaaggaggttacggctgaagaaaagtcagcagcttcaacagaaaagagaaaacttgaagatgaagatattgcaaacactgaaccaatcaagcgacaacgtcggtggactgcagacgttgccaaagttccagagagacaagcattgagtcaaactggtcctgaaactcctaaggatatttttcagcctgctttcaaacgatcttttgggaggtctgattcaacagcaagtgtagattctcctaaggaacggattggagcttcttggtaaaactggatctgtacaagacttctggatggaccatatcaagactcattgctatgtgacattttcttcggtggatgaagcaatggctactagggatgctgtttacaacctacagtggcccccaaataacggcaataagttggtcgccgaatttgttgatcctcaggaagtgaagctcaaggttgacccccctcccccgccagctgctcctgttagcccagctgctatcacaagggcacctcctcttcaacagactcaaagtgtgccacgccaggctgctacaccaaaagagcaactgccacctccaccaccgcctccccttgctaagccacctatggctgacccggcggctatagcgagagagaggcttccacccactccgaagaagccagagcctcctgttgtgacacttgatgatctcttcaggaagacacagtcctctccaaggatctactatctgcctttatcagaagaggaggtggcagccaagctcgccgcacagggcaaaggaaaaaaggagtaggaggtgttggcttccattttcggctatctcggagtttgttgtggaacatggcgtgcggtggtcacagcatcagacaggtgctactgctgcagaccatttgaaataaccggcggccgtgactgccgcggcggaagagtagtcgtagggctagtgtaggagcagcagcagcggcttgtatttcttaaagagattattagttttggttgggtctccgactgcagtgtgtgctaaagttatttgagctgcatgaggttttgtttgggtactctagtattgatcccaatctatatgtgttgaggtgtaaattagtttaagttacatcctaatccaccttaatagatgtgggttgagttaaatattagagtacccaaactaggcctgaagcgtctgaagaacttggtttaatctatgctgtcaggtactgttaaaaggcaccagttttagtgttgagtctatgaagaatattgttgggattccttgtcttagggggtgtttgtttgggattataatccacctagattatataatccagcaatttttgaactaactattagttcaaaagttgttagattatataatccagatagattataatctcaaacaaacacccccttattctagtctttgccttgctcaccgtgagtctcggcaagagcaggttggt

SEQ ID NO: 83712 - DNA, 2910 bp, Zea Mays
cttcccttcctgcggcgcgaagccgtgcgcccaaaccctaacttctattcgtagtcaccatgtcatcttatcctgtgctaaacaaccgaccaattgatcagtggagggttactgatttgaaggatgagctccgtaaaaggaagcttcctgttaaaggtttgaaggaggaactcgtaaggcgactctttgactccattcagagtgaaatagaagctgatgaagctgacgaagctgatgaggatgtgggagtgaatgtggatgatcagttgcctgatgccaatgctagcgaggaaaatacagttaccgttacggaagttcatcaggaaactgtggttcatgtcactcagcaagttgaagttcctaccaccaaagctggtcaggaatccacaatttctcccactagaagggcccccagtgtcgatgttgaagaggcctcagcagacgaagaagtacccgaatcagttgctgaaggaaatatgtcatttgaagaagtgcaagtgcatactgaaattactaatgagcctgttcatgagaagaccacagacgttgacaccaatgatacagttgttgttaatgatgcaatcgatgtgaattcagacttggcgcctgctgaagtcaagtttggtgctacggaagcaagcaaaattgaagaacatgatttcccccctgcacctgtagatgccttaaattcagatgctgctggtcctatggatactgatgtcgtcacagctgcaacttcagacgttggttctatggatactgatgttgtcacacgtgcaccagttagcgatgatgaggagaaactggaactgaaggttgatttgggtaacaaggtgtcaatgtatgatgaagataacaatagttctgataccatgaatgaggactgcaagcccatcgtatcaaaaccaaacaatcaggtacctgaggttagtccagatttagggtctcaaattaagtgtgagtcgatttctactgataatctatcatctaacaaaaagaatactataaaagataatttaaatgctaataattttgatttagaattagaggttcagccgaagatggtccaaccatcatccggcattacttcattaggtggagatttgcagccattggatgatgacaaagagctggttaagaaccagacatctttggaagacatagattccacagctaatgtggactcatacaagaaggatagtcctgaaggtgggtctccagagaaattaaatctagacaggagttcaggtgatgagtcaatggaggaggatgttgtggaaattaaacaagatgaggccaatatgaaatctgatgatctcggacaaaagaatgagcttaactcagaagatgtgaaagaggtgatcctccctgattctgttgttgaggcttccaaggaggttacggctgaagaaaagtcagcagcttcaacagaaaagagaaaacttgaagatgaagatattgcaaacactgaaccaatcaagcgacaacgtcggtggactgcagacgttgccaaagttccagagagacaagcattgagtcaaactggtcctgaaactcctaaggatatttttcagcctgctttcaaacgatcttttgggaggtctgattcaacagcaagtgtagattctcctaaggaacggattgagaaacctgccacaacttctttgagaattgaccgatttgtacgcccatttaccctgaaagctgtgcaggagcttcttggtaaaactggatctgtacaagacttctggatggaccatatcaagactcattgctatgtgacattttcttcggtggatgaagcaatggctactagggatgctgtttacaacctacagtggcccccaaataacggcaataagttggtcgccgaatttgttgatcctcaggaagtgaagctcaaggttgacccccctcccccgccagctgctcctgttagcccagctgctatcacaagggcacctcctcttcaacagactcaaagtgtgccacgccaggctgctacaccaaaagagcaactgccacctccaccaccgcctccccttgctaagccacctatggctgacccggcggctatagcgagagagaggcttccacccactccgaagaagccagagcctcctgttgtgacacttgatgatctcttcaggaagacacagtcctctccaaggatctactatctgcctttatcagaagaggaggtggcagccaagctcgccgcacagggcaaaggaaaaaaggagtaggaggtgttggcttccattttcggctatctcggagtttgttgtggaacatggcgtgcggtggtcacagcatcagacaggtgctactgctgcagaccatttgaaataaccggcggccgtgactgccgcggcggaagagtagtcgtagggctagtgtaggagcagcagcagcggcttgtatttcttaaagagattattagttttggttgggtctccgactgcagtgtgtgctaaagttatttgagctgcatgaggttttgtttgggtactctagtattgatcccaatctatatgtgttgaggtgtaaattagtttaagttacatcctaatccaccttaatagatgtgggttgagttaaatattagagtacccaaactaggcctgaagcgtctgaagaacttggtttaatctatgctgtcaggtactgttaaaaggcaccagttttagtgttgagtctatgaagaatattgttgggattccttgtcttagggggtgtttgtttgggattataatccacctagattatataatccagcaatttttgaactaactattagttcaaaagttgttagattatataatccagatagattataatctcaaacaaacacccccttattctagtctttgccttgctcaccgtgagtctcggcaagagcaggttggt

SEQ ID NO: 83713 - DNA, 2816 bp, Zea Mays
gtatgccctccctttgttcttcccttcctgcggcgcgaagccgtgcgcccaaaccctaacttctattcgtagtcaccatgtcatcttatcctgtgctaaacaaccgaccaattgatcagtggagggttactgatttgaaggatgagctccgtaaaaggaagcttcctgttaaaggtttgaaggaggaactcgtaaggcgactctttgactccattcagagtgaaatagaagctgatgaagctgacgaagctgatgaggatgtgggagtgaatgtggatgatcagttgcctgatgccaatgctagcgaggaaaatacagttaccgttacggaagttcatcaggaaactgtggttcatgtcactcagcaagttgaagttcctaccaccaaagctggtcaggaatccacaatttctcccactagaagggcccccagtgtcgatgttgaagaggcctcagcagacgaagaagtacccgaatcagttgctgaaggaaatatgtcatttgaagaagtgcaagtgcatactgaaattactaatgagcctgttcatgagaagaccacagacgttgacaccaatgatacagttgttgttaatgatgcaatcgatgtgaattcagacttggcgcctgctgaagtcaagtttggtgctacggaagcaagcaaaattgaagaacatgatttcccccctgcacctgtagatgccttaaattcagatgctgctggtcctatggatactgatgtcgtcacagctgcaacttcagacgttggttctatggatactgatgttgtcacacgtgcaccagttagcgatgatgaggagaaactggaactgaaggttgatttgggtaacaaggtgtcaatgtatgatgaagataacaatagttctgataccatgaatgaggactgcaagcccatcgtatcaaaaccaaacaatcagaattagaggttcagccgaagatggtccaaccatcatccggcattacttcattaggtggagatttgcagccattggatgatgacaaagagctggttaagaaccagacatctttggaagacatagattccacagctaatgtggactcatacaagaaggatagtcctgaaggtgggtctccagagaaattaaatctagacaggagttcaggtgatgagtcaatggaggaggatgttgtggaaattaaacaagatgaggccaatatgaaatctgatgatctcggacaaaagaatgagcttaactcagaagatgtgaaagaggtgatcctccctgattctgttgttgaggcttccaaggaggttacggctgaagaaaagtcagcagcttcaacagaaaagagaaaacttgaagatgaagatattgcaaacactgaaccaatcaagcgacaacgtcggtggactgcagacgttgccaaagttccagagagacaagcattgagtcaaactggtcctgaaactcctaaggatatttttcagcctgctttcaaacgatcttttgggaggtctgattcaacagcaagtgtagattctcctaaggaacggattgtaccacctgcagagaaacctgccacaacttctttgagaattgaccgatttgtacgcccatttaccctgaaagctgtgcaggagcttcttggtaaaactggatctgtacaagacttctggatggaccatatcaagactcattgctatgtgacattttcttcggtggatgaagcaatggctactagggatgctgtttacaacctacagtggcccccaaataacggcaataagttggtcgccgaatttgttgatcctcaggaagtgaagctcaaggttgacccccctcccccgccagctgctcctgttagcccagctgctatcacaagggcacctcctcttcaacagactcaaagtgtgccacgccaggctgctacaccaaaagagcaactgccacctccaccaccgcctccccttgctaagccacctatggctgacccggcggctatagcgagagagaggcttccacccactccgaagaagccagagcctcctgttgtgacacttgatgatctcttcaggaagacacagtcctctccaaggatctactatctgcctttatcagaagaggaggtggcagccaagctcgccgcacagggcaaaggaaaaaaggagtaggaggtgttggcttccattttcggctatctcggagtttgttgtggaacatggcgtgcggtggtcacagcatcagacaggtgctactgctgcagaccatttgaaataaccggcggccgtgactgccgcggcggaagagtagtcgtagggctagtgtaggagcagcagcagcggcttgtatttcttaaagagattattagttttggttgggtctccgactgcagtgtgtgctaaagttatttgagctgcatgaggttttgtttgggtactctagtattgatcccaatctatatgtgttgaggtgtaaattagtttaagttacatcctaatccaccttaatagatgtgggttgagttaaatattagagtacccaaactaggcctgaagcgtctgaagaacttggtttaatctatgctgtcaggtactgttaaaaggcaccagttttagtgttgagtctatgaagaatattgttgggattccttgtcttagggggtgtttgtttgggattataatccacctagattatataatccagcaatttttgaactaactattagttcaaaagttgttagattatataatccagatagattataatctcaaacaaacacccccttattctagtctttgccttgctcaccgtgagtctcggcaagagcaggttggt

SEQ ID NO: 83714 - DNA, 2748 bp, Zea Mays
gtatgccctccctttgttcttcccttcctgcggcgcgaagccgtgcgcccaaaccctaacttctattcgtagtcaccatgtcatcttatcctgtgctaaacaaccgaccaattgatcagtggagggttactgatttgaaggatgagctccgtaaaaggaagcttcctgttaaaggtttgaaggaggaactcgtaaggcgactctttgactccattcagagtgaaatagaagctgatgaagctgacgaagctgatgaggatgtgggagtgaatgtggatgatcagttgcctgatgccaatgctagcgaggaaaatacagttaccgttacggaagttcatcaggaaactgtggttcatgtcactcagcaagttgaagttcctaccaccaaagctggtcaggaatccacaatttctcccactagaagggcccccagtgtcgatgttgaagaggcctcagcagacgaagaagtacccgaatcagttgctgaaggaaatatgtcatttgaagaagtgcaagtgcatactgaaattactaatgagcctgttcatgagaagaccacagacgttgacaccaatgatacagttgttgttaatgatgcaatcgatgtgaattcagacttggcgcctgctgaagtcaagtttggtgctacggaagcaagcaaaattgaagaacatgatttcccccctgcacctgtagatgccttaaattcagatgctgctggtcctatggatactgatgtcgtcacagctgcaacttcagacgttggttctatggatactgatgttgtcacacgtgcaccagttagcgatgatgaggagaaactggaactgaaggttgatttgggtaacaaggtgtcaatgtatgatgaagataacaatagttctgataccatgaatgaggactgcaagcccatcgtatcaaaaccaaacaatcagccattggatgatgacaaagagctggttaagaaccagacatctttggaagacatagattccacagctaatgtggactcatacaagaaggatagtcctgaaggtgggtctccagagaaattaaatctagacaggagttcaggtgatgagtcaatggaggaggatgttgtggaaattaaacaagatgaggccaatatgaaatctgatgatctcggacaaaagaatgagcttaactcagaagatgtgaaagaggtgatcctccctgattctgttgttgaggcttccaaggaggttacggctgaagaaaagtcagcagcttcaacagaaaagagaaaacttgaagatgaagatattgcaaacactgaaccaatcaagcgacaacgtcggtggactgcagacgttgccaaagttccagagagacaagcattgagtcaaactggtcctgaaactcctaaggatatttttcagcctgctttcaaacgatcttttgggaggtctgattcaacagcaagtgtagattctcctaaggaacggattgtaccacctgcagagaaacctgccacaacttctttgagaattgaccgatttgtacgcccatttaccctgaaagctgtgcaggagcttcttggtaaaactggatctgtacaagacttctggatggaccatatcaagactcattgctatgtgacattttcttcggtggatgaagcaatggctactagggatgctgtttacaacctacagtggcccccaaataacggcaataagttggtcgccgaatttgttgatcctcaggaagtgaagctcaaggttgacccccctcccccgccagctgctcctgttagcccagctgctatcacaagggcacctcctcttcaacagactcaaagtgtgccacgccaggctgctacaccaaaagagcaactgccacctccaccaccgcctccccttgctaagccacctatggctgacccggcggctatagcgagagagaggcttccacccactccgaagaagccagagcctcctgttgtgacacttgatgatctcttcaggaagacacagtcctctccaaggatctactatctgcctttatcagaagaggaggtggcagccaagctcgccgcacagggcaaaggaaaaaaggagtaggaggtgttggcttccattttcggctatctcggagtttgttgtggaacatggcgtgcggtggtcacagcatcagacaggtgctactgctgcagaccatttgaaataaccggcggccgtgactgccgcggcggaagagtagtcgtagggctagtgtaggagcagcagcagcggcttgtatttcttaaagagattattagttttggttgggtctccgactgcagtgtgtgctaaagttatttgagctgcatgaggttttgtttgggtactctagtattgatcccaatctatatgtgttgaggtgtaaattagtttaagttacatcctaatccaccttaatagatgtgggttgagttaaatattagagtacccaaactaggcctgaagcgtctgaagaacttggtttaatctatgctgtcaggtactgttaaaaggcaccagttttagtgttgagtctatgaagaatattgttgggattccttgtcttagggggtgtttgtttgggattataatccacctagattatataatccagcaatttttgaactaactattagttcaaaagttgttagattatataatccagatagattataatctcaaacaaacacccccttattctagtctttgccttgctcaccgtgagtctcggcaagagcaggttggt

SEQ ID NO: 83715 - DNA, 2802 bp, Zea Mays
gtatgccctccctttgttcttcccttcctgcggcgcgaagccgtgcgcccaaaccctaacttctattcgtagtcaccatgtcatcttatcctgtgctaaacaaccgaccaattgatcagtggagggttactgatttgaaggatgagctccgtaaaaggaagcttcctgttaaaggtttgaaggaggaactcgtaaggcgactctttgactccattcagagtgaaatagaagctgatgaagctgacgaagctgatgaggatgtgggagtgaatgtggatgatcagttgcctgatgccaatgctagcgaggaaaatacagttaccgttacggaagttcatcaggaaactgtggttcatgtcactcagcaagttgaagttcctaccaccaaagctggtcaggaatccacaatttctcccactagaagggcccccagtgtcgatgttgaagaggcctcagcagacgaagaagtacccgaatcagttgctgaaggaaatatgtcatttgaagaagtgcaagtgcatactgaaattactaatgagcctgttcatgagaagaccacagacgttgacaccaatgatacagttgttgttaatgatgcaatcgatgtgaattcagacttggcgcctgctgaagtcaagtttggtgctacggaagcaagcaaaattgaagaacatgatttcccccctgcacctgtagatgccttaaattcagatgctgctggtcctatggatactgatgtcgtcacagctgcaacttcagacgttggttctatggatactgatgttgtcacacgtgcaccagttagcgatgatgaggagaaactggaactgaaggttgatttgggtaacaaggtgtcaatgtatgatgaagataacaatagttctgataccatgaatgaggactgcaagcccatcgtatcaaaaccaaacaatcagccgaagatggtccaaccatcatccggcattacttcattaggtggagatttgcagccattggatgatgacaaagagctggttaagaaccagacatctttggaagacatagattccacagctaatgtggactcatacaagaaggatagtcctgaaggtgggtctccagagaaattaaatctagacaggagttcaggtgatgagtcaatggaggaggatgttgtggaaattaaacaagatgaggccaatatgaaatctgatgatctcggacaaaagaatgagcttaactcagaagatgtgaaagaggtgatcctccctgattctgttgttgaggcttccaaggaggttacggctgaagaaaagtcagcagcttcaacagaaaagagaaaacttgaagatgaagatattgcaaacactgaaccaatcaagcgacaacgtcggtggactgcagacgttgccaaagttccagagagacaagcattgagtcaaactggtcctgaaactcctaaggatatttttcagcctgctttcaaacgatcttttgggaggtctgattcaacagcaagtgtagattctcctaaggaacggattgtaccacctgcagagaaacctgccacaacttctttgagaattgaccgatttgtacgcccatttaccctgaaagctgtgcaggagcttcttggtaaaactggatctgtacaagacttctggatggaccatatcaagactcattgctatgtgacattttcttcggtggatgaagcaatggctactagggatgctgtttacaacctacagtggcccccaaataacggcaataagttggtcgccgaatttgttgatcctcaggaagtgaagctcaaggttgacccccctcccccgccagctgctcctgttagcccagctgctatcacaagggcacctcctcttcaacagactcaaagtgtgccacgccaggctgctacaccaaaagagcaactgccacctccaccaccgcctccccttgctaagccacctatggctgacccggcggctatagcgagagagaggcttccacccactccgaagaagccagagcctcctgttgtgacacttgatgatctcttcaggaagacacagtcctctccaaggatctactatctgcctttatcagaagaggaggtggcagccaagctcgccgcacagggcaaaggaaaaaaggagtaggaggtgttggcttccattttcggctatctcggagtttgttgtggaacatggcgtgcggtggtcacagcatcagacaggtgctactgctgcagaccatttgaaataaccggcggccgtgactgccgcggcggaagagtagtcgtagggctagtgtaggagcagcagcagcggcttgtatttcttaaagagattattagttttggttgggtctccgactgcagtgtgtgctaaagttatttgagctgcatgaggttttgtttgggtactctagtattgatcccaatctatatgtgttgaggtgtaaattagtttaagttacatcctaatccaccttaatagatgtgggttgagttaaatattagagtacccaaactaggcctgaagcgtctgaagaacttggtttaatctatgctgtcaggtactgttaaaaggcaccagttttagtgttgagtctatgaagaatattgttgggattccttgtcttagggggtgtttgtttgggattataatccacctagattatataatccagcaatttttgaactaactattagttcaaaagttgttagattatataatccagatagattataatctcaaacaaacacccccttattctagtctttgccttgctcaccgtgagtctcggcaagagcaggttggt

SEQ ID NO: 83716 - DNA, 2811 bp, Zea Mays
gtatgccctccctttgttcttcccttcctgcggcgcgaagccgtgcgcccaaaccctaacttctattcgtagtcaccatgtcatcttatcctgtgctaaacaaccgaccaattgatcagtggagggttactgatttgaaggatgagctccgtaaaaggaagcttcctgttaaaggtttgaaggaggaactcgtaaggcgactctttgactccattcagagtgaaatagaagctgatgaagctgacgaagctgatgaggatgtgggagtgaatgtggatgatcagttgcctgatgccaatgctagcgaggaaaatacagttaccgttacggaagttcatcaggaaactgtggttcatgtcactcagcaagttgaagttcctaccaccaaagctggtcaggaatccacaatttctcccactagaagggcccccagtgtcgatgttgaagaggcctcagcagacgaagaagtacccgaatcagttgctgaaggaaatatgtcatttgaagaagtgcaagtgcatactgaaattactaatgagcctgttcatgagaagaccacagacgttgacaccaatgatacagttgttgttaatgatgcaatcgatgtgaattcagacttggcgcctgctgaagtcaagtttggtgctacggaagcaagcaaaattgaagaacatgatttcccccctgcacctgtagatgccttaaattcagatgctgctggtcctatggatactgatgtcgtcacagctgcaacttcagacgttggttctatggatactgatgttgtcacacgtgcaccagttagcgatgatgaggagaaactggaactgaaggttgatttgggtaacaaggtgtcaatgtatgatgaagataacaatagttctgataccatgaatgaggactgcaagcccatcgtatcaaaaccaaacaatcaggtacctgagccgaagatggtccaaccatcatccggcattacttcattaggtggagatttgcagccattggatgatgacaaagagctggttaagaaccagacatctttggaagacatagattccacagctaatgtggactcatacaagaaggatagtcctgaaggtgggtctccagagaaattaaatctagacaggagttcaggtgatgagtcaatggaggaggatgttgtggaaattaaacaagatgaggccaatatgaaatctgatgatctcggacaaaagaatgagcttaactcagaagatgtgaaagaggtgatcctccctgattctgttgttgaggcttccaaggaggttacggctgaagaaaagtcagcagcttcaacagaaaagagaaaacttgaagatgaagatattgcaaacactgaaccaatcaagcgacaacgtcggtggactgcagacgttgccaaagttccagagagacaagcattgagtcaaactggtcctgaaactcctaaggatatttttcagcctgctttcaaacgatcttttgggaggtctgattcaacagcaagtgtagattctcctaaggaacggattgtaccacctgcagagaaacctgccacaacttctttgagaattgaccgatttgtacgcccatttaccctgaaagctgtgcaggagcttcttggtaaaactggatctgtacaagacttctggatggaccatatcaagactcattgctatgtgacattttcttcggtggatgaagcaatggctactagggatgctgtttacaacctacagtggcccccaaataacggcaataagttggtcgccgaatttgttgatcctcaggaagtgaagctcaaggttgacccccctcccccgccagctgctcctgttagcccagctgctatcacaagggcacctcctcttcaacagactcaaagtgtgccacgccaggctgctacaccaaaagagcaactgccacctccaccaccgcctccccttgctaagccacctatggctgacccggcggctatagcgagagagaggcttccacccactccgaagaagccagagcctcctgttgtgacacttgatgatctcttcaggaagacacagtcctctccaaggatctactatctgcctttatcagaagaggaggtggcagccaagctcgccgcacagggcaaaggaaaaaaggagtaggaggtgttggcttccattttcggctatctcggagtttgttgtggaacatggcgtgcggtggtcacagcatcagacaggtgctactgctgcagaccatttgaaataaccggcggccgtgactgccgcggcggaagagtagtcgtagggctagtgtaggagcagcagcagcggcttgtatttcttaaagagattattagttttggttgggtctccgactgcagtgtgtgctaaagttatttgagctgcatgaggttttgtttgggtactctagtattgatcccaatctatatgtgttgaggtgtaaattagtttaagttacatcctaatccaccttaatagatgtgggttgagttaaatattagagtacccaaactaggcctgaagcgtctgaagaacttggtttaatctatgctgtcaggtactgttaaaaggcaccagttttagtgttgagtctatgaagaatattgttgggattccttgtcttagggggtgtttgtttgggattataatccacctagattatataatccagcaatttttgaactaactattagttcaaaagttgttagattatataatccagatagattataatctcaaacaaacacccccttattctagtctttgccttgctcaccgtgagtctcggcaagagcaggttggt

SEQ ID NO: 83717 - DNA, 2812 bp, Zea Mays
gctgcaaccctaccctgctgtcttgttctatcgcccccagcctgcgcgcaatccgacccacccacacgactgggccggccgtcgctaacgccctacttcggccccctttaccggcgacgagcaccaccaccaccagtcaccatgtcatcttatcctgtgctaaacaaccgaccaattgatcagtggagggttactgatttgaaggatgagctccgtaaaaggaagcttcctgttaaaggtttgaaggaggaactcgtaaggcgactctttgactccattcagagtgaaatagaagctgatgaagctgacgaagctgatgaggatgtgggagtgaatgtggatgatcagttgcctgatgccaatgctagcgaggaaaatacagttaccgttacggaagttcatcaggaaactgtggttcatgtcactcagcaagttgaagttcctaccaccaaagctggtcaggaatccacaatttctcccactagaagggcccccagtgtcgatgttgaagaggcctcagcagacgaagaagtacccgaatcagttgctgaaggaaatatgtcatttgaagaagtgcaagtgcatactgaaattactaatgagcctgttcatgagaagaccacagacgttgacaccaatgatacagttgttgttaatgatgcaatcgatgtgaattcagacttggcgcctgctgaagtcaagtttggtgctacggaagcaagcaaaattgaagaacatgatttcccccctgcacctgtagatgccttaaattcagatgctgctggtcctatggatactgatgtcgtcacagctgcaacttcagacgttggttctatggatactgatgttgtcacacgtgcaccagttagcgatgatgaggagaaactggaactgaaggttgatttgggtaacaaggtgtcaatgtatgatgaagataacaatagttctgataccatgaatgaggactgcaagcccatcgtatcaaaaccaaacaatcagccattggatgatgacaaagagctggttaagaaccagacatctttggaagacatagattccacagctaatgtggactcatacaagaaggatagtcctgaaggtgggtctccagagaaattaaatctagacaggagttcaggtgatgagtcaatggaggaggatgttgtggaaattaaacaagatgaggccaatatgaaatctgatgatctcggacaaaagaatgagcttaactcagaagatgtgaaagaggtgatcctccctgattctgttgttgaggcttccaaggaggttacggctgaagaaaagtcagcagcttcaacagaaaagagaaaacttgaagatgaagatattgcaaacactgaaccaatcaagcgacaacgtcggtggactgcagacgttgccaaagttccagagagacaagcattgagtcaaactggtcctgaaactcctaaggatatttttcagcctgctttcaaacgatcttttgggaggtctgattcaacagcaagtgtagattctcctaaggaacggattgtaccacctgcagagaaacctgccacaacttctttgagaattgaccgatttgtacgcccatttaccctgaaagctgtgcaggagcttcttggtaaaactggatctgtacaagacttctggatggaccatatcaagactcattgctatgtgacattttcttcggtggatgaagcaatggctactagggatgctgtttacaacctacagtggcccccaaataacggcaataagttggtcgccgaatttgttgatcctcaggaagtgaagctcaaggttgacccccctcccccgccagctgctcctgttagcccagctgctatcacaagggcacctcctcttcaacagactcaaagtgtgccacgccaggctgctacaccaaaagagcaactgccacctccaccaccgcctccccttgctaagccacctatggctgacccggcggctatagcgagagagaggcttccacccactccgaagaagccagagcctcctgttgtgacacttgatgatctcttcaggaagacacagtcctctccaaggatctactatctgcctttatcagaagaggaggtggcagccaagctcgccgcacagggcaaaggaaaaaaggagtaggaggtgttggcttccattttcggctatctcggagtttgttgtggaacatggcgtgcggtggtcacagcatcagacaggtgctactgctgcagaccatttgaaataaccggcggccgtgactgccgcggcggaagagtagtcgtagggctagtgtaggagcagcagcagcggcttgtatttcttaaagagattattagttttggttgggtctccgactgcagtgtgtgctaaagttatttgagctgcatgaggttttgtttgggtactctagtattgatcccaatctatatgtgttgaggtgtaaattagtttaagttacatcctaatccaccttaatagatgtgggttgagttaaatattagagtacccaaactaggcctgaagcgtctgaagaacttggtttaatctatgctgtcaggtactgttaaaaggcaccagttttagtgttgagtctatgaagaatattgttgggattccttgtcttagggggtgtttgtttgggattataatccacctagattatataatccagcaatttttgaactaactattagttcaaaagttgttagattatataatccagatagattataatctcaaacaaacacccccttattctagtctttgccttgctcaccgtgagtctcggcaagagcaggttggt

SEQ ID NO: 83718 - DNA, 314 bp, Zea Mays
agcagatcttggaagccatggaaggagaggccgtcggccatggggagggatgagggagggacgaccatgggggaggagcagaagatgaccggcaagctagagcacctcgtgcgcagaaacagggaaaaggggcagcgcgccaggctgaggaatcgagggcgccgacatgccgcagtagggggagggcgcgacgtgaggagctcgccatgggtcggcagtggctgaagaggaggttgaggaaggagtgaggatgtgcgtggagaagaatgaggagccagggagcgcgcggcggctgggagagaagccaggagtgc

SEQ ID NO: 83719 - DNA, 1784 bp, Zea Mays
cttttcccgaaatcatagcatgcatccaatagtagtcatatgatgctcttagagtcaaattatcatccaagtctgcatttccaatctgatgaagtttacagtgttaccattgatgagaaatttaccaaattacaagtttcaatttagttgactgaaaactcaccgcaacacctttaagcttgatactagttacattggtggctctattcttagagagaatcagatttgcaagttctggtatatagtgacctgcatagctctcaccagttatgaagaaatcacggtcctgatattcaggaaatttctctagccaagtaataagaaaggtatatgcatcatctgttgttctttggtcaccagtgttatagtaatctgatgtagtgtttgaatatgagtatccaacaccagctgggatctcaatgaacaacatgttggccactgcattcatgaatggaaaatggaatatcagttgactccattctttgaaaatatagtttactttagttgtcctaagctttatttttttaccaaatttatagaaaaaatgtattgacatttatagtattaaattagttccattaaattctctatgaaaatgttttggtagtgcatttatttgaacttgtagatgttattatattttttctaaaaacatgatcaaagttcgaacaaactattatttgcagcggaggaagtaactattaatccagtaaagattaaagcggattttacttctgttccatgcatgccttttcttgtacagtgtcttgttgtcactatgaacagagaaaggtccaagttcaaccatggccccagatccaaaggatgaacagccaggccctgcagatacagacatacaaaacaacaaaagagtagaggcttgtgaagtttcaatcactcaggtggcaactttataccgaggcatgctgcttttgggttcagaagcatcccagcagaacgacacatagatattggattcatcgatgaggcccttctcactgatagctgcttctactgcagttctaccgaatcttgtgtatgttccattaaagccttaattttcatggactgtatgagtttctttggagatcatagcatgtgtccagtagtaatcgatgattgctcttgtgtttgtgtctcatccacgttaaggttttacatactaaaccaattaaggttttactggttaggagtgggagtcttaaaattaaagcctgttgtgctcaacaaagtatctactttgggcattgtacttaggtcagttggcctaacaatctgtagaattgtgccctgtttatataagaaaataatagccagcttcttttccatttcaacatgctaaggttgatactaggtatgatagaccgtcagtttccgttgtcctttctgtccccctttgggcaagcaactacaatcaacaatggattcttccaataaatggctgtggatgttttgtagtatttgctaggccactagcaggaaagaaaaaaactgctgtatggcgctgatctgtagtaagttccaactgtttttcaattttgaaccttgaaaccatgcttgtatcaaatggatggtcagggaaactacttttttgtggattaaacaagatcaaataaaacggcaggcaagcagagtataaaagcacatattaaagtgtataagtggatcggctaccttctcccatcagtttaagcttttgagttgaactgattagtacattccctctaacatggtatcaaggctggacgtctcgagtttgaattctgacaaaggttttatttgtg

SEQ ID NO: 83720 - DNA, 1996 bp, Zea Mays
gctttataagcttttcccgaaatcatagcatgcatccaatagtagtcatatgatgctcttagagtcaaattatcatccaagtctgcatttccaatctgatgaagtttacagtgttaccattgatgagaaatttaccaaattacaagtttcaatttagttgactgaaaactcaccgcaacacctttaagcttgatactagttacattggtggctctattcttagagagaatcagatttgcaagttctggtatatagtgacctgcatagctctcaccagttatgaagaaatcacggtcctgatattcaggaaatttctctagccaagtaataagaaaggtatatgcatcatctgttgttctttggtcaccagtgttatagtaatctgatgtagtgtttgaatatgagtatccaacaccagctgggatctcaatgaacaacatgttggccactgcattcatgaatggaaaatggaatatcagttgactccattctttgaaaatatagtttactttagttgtcctaagctttatttttttaccaaatttatagaaaaaatgtattgacatttatagtattaaattagttccattaaattctctatgaaaatgttttggtagtgcatttatttgaacttgtagatgttattatattttttctaaaaacatgatcaaagttcgaacaaactattatttgcagcggaggaagtaactattaatccagtaaagattaaagcggattttacttctgttccatgcatgccttttcttgtacagtgtcttgttgtcactatgaacagagaaaggtccaagttcaaccatggccccagatccaaaggatgaacagccaggccctgcagatacagacatacagagtggactcactcttttggacttagagttgaaaaacgaagtgatgggacaggaagaatcaactttagaagggaatcccactttctagcagcgcacatatgcaaaataccttctcagaccacatattgtcaaagagaagtgaacgaggaaaaaagatgtaaatagagcaaggctacaaaggcagcaaggaatatttccccctaaacaacaaaagagtagaggcttgtgaagtttcaatcactcaggtggcaactttataccgaggcatgctgcttttgggttcagaagcatcccagcagaacgacacatagatattggattcatcgatgaggcccttctcactgatagctgcttctactgcagttctaccgaatcttgtgtatgttccattaaagccttaattttcatggactgtatgagtttctttggagatcatagcatgtgtccagtagtaatcgatgattgctcttgtgtttgtgtctcatccacgttaaggttttacatactaaaccaattaaggttttactggttaggagtgggagtcttaaaattaaagcctgttgtgctcaacaaagtatctactttgggcattgtacttaggtcagttggcctaacaatctgtagaattgtgccctgtttatataagaaaataatagccagcttcttttccatttcaacatgctaaggttgatactaggtatgatagaccgtcagtttccgttgtcctttctgtccccctttgggcaagcaactacaatcaacaatggattcttccaataaatggctgtggatgttttgtagtatttgctaggccactagcaggaaagaaaaaaactgctgtatggcgctgatctgtagtaagttccaactgtttttcaattttgaaccttgaaaccatgcttgtatcaaatggatggtcagggaaactacttttttgtggattaaacaagatcaaataaaacggcaggcaagcagagtataaaagcacatattaaagtgtataagtggatcggctaccttctcccatcagtttaagcttttgagttgaactgattagtacattccctctaacatggtatcaaggctggacgtctcgagtttgaattctgacaaaggttttatttgtg

SEQ ID NO: 83721 - DNA, 1979 bp, Zea Mays
ctttgttttccagcatctattcagattgaagggactagtcacaagcatatagaggatcgacgaagttcaggcacaactttttttcgaccaaattgaagaagaaaaaaaaacgtagaactaacaacagtgtctgctaaagtatcatttctaagttaaatgtgaatggaatggaagcagacaaccgacttgcatgccatgtttttgaagttcccaaaagggaggttcacttttgtgcaacagcatttggctaccaagtgtggatgtggtcgatcttctgcatacatgcctcctcctctcaagaactgtcttcgcattgactctaccaaaactccagcctacaagaatatattaacaagcagcggatgaaaaattcagtaaatggtcggtgcagatagttcaggttagaataatgagacgatatcgctttgtcgagcaatgtaaaaatgagacaacgtgctctttagtttaggcagtaccgggcagttctccacattttactcagcagagccccagacaccgatcaacagtcgagacggggtcggcgtcggcgacgcgccgttccacggtcgccatccctcgtcgtccgtcgcgggctcgtgccgtgccgctatccattctccgagtgggctatgtacctcattgtcgacgcgccatggacgccaagctgcttctataggaagcccaagattgtccagcacatattgtgttgaaatgaatgagcacactgcatccatatcaccactggtacacaaaggcatagtttaagtcatgttatgatgtagcgcaccgagcaaggtattttgacacacataaatctgaacatatgtacctgtacagccatattctcgtgccacttgaaatgagtttcttgattgatggcagcattgtctctggtgaatctttccaattatcaaatatctgctgactgcttgaaggaaacatataaattaatcatatacatgttgtactgttgacttccccctagtgccaattgctaatctagtaagagatttacttgaggctgaacgaattctcaacagttaaacttgtttatacatgactgagtatgcagcatgtgatagccatattgacactctatagaaacaatcaaggatgagtcgggatacatgcatcttggtgcatactcaatcttatagatatgcagcatgtgacctaagcccctaggggcacctttggttaaatatcttatggtttcaaatagttgactgctggacaggcagaatataggtttgagaatacaggatttgtggctttgtgttgtaagggttattggcctcttttctttttaatacaaactacaaagatacacagccgtctaccctccagtgtgtttgagaaaacaaaagaatattagcttgagtggcattgcgccttttttagtgttgacttaaatatacctttttgcatacagcatgttgtgctaatggaataattcttggcaatcgtggttcacatactctttgatggttaactggaagaggttgttgctacctttttagaattaatgttattgagaagtgagtgatgaaaagatatataagtattctgttccttcagattatataagtaattgtttgtacataaagcacctaccttttcatatggctttaggaaaccaacagattgctaatagggtcacacaagagatatggtctgacgttgcacataaatttgagggaaatatgatattcagatattcaatatacatacctacagtccatccatgggtagcctaaccctgttgtgtttgcatggagtgccctttggacctcaggacgatttaggtaagaggagacgtagtggtttgtgcatggatcaccaaacactaactgaaatagtaaacaaaaagttccagtataccaaaatttcatatagaaatggaagttaaaacatctgtcaatctgtgaaatttatgtacgatgttgtataccgagtcacttgatttagaagggtttgag

SEQ ID NO: 83722 - DNA, 2055 bp, Zea Mays
ctttgttttccagcatctattcagattgaagggactagtcacaagcatatagaggatcgacgaagttcaggcacaactttttttcgaccaaattgaagaagaaaaaaaaacgtagaactaacaacagtgtctgctaaagtatcatttctaagttaaatgtgaatggaatggaagcagacaaccgacttgcatgccatgtttttgaagttcccaaaagggaggttcacttttgtgcaacagcatttggctaccaagtgtggatgtggtcgatcttctgcatacatgcctcctcctctcaagaactgtcttcgcattgactctaccaaaactccagcctacaagaatatattaacaagcagcggatgaaaaattcagtaaatggtcggtgcagatagttcaggttagaataatgagacgatatcgctttgtcgagcaatgtaaaaatgagacaacgtgctctttagtttaggcagtaccgggcagttctccacattttactcagcagagccccagacaccgatcaacagtcgagacggggtcggcgtcggcgacgcgccgttccacggtcgccatccctcgtcgtccgtcgcgggctcgtgccgtgccgctatccattctccgagggaacacatatacaacttgatccaaaggattctggtggcatgaatgctgatattccatctttcatctgatgaacagtgggctatgtacctcattgtcgacgcgccatggacgccaagctgcttctataggaagcccaagattgtccagcacatattgtgttgaaatgaatgagcacactgcatccatatcaccactggtacacaaaggcatagtttaagtcatgttatgatgtagcgcaccgagcaaggtattttgacacacataaatctgaacatatgtacctgtacagccatattctcgtgccacttgaaatgagtttcttgattgatggcagcattgtctctggtgaatctttccaattatcaaatatctgctgactgcttgaaggaaacatataaattaatcatatacatgttgtactgttgacttccccctagtgccaattgctaatctagtaagagatttacttgaggctgaacgaattctcaacagttaaacttgtttatacatgactgagtatgcagcatgtgatagccatattgacactctatagaaacaatcaaggatgagtcgggatacatgcatcttggtgcatactcaatcttatagatatgcagcatgtgacctaagcccctaggggcacctttggttaaatatcttatggtttcaaatagttgactgctggacaggcagaatataggtttgagaatacaggatttgtggctttgtgttgtaagggttattggcctcttttctttttaatacaaactacaaagatacacagccgtctaccctccagtgtgtttgagaaaacaaaagaatattagcttgagtggcattgcgccttttttagtgttgacttaaatatacctttttgcatacagcatgttgtgctaatggaataattcttggcaatcgtggttcacatactctttgatggttaactggaagaggttgttgctacctttttagaattaatgttattgagaagtgagtgatgaaaagatatataagtattctgttccttcagattatataagtaattgtttgtacataaagcacctaccttttcatatggctttaggaaaccaacagattgctaatagggtcacacaagagatatggtctgacgttgcacataaatttgagggaaatatgatattcagatattcaatatacatacctacagtccatccatgggtagcctaaccctgttgtgtttgcatggagtgccctttggacctcaggacgatttaggtaagaggagacgtagtggtttgtgcatggatcaccaaacactaactgaaatagtaaacaaaaagttccagtataccaaaatttcatatagaaatggaagttaaaacatctgtcaatctgtgaaatttatgtacgatgttgtataccgagtcacttgatttagaagggtttgag

SEQ ID NO: 83723 - DNA, 759 bp, Zea Mays
gaaaagtcagcaaaacgccagagagagactagccccagtcgctttctttcgaaaaacaaaatacgtggccgatgaaagagaaactcatcccgtcatccagctcgaaattccgcggggcgatagagcgaatttgcaaaggccgggaatggaccggggtttttttttttgtagatataaaaaaaagagggtgaaatttcgcggggactgcaagtgcaactgcaagaacatgggacgcacggccctttttccagatgtacttaataaagcatttaagatgactcgtcctcgatcgacacggcacgtgcagttgcttttctctccgtcttgaaacgaaaacgcatctgtggccgtaaaaccatcgaattctccgtgctctcccgtggggagcgcgcaaaaccccaaccccggaggagaagcagacaggaggagcgagccgtacctgggggttggccgggcagcacgaatttgcgggtgtccgccatggcgcctccccgatcaagacagagaagcaaacactcctcctcctccccgtttgccgaagcggtcgctcgcgtggcggccggtcggtcggaggcgggcgcgcttaaaacggggcggagggagcgagggggcgccgaagcttcggggaagggaggaggaacggagcgggagagcggggcgccgtcgcgctgggaaaatttattggcgggacggagggagagagagggtgggggtgggggtgatgtctgagtctgacgtgacgacgaggcgagagggcgg

SEQ ID NO: 83724 - DNA, 696 bp, Zea Mays
ctatatatcaaataagaggcgattattctaccgataatcagtgcattgaaactatgttatagttgtacactagcagaaagcgagtaaacagtcggggtgaacaactagctgaagaatatttacagggctagtctgacaaaaggggagcaaggaaaccgcctccctgcctatctgatgtaaaaaggctcagcttcaccgaatggcagacatcggggcggggcatcatctatgcagatcaagtcctccagtccagccatgaaatcgtccgcaccaccagccgcctggcttagcatctcatcctgcatcatctgttccaaagcagccagcatcaaatcatgatcaaaccccgagggaaaataaaacacgtcctgcagcaagcttcgaaagcataggagcgagcgatcaaaccataccctggactgtttcatttcagcaacgcaggttgtaagcctgtggtactgctctctcgcttctgggtactgtgacatagagtgcacccgggcaagtgctctctgtagcctggcttcggcctgccttctgccgtcgtgcaagaaatcgtattcatcttcagcctttgcaggttggatttgcgatggaccttctagttgtttctcgggccgaaacccgcgtaacccaggcctctttctcctccatctcagtatgaccttctcgacgataccgactgaccagactacc

SEQ ID NO: 83725 - DNA, 1905 bp, Zea Mays
gtttcggtttctatataaagcagaggaaggtaggagcacgaggacaagctaaccaaggagctacctagcaacgcgcagtaagcagcgtgggcaaagctacgagcgcccggctagcttcgccatgaacatgggtggggtgtccccgtcgacagtccggtgcaagcactgcagcacgcagctcaccgtgtgccccggcgagcgcgccatccagtgcacgcaatgctgcggcgtgacgcgtatccggcggcggcgggtccagcggccggcggcggcgccgcccaccacgggcttcccgcgcgcccgcggcaagaagcgggccctcctgatcggcatcacgtacgcggcggggctgcggccagctgaggggggccctcaacgacgtcaagtgcatgaggcaactcctctgccagcgcttcgccttccccagcgactgcatcatcatgctcactgatgaccagaaggacccgttcaggctgcccaccaaggacaacatccggttggggatgcagtggctggtggaggggagcagcgagggcgactccctcgtgttccacttctccggcctgggcgcgcaggtcgccgacgacgacggcgacgagctggacgggtacgacgaggccatctgcccgatggactcgttccagaagggacccatcctggacgacgagatcaacgagactatggtccgcccgctggtccacggcgtcaagctgcacgccgtcgtcgacgcctgccacagcgccaccgtcctcgacctcccgttctgctgcaacatgtccagaagcgggagctggcagtggaaggacgagagccccccgtccggcgcctacaggggcacgagcggcggcaaggcgatgctcatcagcggctacagtgacggcaaagccaagtccagcgtggccagtgcgcagaaaccggaggcctgcgcgaccatgggggccatgacgcacagcttcatcacggcggtggaacgcgagccgcagggtgtcacctacggccgcctgctcacctccatgaaggccatcatgaccaactccggcggctgcgccgtgcagggtcctattggcgccggcgcggccgcccgcaaggtcgccaacttcagcggcgtggaggaacccaacctgtcctcctcggagaagttcgacatctaccgcaaggcctttgtgctgtaaacctcctctgcatcggccattgcaaactaccgtctggactctttaaattgccgtgtcgggataataaaccagacgggcctatgtgtcaacaatgtgtcgtctttgtgtcatcagtcaccggaggagaatatttgtgtttatgcacacgccaacaatggctccttgctactaaaccttatggcccattgtaataaggctattgtatctcttctacatgtctctaaaataaactaagtgttatggtggtaattaatatcactttcagcatacaagaatggacatagctttatacgatcagaatgatattaaaaccaataatgagatttatatgagcctactaaaccttatgtaccctagaagcttcgatcttcctagacaaaaggagttgagcacaccataggacgaaattagatttagccatttgaattatgatgacttggtgtatgggggatcaacactatggtggtagaagcagtggcatctgacatgtgaggaggaagaaggatgtgcggtgggaaattagaaaaaaaaaatcttggctttgatgccatgcaagacaatatcctcttgaggctgtactcatgtacatatagatatacgagagcattatttacatgagcactacctagattaggggatgtagccctaaacctttacatggcagataacaacactatcaagattaggcattgtcctttgctactatatataacctttgtcctttgctactata

SEQ ID NO: 83726 - DNA, 1883 bp, Zea Mays
gtttcggtttctatataaagcagaggaaggtaggagcacgaggacaagctaaccaaggagctacctagcaacgcgcagtaagcagcgtgggcaaagctacgagcgcccggctagcttcgccatgaacatgggtggggtgtccccgtcgacagtccggtgcaagcactgcagcacgcagctcaccgtgtgccccggcgagcgcgccatccagtgcacgcaatgctgcggcgtgacgcgtatccggcggcggcgggtccagcggccggcggcggcgccgcccaccacgggcttcccgcgcgcccgcggcaagaagcgggccctcctgatcggcatcacgtacgcggcggggctgcggccagctgaggggggccctcaacgacgtcaagtgcatgaggcaactcctctgccagcgcttcgccttccccagcgactgcatcatcatgctcactggctgcccaccaaggacaacatccggttggggatgcagtggctggtggaggggagcagcgagggcgactccctcgtgttccacttctccggcctgggcgcgcaggtcgccgacgacgacggcgacgagctggacgggtacgacgaggccatctgcccgatggactcgttccagaagggacccatcctggacgacgagatcaacgagactatggtccgcccgctggtccacggcgtcaagctgcacgccgtcgtcgacgcctgccacagcgccaccgtcctcgacctcccgttctgctgcaacatgtccagaagcgggagctggcagtggaaggacgagagccccccgtccggcgcctacaggggcacgagcggcggcaaggcgatgctcatcagcggctacagtgacggcaaagccaagtccagcgtggccagtgcgcagaaaccggaggcctgcgcgaccatgggggccatgacgcacagcttcatcacggcggtggaacgcgagccgcagggtgtcacctacggccgcctgctcacctccatgaaggccatcatgaccaactccggcggctgcgccgtgcagggtcctattggcgccggcgcggccgcccgcaaggtcgccaacttcagcggcgtggaggaacccaacctgtcctcctcggagaagttcgacatctaccgcaaggcctttgtgctgtaaacctcctctgcatcggccattgcaaactaccgtctggactctttaaattgccgtgtcgggataataaaccagacgggcctatgtgtcaacaatgtgtcgtctttgtgtcatcagtcaccggaggagaatatttgtgtttatgcacacgccaacaatggctccttgctactaaaccttatggcccattgtaataaggctattgtatctcttctacatgtctctaaaataaactaagtgttatggtggtaattaatatcactttcagcatacaagaatggacatagctttatacgatcagaatgatattaaaaccaataatgagatttatatgagcctactaaaccttatgtaccctagaagcttcgatcttcctagacaaaaggagttgagcacaccataggacgaaattagatttagccatttgaattatgatgacttggtgtatgggggatcaacactatggtggtagaagcagtggcatctgacatgtgaggaggaagaaggatgtgcggtgggaaattagaaaaaaaaaatcttggctttgatgccatgcaagacaatatcctcttgaggctgtactcatgtacatatagatatacgagagcattatttacatgagcactacctagattaggggatgtagccctaaacctttacatggcagataacaacactatcaagattaggcattgtcctttgctactatatataacctttgtcctttgctactata

SEQ ID NO: 83727 - DNA, 1928 bp, Zea Mays
gtttcggtttctatataaagcagaggaaggtaggagcacgaggacaagctaaccaaggagctacctagcaacgcgcagtaagcagcgtgggcaaagctacgagcgcccggctagcttcgccatgaacatgggtggggtgtccccgtcgacagtccggtgcaagcactgcagcacgcagctcaccgtgtgccccggcgagcgcgccatccagtgcacgcaatgctgcggcgtgacgcgtatccggcggcggcgggtccagcggccggcggcggcgccgcccaccacgggcttcccgcgcgcccgcggcaagaagcgggccctcctgatcggcatcacgtacgcggcggggctgcggccagctgaggggggccctcaacgacgtcaagtgcatgaggcaactcctctgccagcgcttcgccttccccagcgactgcatcatcatgctcactgctggacgagctctcgcggtgcagatgaccagaaggacccgttcaggctgcccaccaaggacaacatccggttggggatgcagtggctggtggaggggagcagcgagggcgactccctcgtgttccacttctccggcctgggcgcgcaggtcgccgacgacgacggcgacgagctggacgggtacgacgaggccatctgcccgatggactcgttccagaagggacccatcctggacgacgagatcaacgagactatggtccgcccgctggtccacggcgtcaagctgcacgccgtcgtcgacgcctgccacagcgccaccgtcctcgacctcccgttctgctgcaacatgtccagaagcgggagctggcagtggaaggacgagagccccccgtccggcgcctacaggggcacgagcggcggcaaggcgatgctcatcagcggctacagtgacggcaaagccaagtccagcgtggccagtgcgcagaaaccggaggcctgcgcgaccatgggggccatgacgcacagcttcatcacggcggtggaacgcgagccgcagggtgtcacctacggccgcctgctcacctccatgaaggccatcatgaccaactccggcggctgcgccgtgcagggtcctattggcgccggcgcggccgcccgcaaggtcgccaacttcagcggcgtggaggaacccaacctgtcctcctcggagaagttcgacatctaccgcaaggcctttgtgctgtaaacctcctctgcatcggccattgcaaactaccgtctggactctttaaattgccgtgtcgggataataaaccagacgggcctatgtgtcaacaatgtgtcgtctttgtgtcatcagtcaccggaggagaatatttgtgtttatgcacacgccaacaatggctccttgctactaaaccttatggcccattgtaataaggctattgtatctcttctacatgtctctaaaataaactaagtgttatggtggtaattaatatcactttcagcatacaagaatggacatagctttatacgatcagaatgatattaaaaccaataatgagatttatatgagcctactaaaccttatgtaccctagaagcttcgatcttcctagacaaaaggagttgagcacaccataggacgaaattagatttagccatttgaattatgatgacttggtgtatgggggatcaacactatggtggtagaagcagtggcatctgacatgtgaggaggaagaaggatgtgcggtgggaaattagaaaaaaaaaatcttggctttgatgccatgcaagacaatatcctcttgaggctgtactcatgtacatatagatatacgagagcattatttacatgagcactacctagattaggggatgtagccctaaacctttacatggcagataacaacactatcaagattaggcattgtcctttgctactatatataacctttgtcctttgctactata

SEQ ID NO: 83728 - DNA, 1824 bp, Zea Mays
aatctaatttgttcggtcctcggaataaaggaaccgttgcttcacttgcaagctagcactgctcatgggcatatgacttcggcatctagaacaacaacactttacacttcaggcatctagaacaacacagcgtgttaaagacgacgacgacgacaacgggggaagctttcatgctcatgggcaacacgtggccggtgggcatggcgggagggaacacggcggcgacgctgtggtgcagccactgcggcatgggcatcgcggcgccggcgcccgggtccggctctatcgtccggtgcgcgttctgccgcggggtgacgcgcgtcgagcaccagcgcggcggcgtgggcgagagagccatgacgacgaggacgctcgcggctgcagcctcgctgccgcggcagcttccggtctccgcggggcccgtcgagatcccggccagctaccccagggtgagcggcggcaacaagaagcgggcgctcctggtcggggtcagctacacgggcaccgcgcacgagctcaaggggacggtcaacgacgtcaaggagatgaggaggctcctctgcgacaggttcgggttcccgggcgcctgcatcctggagctcaccgagaaggagagtgaccccaccagggtgccgacgagggagaacctgctgcgggcgatgcggtggctcgtggaggggtccagcagcggcgactcgctggtgttccacttctccgggcacggcgtgcagaagctggacatgaacgacgacgaggtggacgggtacaacgaggcgctctgccccatggacttcgagcggagcggcaagatcctggacgacgagatcaacgacaccatcgtgcggccgctcggcaagggcgtgaagctgcacgccatcgtggacacctgccacagcggcaccatactggacctcccctacctctgccgcatgtccagcaaacgaattgacacgcgcgtgcacacgcgcattgctcgacctttcgtttcaagaactgggtactggcagtgggagaaccacgcccgcccttcgggcatgctgacgaagcgccccaacggaggcctggccatctccatcagcggctgcagcgacgaccagaagtccgccgacgccagcggattttccgatgagtcgtcttcgatcggcgccatgacggacagcttcatcaaggcggtggaggccgagccggggacgacgtacgggcggctgctgagcgcgatgaggacgaggatccgtgacggccaggggagccgccgcctccccggcaggcttggctccttcgtccgctggatgatcccgtccagcagcgtgcaggagcctcagctttgctcttcagagatgttcgacatctacaggaagccgttcctcctctgatttggtcgtcgtctcgtcggctgcgaattccaaacttgatctgagtgatattgttgtgctgtgtaactccatcagttcaacccttgtgcatatgtgccatgtaattatattttacgcgtgaatcaagtcatgcctctcgccaaacgcaccagcacctgccagatgcatgcactactagcagggtcagaaatttcgaactcacggcctttttgcagagctccaccgtccggctctaaattcatcatattcatctaaatccatcatgaaacagctacacgtggatctaagttttatgcaagtatttgcattggtacacctccaacttagggatgacaatgggtacggtggacgggcgggtaacgggtatctgccggatagcggatacccggtgggtacggttatgggtagagatccatactcacgaacgtttatgggcacgaatatggtttaa

SEQ ID NO: 83729 - DNA, 1518 bp, Zea Mays
cacaagacagtatgggtatggcacggatgacattctgcgttaaccacaaatcaaagaaaacagctggcagaacaggcacaatctaatttgttcggtcctcggaataaaggaaccgttgcttcacttgcaagctagcactgctcatgggcatatgacttcggcatctagaacaacaacactttacacttcaggcatctagaacaacacagcgtgttaaagacgacgacgacgacaacgggggaagctttcatgctcatgggcaacacgtggccggtgggcatggcgggagggaacacggcggcgacgctgtggtgcagccactgcggcatgggcatcgcggcgccggcgcccgggtccggctctatcgtccggtgcgcgttctgccgcggggtgacgcgcgtcgagcaccagcgcggcggcgtgggcgagagagccatgacgacgaggacgctcgcggctgcagcctcgctgccgcggcagcttccggtctccgcggggcccgtcgagatcccggccagctaccccagggtgagcggcggcaacaagaagcgggcgctcctggtcggggtcagctacacgggcaccgcgcacgagctcaaggggacggtcaacgacgtcaaggagatgaggaggctcctctgcgacaggttcgggttcccgggcgcctgcatcctggagctcaccgagaaggagagtgaccccaccagggtgccgacgagggagaacctgctgcgggcgatgcggtggctcgtggaggggtccagcagcggcgactcgctggtgttccacttctccgggcacggcgtgcagaagctggacatgaacgacgacgaggtggacgggtacaacgaggcgctctgccccatggacttcgagcggagcggcaagatcctggacgacgagatcaacgacaccatcgtgcggccgctcggcaagggcgtgaagctgcacgccatcgtggacacctgccacagcggcaccatactggacctcccctacctctgccgcatgtccagaactgggtactggcagtgggagaaccacgcccgcccttcgggcatgctgacgaagcgccccaacggaggcctggccatctccatcagcggctgcagcgacgaccagaagtccgccgacgccagcggattttccgatgagtcgtcttcgatcggcgccatgacggacagcttcatcaaggcggtggaggccgagccggggacgacgtacgggcggctgctgagcgcgatgaggacgaggatccgtgacggccaggggagccgccgcctccccggcaggcttggctccttcgtccgctggatgatcccgtccagcagcgtgcagctacacgtggatctaagttttatgcaagtatttgcattggtacacctccaacttagggatgacaatgggtacggtggacgggcgggtaacgggtatctgccggatagcggatacccggtgggtacggttatgggtagagatccatactcacgaacgtttatgggcacgaatatggtttaa

SEQ ID NO: 83730 - DNA, 1881 bp, Zea Mays
cgagctcatacagcattgatacgatttatcctcacaagacagtatgggtatggcacggatgacattctgcgttaaccacaaatcaaagaaaacagctggcagaacaggcacaatctaatttgttcggtcctcggaataaaggaaccgttgcttcacttgcaagctagcactgctcatgggcatatgacttcggcatctagaacaacaacactttacacttcaggcatctagaacaacacagcgtgttaaagacgacgacgacgacaacgggggaagctttcatgctcatgggcaacacgtggccggtgggcatggcgggagggaacacggcggcgacgctgtggtgcagccactgcggcatgggcatcgcggcgccggcgcccgggtccggctctatcgtccggtgcgcgttctgccgcggggtgacgcgcgtcgagcaccagcgcggcggcgtgggcgagagagccatgacgacgaggacgctcgcggctgcagcctcgctgccgcggcagcttccggtctccgcggggcccgtcgagatcccggccagctaccccagggtgagcggcggcaacaagaagcgggcgctcctggtcggggtcagctacacgggcaccgcgcacgagctcaaggggacggtcaacgacgtcaaggagatgaggaggctcctctgcgacaggttcgggttcccgggcgcctgcatcctggagctcaccgagaaggagagtgaccccaccagggtgccgacgagggagaacctgctgcgggcgatgcggtggctcgtggaggggtccagcagcggcgactcgctggtgttccacttctccgggcacggcgtgcagaagctggacatgaacgacgacgaggtggacgggtacaacgaggcgctctgccccatggacttcgagcggagcggcaagatcctggacgacgagatcaacgacaccatcgtgcggccgctcggcaagggcgtgaagctgcacgccatcgtggacacctgccacagcggcaccatactggacctcccctacctctgccgcatgtccagaactgggtactggcagtgggagaaccacgcccgcccttcgggcatgctgacgaagcgccccaacggaggcctggccatctccatcagcggctgcagcgacgaccagaagtccgccgacgccagcggattttccgatgagtcgtcttcgatcggcgccatgacggacagcttcatcaaggcggtggaggccgagccggggacgacgtacgggcggctgctgagcgcgatgaggacgaggatccgtgacggccaggggagccgccgcctccccggcaggcttggctccttcgtccgctggatgatcccgtccagcagcgtgcaggagcctcagctttgctcttcagagatgttcgacatctacaggaagccgttcctcctctgatttggtcgtcgtctcgtcggctgcgaattccaaacttgatctgagtgatattgttgtgctgtgtaactccatcagttcaacccttgtgcatatgtgccatgtaattatattttacgcgtgaatcaagtcatgcctctcgccaaacgcaccagcacctgccagatgcatgcactactagcagggtcagaaatttcgaactcacggcctttttgcagagctccaccgtccggctctaaattcatcatattcatctaaatccatcatgaaacagctacacgtggatctaagttttatgcaagtatttgcattggtacacctccaacttagggatgacaatgggtacggtggacgggcgggtaacgggtatctgccggatagcggatacccggtgggtacggttatgggtagagatccatactcacgaacgtttatgggcacgaatatggtttaa

SEQ ID NO: 83731 - DNA, 2036 bp, Zea Mays
aagacttcattaatcaagacaaaaactaaccaaatataggtatccttacaaaagaaactccaagttatcattttaatcattgctgatttttggacagcagaacagcagctagttgttttattcataacttacacaatatgcatccaaaaatagtaaactaagactttttggaaagcttataaagtcctctacaattttggtattatcctcacaatgagattcgacatttagaaatgtcaaacagtactaaacgtaaattctgtccagatttggacagaattggactacttacttcattaatttataactagagttttagaaatccaaatcaggtgatcctagactctttagaaagctagtagaactgtttacaatttatttataaacatatcagtgtgattcaatgtgtatcgaagtcagttaatacaaacaaacattgctgtccagatttggacagattcagactctatagttcaagcagttgtaacttggtctctagaccaccaaaaagggtgctccaaaatttgttggaaagcttaagaaaagtactacaattcttctataattactaagagctgattttcagtttagattagccaaacagtccaattttcgaaacctgtacagaatttggacagattcataaactggacttagaaaaatcgtaactcctaaactactaaacctatggtcatgaaatttttacacaaccaagataaagaagttagctacaacttatatgtatatcatctctacagaaaacatggtttgcttcattgaactagctgcataacgaaaactgtacctgcagccctaaacagcaatacattcaatttaactcctatttggcttctacacttatcatgcttttgacattcagaacactctaacaccttatgattaaatagagctaacccacctatataaccacatatattgagtagtctacgtcatactcaagtatacaattacattagtgcatgaaacaagtcatttcaacaataactagtaatctacacatacacctcgcataactagtatcatgacttacttcaccatacataagcacaagatacccactttggtcataaaatttatcacggcacaaacatcgactgcatccaattactactaaatatgcatatttaccatagtaatcaagacatttttacatgtgcctaacatattactaactccgttatgcactatccgaacatcatacaccatttcacaaacattgcacaagcgagaagaccttttgaccatgtctaatataatcaagaagttggctcaccaaaacttttattcgacccaaaacttcacagcaaccacaacaaacatcgatttgcccatttcatcaaacacctaggaagcgtcgcacaagaacctcatccgcttctccgatcacagctccaatcttacacatatatacgcatatattacacccacttatgctcgcatgcaccacgcaatcaacagcaagagataagctcacctgtaaaaaaatggggaggacgccggccaagggggatgactgaagatcagggcgccagcagagatggggcgcgcgtgtacggagctcggcgagcggagggcttcagcagagaggaggttggggacttcagcgccagactgctggacggagagggcagcgccggacctgagcaccatagcagcgcgacaggcaggcccggacggaggtcgaggctggggcaagcaccgcggcggacgacgcggacgagctgcacggctgggaggcgccgagcaggtgaagcggcgcgcggcaccggggaagagctcgcgccagagatggaggtcgagctgggacggcggggaagctccacggctctggagcgagctggagaaatcagggagcgtgccatgggcgactaggaaaaggaggcccagcgagcaccagagaagccgagcggtgagggagacgaaggctatgcagcggctgataaaaatgccagggagatgagatcgacaggcttgggcggtggccggcacggacaagagctggaggcttgtgcgag

SEQ ID NO: 83732 - DNA, 780 bp, Zea Mays
gtattggtccaaccgaggctaagcttacccatgacgaggcatgtggccagttaaagggtcctagatcagcaggccaacaatcggaacggtccttaagcgacacagacgggcgacctttcctgctcaacgtctggtctcatattaagttatttctgaaaacctggtacctgtcagaggtaccctactgaaatgatgaagtcatcaaggcctttgataccttcatcactccagcctcttttctttgtaaaaacatgattcatagatcaaaatattttgttcttagtctatgagcatactaagcacatctagctttttaaaacaggtatcaaggatggtattcaatagttcaaagaagttatgcaacaaaggtttaatcattcaactcctaccacctagtgcagcagataagtgataaaagtttaaaaacagcaaggaggtggcaaatgcaccggggcttgcctgggataaacactatgttagtgttgttaattgacgaccacttgatgaggatcttccattctggtgcttgaccagatcatccaagcttcaggttcattcatcatcttcatgttgggatcaactcaactcttgtcctctgcatcacgtgatcaattaacgaacctgaatgatatgcataatgcacatgaatgattatacagggaaataacaagactaaataatttcgcaagaaagaaaactcaatattaaaggcaagatctcaccaacatacataatcaaacatgagagaaaatctacacaatcatgatcctcgagttaatc

SEQ ID NO: 83733 - DNA, 3592 bp, Zea Mays
ctcggtcccacgtgtagatgacaatacgcggcgtgtgaatgagaagcgggcccggtcggtcagagacagcgccgcgcagggaattcgtggttgggccgcgcgtgtgaaatcagaagtgggccgaatggaggtagtggcccatgaagcttttattctttttatttttatcttttctttctattctttttattttcttcatttctaatgtttagtttgaactcgaatttaaattctaatttgtgccaaatttgttctctattatttttgtgaaattaataataccaattatatatatataattatattatttatatttttgtatcctttctcttcttcttattttcaaaaccctatttttttaactttagggtttcattccacttctagtatttattatcttattgtgattatccttattatttttatttaatgcacaaacatttaactccaacatgatgcatattattatttttttaccatttattttaattcatctctaaactttgtgtatgctcttttcatgatgcaattaaggcacacaaaatgtggaaatccactatattcctttgtatacaaatttgagtattacagagtgtgacacgtggatttgttttaccgaggttcggttctctcaaacctactccccgttgaggtggtcacaaagaccgggtctctttcaaccctttccctctctcaaacggtccctcggaccgagtgagcttcttcttctcaattcaacgggaacaaaacttccccgcaaggaccaccacacaattggtgtctcttgccttggtaacatttgagttgatagcaagaaagaatgaaagaaagaagctatccaagcgcaagagctcaaaagaacacaacaaatctctctcactaatcactaatgctttgtgtggaattgggagagaatttgatcacttgggtgtgtctagaattgaatgctagagctcttgtaagtagttggaagttggaaaatttggatgacttgaatgtggggtggttgggggtatttataaccccaaccaccaaactagccgtttggtgaaggctgcagtcgatgggcgcaccggacagtccgatgcgccaccggacagtgtccggtgcgccagccacgtcacctggccgttgggttccgaccgttggagctctgacgtgtgggcccgcctagctatccggtggcgcaccggacaagtcctgtagactgtccggtgtgccactcgcgcgtgcactgctcctctgcgcgcgcaggcgcgcatttaatgcgttgcagtcgaccgttgcgcgcgaagtagccgttgctccgctggctcaccggacaatccggtgtgcaccggacatgtccggtgaattttagcggattggattcccgaagctggcgagttcagagacgctctcccctggggcaccggacagtccggtgaattatagtgaagcgcctctgagaattcccgaaggtgcgaagtttagcttggagtcccctggtgcaccggacactgtccggtggcacaccggacagtccggtgcgccagaacagggcacacttcggtagtcccttgctctctttgtttgaacccttttcttggtctttttattggcttattgtgaacctttgatacctgtagaacttatagactagagcaaactagttagttcaattatttgtgttgggcaattcaaccaccaaaatcaattaggaaatatgtgtaagcctaattccctttcaatctcccctttttggtgattgatgccaacacaagccaaagcaagtatagaagtgcataattgaactagtttgcataatgtaagtgcaaaggttacttagaattgagccaatgtaaatacttataagatacgcatggattgtttctttaattttaacattttggaccacgcttgcaccacatgttttgtttttgcaaattcttttgtaaatctttttccaaattccttttgcaaattgtcaaaggtaaatgaataatatttcgagaagcattttcaagatttgaaattttctccccctgtttcaaatgcttttcctttgacttaaacaaactcccccttaatgaaatcctactcttagtgtccaagagggtataccaatttaaagttatatcacaaataagataccaatttgaaaatacctttttttaaaaccaaattgaaagacgaaaattttgaaattgatggtggtgcggtccttttgctttgggctcatgctctctccccctttggcataaatcgccaaaaatggaatcattagagccctttcctaactactttctcccctttggcaaataaaacatgagtgaagtttataccaaagacgtagagatgctcggagcgacggcgaaggatgagttatggagtggagtggaagcctttgtcttcgccgaagactccaattccctttcaatacacctatgacttggtttgaaactcacttgagaacacattagtcatagcatataaaagagacatgatcaaaggtatacttatgagctaagtgtgcaagacatcaaaagaaattcctagaatcaagaatatttagctcatgcctaagtttgttaaaagtttgttcatctagtggcttagtaaagatatcggataattgatctttagtattaatatatgcaatctcgatatcccccttttgttggtgatcccttaagaaatgatactgaatggctatttgtttagtgcggctatgctcaaccggattatccgccatgcggattgcactctcattatcacatagaagaggaactttgattaatttgtaaccatagtgtcgcagaacctcccaagttatcgggcccacatgcacctgtccttgtctcaaagacctcagacatctatgtgtgtgcaccaaacaacttaacaggatatgtccgagtgccccgaggaccccggataaacgacttaccgctaagatcgcaggattaagtaaatacacatcacacaccaacatttgcagcggaaataaattctttattgcaaaaagattacatgttacaataagtttacattatacaattatcggagtgattacaaaagaaaatgattaaaaagaattacactttaaaatgtataaaatatttataagttttaaaatacatgctagcttaagtgacagtcctcaataaagaagctaaagatgggatatacttatataagaaggccgagcccaccggcacttagcaccatccacaacagaacaaacttataacctgaaaaacaatagggaataaagccctgagtacgcaattactcagcaagacttacccgactaaagaaaagactctcaagggtatgctggtttgttgggaatcaaggtaaagctcatcaaatttcaaagactcgtttttgcagaaaagcttactagtagtggatccttatgccaaacttttacttcacaaattaagtactttttctgaatctagatttgcctgatctagagcattcacttgtcctacactagtttcattttagcaactttagtttcacttgttatctacgatgagggtcgaagatccagtcttcatatccgagaagttcagcgatccgaatcgattaatacccagctggg

SEQ ID NO: 83734 - DNA, 844 bp, Zea Mays
cagcaccccccctccctccctatctctctgatctctccctcgctctcgcagccgccactgtagaagcttcgaggctgctgctgcgcccatggccgcggaagccaagacgccgtccctcgctgaggaatattcacttccaccacaggaagttccagtggaaaaggcagctgaggagaagccctctagtggtactgagactgaatctgctccttcaaccaatgatgagactccttcatctgtagaagataagaatgaaacgtctgaagtacaagatgctgctgaaaagtcagacgcagaagaaactaacactgctgcagaggaagcaagtgagactgccgaggaggaagaggctgagaaacctgagatcaagattgaaacagctccagcagattttcgtttcccaacaacaaatcaaacgaggcattgtttcacacgctatgttgaataccacaggtgtgtggctgcaaaaggtgaggatgcacctgagtgtgataagtttgccaagtactatcgatccctgtgcccaggtgaatgggaatgttctgaacgaattgtggcaaataaggacatgatgcttgatgtgttcgactatgtcgttgttgactttgtccccaattcttatcaggagccaacccttcgtttgccttctatttctcctggaagtaatgagagtgttgatcaccatttgtctaggttgttggaccaaagagtagttgttcaagaaattttgacgggccctataagtataaatcattgtactgaaaaacttaagaaatgtggtttttcaaaacagcaactttgggatgctaacgatatattgaaggctgatttagaattgcgtcag

SEQ ID NO: 83735 - DNA, 1926 bp, Zea Mays
cagcaccccccctccctccctatctctctgatctctccctcgctctcgcagccgccactgtagaagcttcgaggctgctgctgcgcccatggccgcggaagccaagacgccgtccctcgctgaggaatattcacttccaccacaggaagttccagtggaaaaggcagctgaggagaagccctctagtggtactgagactgaatctgctccttcaaccaatgatgagactccttcatctgtagaagataagaatgaaacgtctgaagtacaagatgctgctgaaaagtcagacgcagaagaaactaacactgctgcagaggaagcaagtgagactgccgaggaggaagaggctgagaaacctgagatcaagattgaaacagctccagcagattttcgtttcccaacaacaaatcaaacgaggcattgtttcacacgctatgttgaataccacaggtgtgtggctgcaaaaggtgaggatgcacctgagtgtgataagtttgccaagtactatcgatccctgtgcccaggtgaatgggtatgtatttattgctttcaccactatggtttacatactgcccttgttgcttgttgtggtgttgagattagaaaaaaatattttgaggcatgtggattatgcattttgagttgataagcattcactttacagtagcactgttcttcaaaaagaataacaatattttagctgtctagtgctactgtaccttacctagataaaatacttgaactttaggatatgcttggattttatagagttctaaatggttggatatgttgttccacctcgtccctgtctagcagttatggaaactcctgaatgtttgtgtcatgtactggtattaagttatatgcaccaaccagttcaacccaaaagcttaagctgataggagtggtggagtagtggacaattcacttatattatattccaacactccccctcacgtcgagcctcattttgggtctctgacgtggaatataggagcgagcaacaattattttatttaattgtgctaaccaggattcgaactcgagacctctggctctgataccatattaagttgcatgcaccaaccaattcaatccaaaagcttaagcttataggaggggtggataattcacttatattatattccaacaacgggcgctcgtacgccaggcagcgtcgcgcccgtgacaggcgccacgcctaggagtgcgatctgggagggcgcgcagatccacaggagcatatggaaagtagtggctagaaaggaaaatagggaaatggaaagtagaaggaaggaaatgagagattgattagtgattgattagtgttaccatgtttaagcttgcctaaaatacagcaggccgatgcctttatatacggcacatggagacaggaataaaggcagccaagaagttatctcttctccacctctctctctaccaagcctatggctgtgggggataaccacaccggagaagacgacgaaccgcggctacgaccttcgtagccgagggccccctgctctagacgtccatcgttgccgagggccccctgctctagacgcccaggcccttgacaacctggtatcacgagtcaggcgatcttcgtcttctcaatcccacacctccgatcagttcctcgacgttatccaaccaccacccagccctccaccctcaccgccgtcgacctcctccattatgagcaccaaaaccatcgacgatctggctgcggtgatcgagaagctcacgggcacgatctctgtcctccaaaatgacgttgagtcgttgaagaaggacaaggcgccgttctcctcgccatccggcagcggcggccacgacggccagcaccacatcgatcgaccgccgaggttccaaaagattgacttcccgcgttttgacgacaagtcggaccccatgctcttc

SEQ ID NO: 83736 - DNA, 480 bp, Zea Mays
atggagggcttcacgggcgcgcacgcttcttctcgcgtcatccttgcttgcgccgcccctagccccaccgtcgtcctccccatgaagctgccgaatttttccttctctcggttggatctgccagagtggtcagtccatcggtttgcgtcgattcaatggggtttggcccatattgctggtacagggtgcaggagaggctacacttcctctatgagtcaaggtcccatggaccccgttttgttttgggtttccctacacattgtccctggacttacagatgacaaatatgatgtgttctatgagtcactcatgggtaaagagaagttacacatcaacattgtggttaatggccatgtcgactctggcaagtctaccaccactggccacctgatctacaagcttggaggcattgacaagcgtgtgatcgagaggttcaggatcttcagtttgagcttgagaaggagaagcaagaaaaaacaa

SEQ ID NO: 83737 - DNA, 489 bp, Zea Mays
atggagggcttcacgggcgcgcacgcttcttctcgcgtcatccttgcttgcgccgcccctagccccaccgtcgtcctccccatgaagctgccgaatttttccttctctcggttggatctgccagagtggtcagtccatcggtttgcgtcgattcaatggggtttggcccatattgctggtacagggtgcaggagaggctacacttcctctatgagtcaaggtcccatggaccccgttttgttttgggtttccctacacattgtccctggacttacagatgacaaatatgatgtgttctatgagtcactcatgggtaaagagaagttacacatcaacattgtggttaatggccatgtcgactctggcaagtctaccaccactggccacctgatctacaagcttggaggcattgacaagcgtgtgatcgagaggttcgaaaagttcaggatcttcagtttgagcttgagaaggagaagcaagaaaaaacaa

SEQ ID NO: 83738 - DNA, 1362 bp, Zea Mays
aagtaacgcaaatcacacacatcaatttttttgcagcgaaaatcttattaccaaatttttacaagttacaaaaattttacattatatacatcggagtgattacaaaagtataagtttgaaatatatgctagctcaagagaccatcctcaataagaagtatagaagggttacttagacttataaaaaagctgagcccaccggcacttaacaccaccatcagcagcacaaaactaagacctgaaaaacaacagggaataaaaccctgagtatgcaattactcagcaagacttacccgactaaagaaaagactcccaaggatatgctggctagagggagtcaaggtaaggctaagcaataatcaaggactcattttgcacaaacgcttactaatagtggatccttaagccatcttttaattatcaatttgcgttcttacctgattctagattctcctgaactagagcattcacttgtcctatctagctttcttttagccaattcgtgtttcacttattaactacgatgagtggtcggtgggtcaagtctccataaccgaggagcaacgacgattcgaaccgattatacccagctggggatccctaaccacacaacatatgtagcacttaacccttgcatatgtcaaccgttcccacagatcctccacaacgtgaaccggtccgcgctacccgggagcacagtactcctccatccagcctctagctaggagggtacacgctactcccaccatctcccacgcccagtgcgcggttatcttttcacgtatggaatagtcgggttcaggcttaccgaggcatgtggctagttacaaagtctcaaccacaacaggcctacatcgaacggtccttaatcgacacaagtggagcactacaccgactcatttcacgatgcaagccacccgcccggtctcatattaattatctaactcaagtccattcacacgtaacacaataaccagtaatcaaaataaatttcaaaaaaaatcttatcactttaagcagggctaagcagcactagtttttcataaaataggtatcaatgaatgattcttcaaattctcaaggatggcaatgcatcaattgtttgatcacgcaactcctatcacctaatgcagcatatcaagtgataaaggttttgtaaacaacaaggaaagtggtgaatgcaccggggcttacctttgttgcagagaagagccgaagactgaggaaataaaatttcacaagtcttcagggtgatgaccagccttcaggaaattgtttcaccaagcgattgatccaccagtaacgtgatctatacgtaaagtaaagatgcttgccatgatcatgatgtgatgatgacatggac

SEQ ID NO: 83739 - DNA, 649 bp, Zea Mays
tttaaataaactgaacccgaatcaaccgaaaccgtaataattgttagccgatttagtttactatttcaaagtcaagaaaataatatgcgtaacccaaatgtggttttaattcgatctgtttacatcctgcctgaacaaatccaaatgatcgaatattaacaactggtagaaatttatctggtcctgcgattgttcaccaaatcaaattcggcctaaattatatacctgatattgttttcatccaacacatctgtgcctcttttaaaccttaaaaattagatttgtctccatgtttacgttaactaaatgcagattaaaataccgaagccgaaatccgtttaattcggtccaattatatcctgtccaaaacaaaccaaaccattgtaattagaactgacagcaagtaattggtaaatgatttagttcgttaaatcattagaataaaatgtgtaaccgtatagcgtgtcagcccagtatatatcgctaaaaattataatccaaaatatctgcaattttctttataaaaagcggaaagtaaaaaaaaaatctagaaaatctcattctattcctatcctcccgccgcccaagctatctgtgtcggctcagatttttttcaccgcctactacagcagcctaatctctatccatg

SEQ ID NO: 83740 - DNA, 2350 bp, Zea Mays
actgacacgcacgcctcacgcaacaaaggcgagacagagcaccagctcaccgccccaccgattcaaaggcgctcggatcctctgacgtcgacgttccctgccagctcccggctgccgccctcgctccttccgccatctgcgctgctctgcggcgccagagccggcgcccgcccgctgccgccctcgacggaccgggacacggggccccaccgttctctttcctgcgctgcgctgcgcggcggctgtgctgctgatcagttaatgtgcctgtgaggctgtgacaggcggcgtcgagcgagtccgaggcgggctaactaaacccgccgtctctcgaggcggcgcccgcggagggccaggtggagggccgaggaaggtggaggcggtgaggcgatggggggcgccaaggcggaggacaagcccgccgccgccaccgctgaagacgattggtgttaccagtttggaaacaagaatgcgtttgactcgaaggccccgaaaaaatcaccacttgcattgagagtggttgtctttgccatgactgtgttatgtgggatatctatttggtcaatgtgtatgaagcagctagggagtgatggctggtcaagaatagtgaagatcgaagttgtggaacaaccatgtaataagtctacagttcctccttctgaggttcaatttgcgcattaccctcaaccgacaacttacagcagggaggaatgcaagtgcaatgctgtccggttctttgcgattatatcatcacagcgatctggaagtggctggtttgaaacccttcttaacagccacatgaatgttagctccaacggtgaaattttctctagaaaagaaaggagaagtaacatttcctctatagtaaatgccatggatagagtgtacagcttggattggaacagtagtgcttccaagaatgagtgcactgctgctattggcttcaagtggatgcttaatcaggtgatgactaaaacatgcagtatagataatttaattggatatcattttgttcatttattttttcattcagtcccagtacattcacaactaggtgctagatgtgctcgaagcagtttcaaaccaagtttttttagtttggatctaagcccattagcagctctacttagaatctacatggcaagcatattcctttttgggacctcatctaattcgtcttttttgatgaatgttcatggtggacagattgactaataaaaccatgaaatactagccgccagggcatagagagttctctagagactgaaaccaaacaagcattcttctgaccggtatgtttccagggtctcgtggcgaatcacgtggccgtagtggactacttcaatcgaagaggagtctctgcaatatttctcttcagaaggaatctgctccgccagttggtatcacagctagcgaataaccacgacagattcctgaagcagttaaacggaacacacaaggcgcatgtccacacagagcatgaggcccatatactcgcgagatacaagcccaggctgaacacgtcgtcgctaatacggaaactgaaacaggctgatgagtacacacgcgacgcccttgagaacctaaataacacccgccacatcactgtctactacgaggacatcgtccgcaacagaacaaggcttctcgacgccctggatttcctcggagtgccgaggagggagctggcgagtcggcacgtgaagatacacacgaagcccctgtcggagcagatcgagaactgggacgaagtctacagcgccctcaacggtacccagtacgagggcttcctgaatgccgctgactatacgtaatatgacgtcacggtctccacgtctcttgatgtagatgtaggtgtgtaggtatagcgccccagctgtgattcctttgttcttgttttcgagtagccggccggccttctgcgtgcctgcctggcaggagttttgatgcgggggatggaggcgctttgccatggttgcgttcgagctcctggctagcccacccactagctttcctcatgtccatgtaacgaccctcgagcttctctcatctttggccgtccgcttgtaatgcttgtcgtcagtgatctcacccatgccatgccatgccatgccatgccttcgagggacaaagctgtgcacttgaacttgaggcttgtcttttcattgggtgtttgcggtgggcaagcaagacgctgcagttaaggattattggaaggtggaaggacttgttggagttgctcttataagatttgttccggtattctttgtaggacgggcggcgtattattgcacccatgggcgatgccgcgatggcaatgaaatccgctggcgggattttcagctatccg

SEQ ID NO: 83741 - DNA, 1848 bp, Zea Mays
actgacacgcacgcctcacgcaacaaaggcgagacagagcaccagctcaccgccccaccgattcaaaggcgctcggatcctctgacgtcgacgttccctgccagctcccggctgccgccctcgctccttccgccatctgcgctgctctgcggcgccagagccggcgcccgcccgctgccgccctcgacggaccgggacacggggccccaccgttctctttcctgcgctgcgctgcgcggcggctgtgctgctgatcagttaatgtgcctgtgaggctgtgacaggcggcgtcgagcgagtccgaggcgggctaactaaacccgccgtctctcgaggcggcgcccgcggagggccaggtggagggccgaggaaggtggaggcggtgaggcgatggggggcgccaaggcggaggacaagcccgccgccgccaccgctgaagacgattggtgttaccagtttggaaacaagaatgcgtttgactcgaaggccccgaaaaaatcaccacttgcattgagagtggttgtctttgccatgactgtgttatgtgggatatctatttggtcaatgtgtatgaagcagctagggagtgatggctggtcaagaatagtgaagatcgaagttgtggaacaaccatgtaataagtctacagttcctccttctgaggttcaatttgcgcattaccctcaaccgacaacttacagcagattgactaataaaaccatgaaatactagccgccagggcatagagagttctctagagactgaaaccaaacaagcattcttctgaccggtatgtttccagggtctcgtggcgaatcacgtggccgtagtggactacttcaatcgaagaggagtctctgcaatatttctcttcagaaggaatctgctccgccagttggtatcacagctagcgaataaccacgacagattcctgaagcagttaaacggaacacacaaggcgcatgtccacacagagcatgaggcccatatactcgcgagatacaagcccaggctgaacacgtcgtcgctaatacggaaactgaaacaggctgatgagtacacacgcgacgcccttgagaacctaaataacacccgccacatcactgtctactacgaggacatcgtccgcaacagaacaaggcttctcgacgccctggatttcctcggagtgccgaggagggagctggcgagtcggcacgtgaagatacacacgaagcccctgtcggagcagatcgagaactgggacgaagtctacagcgccctcaacggtacccagtacgagggcttcctgaatgccgctgactatacgtaatatgacgtcacggtctccacgtctcttgatgtagatgtaggtgtgtaggtatagcgccccagctgtgattcctttgttcttgttttcgagtagccggccggccttctgcgtgcctgcctggcaggagttttgatgcgggggatggaggcgctttgccatggttgcgttcgagctcctggctagcccacccactagctttcctcatgtccatgtaacgaccctcgagcttctctcatctttggccgtccgcttgtaatgcttgtcgtcagtgatctcacccatgccatgccatgccatgccatgccttcgagggacaaagctgtgcacttgaacttgaggcttgtcttttcattgggtgtttgcggtgggcaagcaagacgctgcagttaaggattattggaaggtggaaggacttgttggagttgctcttataagatttgttccggtattctttgtaggacgggcggcgtattattgcacccatgggcgatgccgcgatggcaatgaaatccgctggcgggattttcagctatccg

SEQ ID NO: 83742 - DNA, 561 bp, Zea Mays
atcaccaagacaaaaagatctgcgaaaagattctggaaggaagggatctggagttctacaagtgggatactgatgctgaacttctactaaaagatgccagggagaagctgaatgagctcagcaagcactggactcggaaggacaggaacttgtgcttgaaagaagctgcaaaatgcttccagtacttgggaaagatggtccggttaattatcttgtgagccgttgtgtttgttggataaatcccagtttaagctcgcggcatgcattagagggacactagtatggctggaggcggcgcagtgcagttactcttgaggagttaatatccttatcaactaaataacatgtcagaagtctggagggtcctttttggtgtaatagatgaagagggtcagcgagcactatatgattgacgctgaaatggcagaacgcaattgcttctttttttattccgcgtgcgtaactgcatatttaggaggtatttggttagagggactaaagattagtctctagtttttagtcccttttagtctttttttttgccaaacactaggactaaaa

SEQ ID NO: 83743 - DNA, 826 bp, Zea Mays
atggatattggcggaacactgatggttccctaacaaatattcgttccaattccgaattatgtttacttcaggaaaagtggtttggagcgttcagctagcatttcaaaagatttggagtggttcagaaaacaagggattgcaatcccagagccgagtacttcgggatcaacttatgcagcttatctgactgaactggctgagagcaacgctcctgcattcctctctcattattacaatatctattttgctcatataactggaggtgtcacaataggcaataagatctgcgaaaagattctggaaggaagggatctggagttctacaagtgggatactgatgctgaacttctactaaaagatgccagggagaagctgaatgagctcagcaagcactggactcggaaggacaggaacttgtgcttgaaagaagctgcaaaatgcttccagtacttgggaaagatggtccggttaattatcttgtgagccgttgtgtttgttggataaatcccagtttaagctcgcggcatgcattagagggacactagtatggctggaggcggcgcagtgcagttactcttgaggagttaatatccttatcaactaaataacatgtcagaagtctggagggtcctttttggtgtaatagatgaagagggtcagcgagcactatatgattgacgctgaaatggcagaacgcaattgcttctttttttattccgcgtgcgtaactgcatatttaggaggtatttggttagagggactaaagattagtctctagtttttagtcccttttagtctttttttttgccaaacactaggactaaaa

SEQ ID NO: 83744 - DNA, 820 bp, Zea Mays
atcggacatggatattggcggaacactgatggttccctaacaaatattcgttccaattccgaattgaaaagtggtttggagcgttcagctagcatttcaaaagatttggagtggttcagaaaacaagggattgcaatcccagagccgagtacttcgggatcaacttatgcagcttatctgactgaactggctgagagcaacgctcctgcattcctctctcattattacaatatctattttgctcatataactggaggtgtcacaataggcaataagatctgcgaaaagattctggaaggaagggatctggagttctacaagtgggatactgatgctgaacttctactaaaagatgccagggagaagctgaatgagctcagcaagcactggactcggaaggacaggaacttgtgcttgaaagaagctgcaaaatgcttccagtacttgggaaagatggtccggttaattatcttgtgagccgttgtgtttgttggataaatcccagtttaagctcgcggcatgcattagagggacactagtatggctggaggcggcgcagtgcagttactcttgaggagttaatatccttatcaactaaataacatgtcagaagtctggagggtcctttttggtgtaatagatgaagagggtcagcgagcactatatgattgacgctgaaatggcagaacgcaattgcttctttttttattccgcgtgcgtaactgcatatttaggaggtatttggttagagggactaaagattagtctctagtttttagtcccttttagtctttttttttgccaaacactaggactaaaa

SEQ ID NO: 83745 - DNA, 1348 bp, Zea Mays
aacagacccgcggtatcgccaagtattcccttgcaggagtaacggataaccaacccctcaaacggttaaacccatgccgctaatcgacgccgccgcctcggcggtcgcgccgcccccaccccggcgagtggctcaactccgcttcttcagcactcgcagacccggaatcctatccctaactgccaccagctgctccccctcccctccgcccccggtcgctgcggaggtgcctgcgccgccacaggaagcgaagtcgaagccgaggccacggcggtacccgaagcagtaccccggcgagtcggtgggcgttgctgaggagatgcgctttgtcgccatgcgcctgcgtaaccccaagcgcaccaccataaaagacaagtcggggacggaggacgcggacgccggggcgggggtgtcggagggcgaggctgaggaggacgacggcggcggcgtgaaggaggaacacgaggaggaggatgagggcgagctcgaggaaggggaatggatgcccagcatggaggggttcgtgcgatacctggtggacagcaggctcgtcttcggaaccatcgagcgggtcgtggccgagtccaccgatgtcgccttggtttggagcgttcagctagcatttcaaaagatttggagtggttcagaaaacaagggattgcaatcccagagccgagtacttcgggatcaacttatgcagcttatctgactgaactggctgagagcaacgctcctgcattcctctctcattattacaatatctattttgctcatataactggaggtgtcacaataggcaataagatctgcgaaaagattctggaaggaagggatctggagttctacaagtgggatactgatgctgaacttctactaaaagatgccagggagaagctgaatgagctcagcaagcactggactcggaaggacaggaacttgtgcttgaaagaagctgcaaaatgcttccagtacttgggaaagatggtccggttaattatcttgtgagccgttgtgtttgttggataaatcccagtttaagctcgcggcatgcattagagggacactagtatggctggaggcggcgcagtgcagttactcttgaggagttaatatccttatcaactaaataacatgtcagaagtctggagggtcctttttggtgtaatagatgaagagggtcagcgagcactatatgattgacgctgaaatggcagaacgcaattgcttctttttttattccgcgtgcgtaactgcatatttaggaggtatttggttagagggactaaagattagtctctagtttttagtcccttttagtctttttttttgccaaacactaggactaaaa

SEQ ID NO: 83746 - DNA, 1169 bp, Zea Mays
cttcaatgcagatgcacgagctgtcgaacagacccgcggtatcgccaagtattcccttgcaggagtaacggataaccaacccctcaaacggttaaacccatgccgctaatcgacgccgccgcctcggcggtcgcgccgcccccaccccggcgagtggctcaactccgcttcttcagcactcgcagacccggaatcctatccctaactgccaccagctgctccccctcccctccgcccccggtcgctgcggaggtgcctgcgccgccacaggaagcgaagtcgaagccgaggccacggcggtacccgaagcagtaccccggcgagtcggtgggcgttgctgaggagatgcgctttgtcgccatgcgcctgcgtaaccccaagcgcaccaccataaaagacaagtcggggacggaggacgcggacgccggggcgggggtgtcggagggcgaggctgaggaggacgacggcggcggcgtgaaggaggaacacgaggaggaggatgagggcgagctcgaggaaggggaatggatgcccagcatggaggggttcgtgcgatacctggtggacagcaggctcgtcttcggaaccatcgagcgggtcgtggccgagtccaccgatgtcgcctatctgcgaaaagattctggaaggaagggatctggagttctacaagtgggatactgatgctgaacttctactaaaagatgccagggagaagctgaatgagctcagcaagcactggactcggaaggacaggaacttgtgcttgaaagaagctgcaaaatgcttccagtacttgggaaagatggtccggttaattatcttgtgagccgttgtgtttgttggataaatcccagtttaagctcgcggcatgcattagagggacactagtatggctggaggcggcgcagtgcagttactcttgaggagttaatatccttatcaactaaataacatgtcagaagtctggagggtcctttttggtgtaatagatgaagagggtcagcgagcactatatgattgacgctgaaatggcagaacgcaattgcttctttttttattccgcgtgcgtaactgcatatttaggaggtatttggttagagggactaaagattagtctctagtttttagtcccttttagtctttttttttgccaaacactaggactaaaa

SEQ ID NO: 83747 - DNA, 3098 bp, Zea Mays
aaatgcaagtccagccggcgctttccatctccagtccgagctccttcttttcccttcccatggccacgcgcccctggttttccctgcgcgcatccgcgtgctccaccgtgccgtgctcccatgagctcacccagttccctctactcgctcgcgtccagtcgtcggacctcgctttcatccctatggtgctcggcgccctccctgctccgcgccgtgacgaggattgcgggccggctgtccggtctcgtgaattgcctcgttgtggatggacggctggatgggggcaggcaaatccggatccgttgcgctactcgcaaagcgtgtgggggcctcgccggccatcctgcttccttgtgtgcgctccgtttgccgtcatcctccacgcgccggcagttcgcttggtgtcagctcgctgccgtggttgtttgctgctcgtggtcgtcgtctcctcaacatccacgtggacgctccctcgccgatcgcgctctccggagttcactgaacgctgctcccagtgggaaagctttgcaagttcgcgcgtcgtcgctctctatcgccggatgccatcctcgtctcgccacctcgttgttgcgccgtcgtttttctcgtccagtactcgcgcggtctcgcccaaaccgtgctgtcgtctcccaaccgcttgtccttacccctgcacgcgcttgtcgcgctagtcaaccctgcctcggtcatcgtcatcgatactgcgcttgccggtggccgaagctcatgtcgccctctccttcactagattcgtgtcctcgccagctcgcttcagacttgatctcatcgtcgttccatgcgtcatcaagaaatcccaagaatcgagtgaaggcgaagctagtcgggtgatattcatcaagtgctcgacaaaagctcgaacaagtcgtcgatcgtcatcctcgtctacgccaagctctaagaagattaggcacagagaaaaataaatcagtacgcggtcggagaattctcgatgtggacaaagaagaagcgtgattcgacgcagcactcaccctattttcggtgaaatgctgagcggaaaggcgtcgtcgatttcgtggtttcaagtcggatgtcataagggtaagttgattcgtatttcagtcagctaggaataaaaatagattttctagtgttattatgttaatttggttaatggataaagtcgatgccctgcttaattagtcagcttattctaggtttggtgtttaattcgttgtcgtatagtattatttaggtttgcgatattcctccttatatgcatacttgtgcattatgcatatcattcaggtacgttaattaatcacgtgatgcggaagacgacccaagtcgatcccaagcgcgggctaattcacaggatgatgctgatggacaaacctggagatggataatggagcgagtatcggaataaaggctgatcatcaagtggacgtcacctaacaacactaacctagtgttattcaggcaagccccagtgcatttgccacctctttactgctttaaaatctttatcaccttatatgctgcattaaaatctttatgatgcttagtcttgctttagaaaaacaaaatgttttgttttaaaacaaaaggtgatgcttcacagtggatgggaatttttacaaagagaaacttgtgatggtgaatccatcatggccatgatggattcaacatcggaaaagatgtacctctgctaggtaccaaactttgggtttaattaataaagctgagatcaggtgggtgacttgcacgagaaaggagtctcggtgtagtgtctccgtctgagtcgtttaaggaccgtaccgattgttggcctgttgatctaggaccttttatctggccacatacctcgtcatgggtaagcttgaacccgactattccatacatgaaaagacaatcgcgcactgggagtggagagatggcgagagttgcacgtaccctcctggcaaaggaccgcctaaaaggggtggtgtgctctcgggtggcgcggacctgttcatgtggtggaggatccgtgggaatggtagacatgtgcaaaagtgttaagagaagcatgtgtcgtgtggttggagatccccagctgggtattaatcgattcggatcgtcgaacttctcggatatgaagactagatctttgaccctcatcgtagataacaagcgaaacaaaagttggattttaaaagaaagctagtgtaggacaagtgaatgctctagattaggcaaatctagattcaggaaaagtacttaacttgtgatgtaaacttttggcttaaggacccacttccagtaagcttttctacaaaagagtctttgattcttgataagccataccttgaatccctctagccagcatacccttgagagtcttttctttagtcgggtaagtcttgctgagtaattccgtactcagggttttattccctgttgtttttcaggttatagttttgtgctgctaatgatggagttaagtgccggtgggctcggccttcttataagtctaagtaacccttctatacttcttattgaggatggtcacttgagctagcatatatttcaaacttacaaataatttataacatttcaaagtttactcctttgaaccacttttgtaatcactccgataaatacaatgtaaacttgttataacttgtaaaatttggtaataagatttccgctgcaaaaatgttggtgtgtgatttgtgttacttaatcttgcgatcctagttgttcgtggtttatccggggtccttggggcactcggacggatcctgttaagttatctgtgcacatgcatagcagtctgaggtctctgagacaaggacaggtgcatgtgggccccataacatgggaggttctgccacagcaacggtcgtctgcgccaaaataggaaggagatcggcaccagaccgtctacagtgactgtccggtggcgcaccggactgtccggcgcgccacccgacagaaggcaaccttggccttccttgttggtctccaacggctcctagctgccttggggctataaaaaggacccctaggcgcaatggaggagtcacccaagcttacaagaaacattctaagac

SEQ ID NO: 83748 - DNA, 2911 bp, Zea Mays
atgagatattgcacaagtttacattagaatccatggattaaaagaataactagctttgaaagtcacatggatttgttgatggatttaatcccaccatgggattgggtgtgagatatggattcacccaatccatacccggattaaatccatggtgggattatatcccatgtaaccgaacaaggcctaagctgatcatttttttccatgaacttgtgtttataggagtaaaaaaaactgtgaaagctttgggaatggagttgacagcttcgactgaataacagaagaattttcactcgtcttctcctgatctcatggaacttcttgatagtaatggccacggggaaacaagagcacagggtgctgaaaacattgcaccagtttctgctaatagtccagatacatcatcggaaatgcaagggaagttacctcacagtttgacagagcaccaggaagaaatggggtcccctgcaggccatgcagggagtttgtcgccgaaaattgtctcccacatagaaccagctcgagcatctgatgacccctcaaaagatgagggacgtcatgctgctttattaacagataagagtggagttgaaatcatatacgaaaatggttttactggcgccagtagtattattccagcagctgaaatgaaatctgaagaagacaatatgtactgtcgtaacaacgttgccgtcacccccacaaagaaagtagaatcagtaaaggggtgcgaaggctcacacacaggtcttgttgacactagcgccccattcgagtctgttaaacaggctgtcaccaagtttggaggaattgttgattggaaagcctacagggctcggtcattagagagacgcagggtcatgcaacttgaacttgagaaggttcagcaagagattccacagttcaaagaagactgggagactgctgaggtggccaaggcacacgtcattgaggagctagagagaactaccagacttgtcgacgagctgaagcatgagctggagagggcacagctcgaagtggaccaagcgaagcaagattccgagcttgccctgctgagggcacaagagatggagcaagggattgacgatgaagctagtgtaatagcccagacacagttggcagtcgccaaagaaagacatgaaaaggctgttgaggagctggaattgctgaaagaggagctaagatcaacgcatgaacagtatgctgtattagccactgaaagggatgtagccgttaaaagggccaaggaagttgttcgtgctgcgaaggatactgagaagcaagtagaggaactcactttagaactgatcgcatccaaagagtctctcgagtcagcccacgcttcacaccatgaggttgaagagcacaggctcggggcagctttggcgaaagagcaggatttcctggcttgggacaaagagctgcaggaggcacaagaggagctaaaccagctccacgaacaaatcgcatcgaaaacgaatgtggaggctgaagctgttgaaaacgagcgcaaactacttagcctgaaaagtgagctagctgcctatgtggaagacaaattgaatgaagaggctggaatgcttcagcaacaaggttctgacgaagaaaaagaaatcagtaggtcaatcaagcaagctcttgcttcaaaaaggaaggagcttgctgaacttaaagggaaactagaaaatgcgagaaatgaagccaacctagtaagagttactgcagaatcactcagttcagagctcgatagggagaaagcttcactcgccgcattgcagcagagcgagggtatggcatccatcacagtttcctctctagaagccgagctcgataggacagagcaagagatagagatggtacataagaaagaagcggaagctcgggaaaaaatggcggagcttccaaggatgttgcagcgagcagcccaggaggcagaagatgccaagatggcggctcactcggcacaagaggaactgagaaaggccaaggaagaggttgagcgggccaaggcttctgcgacaacggcaggtaccaggttgcgtgcagtttcgaaggagatagaggcgtctaaagcatctgagcggctagccatagcggcagctcaagcgatgcaagagagcgaggacacaggaagcactggcgcttctcctcgagtagtaacgcttcctgtaagtgagtaccatgctcttagcgagaaggttcatgaagccgaagaacttgcaaacgagagggtggcggtcgcgttggcgcaggtagagttggcaaaggtgtctgaatcgaggagtctagagaggctacaggaagcgtccaaggagacggagaaaaagaagagcgatcttcgcatcgcgctggagagggccgagagggcaaatgaagggaagcttggcgctgagcgggagctgagaagatggagagctgaacatgtgcagcgtcggaaagcccatgaggctgcacagcatgcagttagtccggtaagaactccacccaggatgtttgtccagcagaagggctcttatctggaaggaaacgaactcagagatccaaaggtgcacaagtcaactggcagcatggatcagtttgtttcggacaagaaatcgaggaaaaagaagtcgttcttaacccagttgtccacacttttgtctagaaagacacatgcacaaacataagagtgattgttcttgaaaaaaaagagtttctgtatctttgtaaaatgttaatggtgtaaatctagttttggatcatgctcttgtaaattgtttcgcacttgaagactttatgagtgtatgtctttgtatggtgtgttttttttctgctttacatcgaaaaccctggatggaatatcctttgtgatacaagaacaccatacacgacaggtgttctcagttattatgtctaaacacaaattggg

SEQ ID NO: 83749 - DNA, 3346 bp, Zea Mays
gtaaaaacaatatgaattattttttaacgcaactatttacagagtcagagcagactttagcgcgtccggtgactccgtcggcgaggcgtcacactcacggactcacctaatcgcaaacccgtcagcccttctagaaatcaactaacggaaaggtttgtcctcgtaaatcgataaagcacggggggctttctttacaaaagtgagctacgtagcctagtgcagcaacgccccggagctctgactctgaggcctcggcccggcgacgacgacgagtgcgcggtgacgcgagcgcaagagagaacaaagctttgacgcgcacccactcctgccgcctccctcagtcccgactcccgaacacgcgcgcgcaggcccagcacagcacggacgacgacgcagcgagaggctcggaaggaggaaagagtcgccggcggagaccccaatcgatcgaaggcccccggtcgcttcgcccgcgaggcatatcagtgcccccttggccaccgggtaaaagctttcctgggggatacgatcggctctgcggcctgccacggatcggagggcttttgctggtgactcctgggggattttcggtcggggtttggagctttcctggttttgggagctagctagctggctgtccagcgactccatggattagaggagtaaaaaaaactgtgaaagctttgggaatggagttgacagcttcgactgaataacagaagaattttcactcgtcttctcctgatctcatggaacttcttgatagtaatggccacggggaaacaagagcacagggtgctgaaaacattgcaccagtttctgctaatagtccagatacatcatcggaaatgcaagggaagttacctcacagtttgacagagcaccaggaagaaatggggtcccctgcaggccatgcagggagtttgtcgccgaaaattgtctcccacatagaaccagctcgagcatctgatgacccctcaaaagatgagggacgtcatgctgctttattaacagataagagtggagttgaaatcatatacgaaaatggttttactggcgccagtagtattattccagcagctgaaatgaaatctgaagaagacaatatgtactgtcgtaacaacgttgccgtcacccccacaaagaaagtagaatcagtaaaggggtgcgaaggctcacacacaggtcttgttgacactagcgccccattcgagtctgttaaacaggctgtcaccaagtttggaggaattgttgattggaaagcctacagggctcggtcattagagagacgcagggtcatgcaacttgaacttgagaaggttcagcaagagattccacagttcaaagaagactgggagactgctgaggtggccaaggcacacgtcattgaggagctagagagaactaccagacttgtcgacgagctgaagcatgagctggagagggcacagctcgaagtggaccaagcgaagcaagattccgagcttgccctgctgagggcacaagagatggagcaagggattgacgatgaagctagtgtaatagcccagacacagttggcagtcgccaaagaaagacatgaaaaggctgttgaggagctggaattgctgaaagaggagctaagatcaacgcatgaacagtatgctgtattagccactgaaagggatgtagccgttaaaagggccaaggaagttgttcgtgctgcgaaggatactgagaagcaagtagaggaactcactttagaactgatcgcatccaaagagtctctcgagtcagcccacgcttcacaccatgaggttgaagagcacaggctcggggcagctttggcgaaagagcaggatttcctggcttgggacaaagagctgcaggaggcacaagaggagctaaaccagctccacgaacaaatcgcatcgaaaacgaatgtggaggctgaagctgttgaaaacgagcgcaaactacttagcctgaaaagtgagctagctgcctatgtggaagacaaattgaatgaagaggctggaatgcttcagcaacaaggttctgacgaagaaaaagaaatcagtaggtcaatcaagcaagctcttgcttcaaaaaggaaggagcttgctgaacttaaagggaaactagaaaatgcgagaaatgaagccaacctagtaagagttactgcagaatcactcagttcagagctcgatagggagaaagcttcactcgccgcattgcagcagagcgagggtatggcatccatcacagtttcctctctagaagccgagctcgataggacagagcaagagatagagatggtacataagaaagaagcggaagctcgggaaaaaatggcggagcttccaaggatgttgcagcgagcagcccaggaggcagaagatgccaagatggcggctcactcggcacaagaggaactgagaaaggccaaggaagaggttgagcgggccaaggcttctgcgacaacggcaggtaccaggttgcgtgcagtttcgaaggagatagaggcgtctaaagcatctgagcggctagccatagcggcagctcaagcgatgcaagagagcgaggacacaggaagcactggcgcttctcctcgagtagtaacgcttcctgtaagtgagtaccatgctcttagcgagaaggttcatgaagccgaagaacttgcaaacgagagggtggcggtcgcgttggcgcaggtagagttggcaaaggtgtctgaatcgaggagtctagagaggctacaggaagcgtccaaggagacggagaaaaagaagagcgatcttcgcatcgcgctggagagggccgagagggcaaatgaagggaagcttggcgctgagcgggagctgagaagatggagagctgaacatgtgcagcgtcggaaagcccatgaggctgcacagcatgcagttagtccggtaagaactccacccaggatgtttgtccagcagaagggctcttatctggaaggaaacgaactcagagatccaaaggtgcacaagtcaactggcagcatggatcagtttgtttcggacaagaaatcgaggaaaaagaagtcgttcttaacccagttgtccacacttttgtctagaaagacacatgcacaaacataagagtgattgttcttgaaaaaaaagagtttctgtatctttgtaaaatgttaatggtgtaaatctagttttggatcatgctcttgtaaattgtttcgcacttgaagactttatgagtgtatgtctttgtatggtgtgttttttttctgctttacatcgaaaaccctggatggaatatcctttgtgatacaagaacaccatacacgacaggtgttctcagttattatgtctaaacacaaattggg

SEQ ID NO: 83750 - DNA, 1384 bp, Zea Mays
gtcagctccagtctccatccgaatttatgtaaaaacaatatgaattattttttaacgcaactatttacagagtcagagcagactttagcgcgtccggtgactccgtcggcgaggcgtcacactcacggactcacctaatcgcaaacccgtcagcccttctagaaatcaactaacggaaaggtttgtcctcgtaaatcgataaagcacggggggctttctttacaaaagtgagctacgtagcctagtgcagcaacgccccggagctctgactctgaggcctcggcccggcgacgacgacgagtgcgcggtgacgcgagcgcaagagagaacaaagctttgacgcgcacccactcctgccgcctccctcagtcccgactcccgaacacgcgcgcgcaggcccagcacagcacggacgacgacgcagcgagaggctcggaaggaggaaagagtcgccggcggagaccccaatcgatcgaaggcccccggtcgcttcgcccgcgaggcatatcagtgcccccttggccaccgggtaaaagctttcctgggggatacgatcggctctgcggcctgccacggatcggagggcttttgctggtgactcctgggggattttcggtcggggtttggagctttcctggttttgggagctagctagctggctgtccagcgactccatggattagaggtgatggtagctagctggcccaatctcgatccgatcatcatcttgcttgaccacgattttcttgctttcctctagatcttattaaaagtacaagtttttttcccgaaaactgttgcactttatgtgttggaaagactctctacgtacacggagggaaaaaaacaagaggttaggtccaagtgtggaacagctgctgagtagtgattgctgttgctgagatgaagttcatgacttcatgtcagttagtggcgacgtttcatgcttacagcactacatcacacttctcctgtgctggccgctatatcatctttactgcacacggaagtgtttatggatgcttccgtaatatatgtacacatgcacatgaatgaaatggggtgattcataactggctgtaatttttgaattttccatactatatgcacgatagagacgataataaaactgtctcccactacaaggaggtgtgtatgatcacattctgcttagcttacttgtaacaatctgtgcagtttcttttctgtaaggctttgttcgtttacaccaatcccgctctggattagcatggattggaattaaatccatgcctcaatccatgccccaaaataatccatgactacttaattttttttattcggttaaacccatcatggaatataactcaaaggtttgggaaatttttaaactatggaagacatg

SEQ ID NO: 83751 - DNA, 592 bp, Zea Mays
ggtttctaccggcagctgcgtgatgtgctccatttggtcatattggtcctctgctgcagctaaagttcgtgagcaataaaagagcagttggaatttagcatacacggacgagaaaataggtgcaaatttgtgggaactactttgatatggaccccttaaatccaaacagcaacagaaagcggaatcataacaatgcatgctacgccccatcaactttatctcatacagaagcaaggcgtatacgtaagcgagtgctagatcagcgaaaactagcatcaacagggtccaccgcgccatctcagcatactcccacactgcggtgtggacacttcgatccagatttcgtaaaaacaatcaaagctacataccatgatcgatcgtattatggaagaccatcataccaatgtgttcattgctccgcacttttttggcacaacgagagaataaggtcatctgtgggaacaagatctgtcatctacaatagttgttgtaaagcaagtcatggaagacaagcatcaataccatgtgccacacaaaacctttcccaacaacagatgtttacacaagagagcacagttgatgtcataaccac

SEQ ID NO: 83752 - DNA, 279 bp, Zea Mays
gtctccaggtcgcccgccgcgacgaccaagaagcaagtctcagctgccagcggtcacgtccttatcgctgccacttctccgtcgcgtttgccgttcgtcgtcgccacaggtcatattggtcctctgctgcagctaaagttcgtgagcaataaaagagcagttggaatttagcatacacggaccaagtcatggaagacaagcatcaataccatgtgccacacaaaacctttcccaacaacagatgtttacacaagagagcacagttgatgtcataaccac

SEQ ID NO: 83753 - DNA, 3396 bp, Zea Mays
caaatctgggctgcttagcctgtccacgtcggctgaaaaaggttggccattggatcacacatcaacggttggagcgctggttatcccatccactacatacaaaaatagagccagctgccttcgttccatagaaacctggaagtctccaggtcgcccgccgcgacgaccaagaagcaagtctcagctgccagcggtcacgtccttatcgctgccacttctccgtcgcgtttgccgttcgtcgtcgccacaggtcatattggtcctctgctgcagctaaagttcgtgagcaataaaagagcagttggaatttagcatacacggacgagaaaataggtgcaaatttgtgggaactactttgatatggaccccttaaatccaaacagcaacagaaagcggaatcataacaatgcatgctacgccccatcaactttatctcatacagaagcaaggcgtatacgtaagcgagtgctagatcagcgaaaactagcatcaacagggtccaccgcgccatctcagcatactcccacactgcggtgtggacacttcgatccagatttcgtaaaaacaatcaaagctacataccatgatcgatcgtattatggaagaccatcataccaatgtgttcattgctccgcacttttttggcacaacgagagaataaggtcatctgtgggaacaagatctgtcatctacaatagttgttgtaaaggtggtaaagttcgcatacctgcttatagacccaggcctgaacctttattgtcattagcaaggtttgatggtgatgtggtttcaaaaaacttcatgcaaaatataaggcaatacaattgcttgtttgcatttacatctatgggcgctcatattgatagatcattgaatgatggtcgcggaccaccagtcttcaagatatgtggtcagatccatcatcgaataggctcattacttccaatgaccgaccagcccccaaaattccttcaactttatgtatatgatacatcacatgagatgttggacacccataatcctttcgctaaaaaattcagaattgctaaggaaaggcttatcgaacacgcagacgaggaatttatcattagaattattggagccaaagaaggagatcctgtgcaatatgacatgccaacaactgatgatttagccatgctagttatcggtgatttctcccttgaaaccttcaaacgagacattatcatagaaaccagaaattatgaattaaaacgtatttcatcgttacatccagcttatatggcccttcaatatccactcctatttccatatggagaacgaggtttccaaattggtgttatgtatagcggcttacaaaacagacaggcaaattcaagagttcgtatgacaatgcaagactattattgctatcaatttcattataaacccgggcaacccaatccatttctctcttatgggatattatcaaatcaagctaaggtcgatgcccgtgcctgcattgatgaaaataggcttacttacattctgaataatcaggacaaattaaggatggaaaatttacaaggtatatcagatgctgttagtagaggttgcataaacggtgaagagatggggaaaacaattgtgcttccagcgtcacatatcggtggaagacgatacatgatacaaaactatcacgacagcatagctatttgcagagttcatggcccacctgacttcttcgtaaccttcacatgtaatgcaaagtggcccgaaattattgagagtctttaccactgtggacaaaaaaattctgacgcacctgatattgcggtaagaatattccatatgaaattacaagagttattacaagatataaaatctggaaagatagttggaccatgcaaagcaggtgcgaatattttgtttccaattttatacatacatatacttctctttaattattgagttggaatttgtattcgtaaacaaactttcttatactcattcgttttttctaccttatctacagtaaaaaaaacaaatctttattccaatattgttgctttaccatctatgctgcgaacccacaatttgagtacaaaagttaaatttacttattcatcctttatacactaagtttataacaccttgtctaatataatcttcttaacttgagtaaaaaggttagatttacttatttattcataattcacttaacctatatcaccttgtctagtcctctttttttagtatacaaccttttgactgaaaacatttacatagtacatattgaaaccttgattgtccaaacattttatacaaatgcacacaaatgttgacaataccgcttataacattgatctattacaaacacataattactcaccaaaggttttcctaacttttttcgtggtttcctcatatgcaaccttccgttcaatgcaatcccatgaacaatattgccttaactaccaaaacccttgctatattatacatattcaaacttaatttaccaaaagttttgtgcttcttatctctttgctccatttgcaatttgcgtaaatagtatttttcatgcctggcaacataagttccattgtacacgctttaacttaataaacaaaaaaggaacccttctttgtttggtttgttcttttctttgtaaacctaacagtaacacgaatccatacataacaatgacaagactgttaataccattaccacatcacatgtcataacttagctactataagtctttctaatcaattcatctttttttcgtgatgcagtcctatatacagtagaattccagaaacgtggattacctcacgcgcatattattttctgggtgtcaactgatacctcacagccaaatgctaaccttatagattcttacataactgctgagataccagatccagctactgatccattaggatatgccttacttgcggaacacatggtccatggaccatgtggctattataatcaaaattcgccttgcatgaaaagaaatcaatgctccaagcactatcctaagctctttaacagtgaaactgtagttgatatgaatggatttgcagtttacaaacgatcaaacaatgatagattcgtcatgaaatctaacattaagctagacaatagatgggttgttccctacaacatgacattactcaaaaaatatcaagcccacatcaatgtagaatggtgtaacaaagttcaggtaaccgtatacacaaacaccaaaccaattatgttttgcatacagaggaaaatgtcgtcttcttgcatagctatctaataactgttatataacactaacaatttctagctcacagatataaactcagcttcattgccactgatggaacatccgaagcagaattcttttgctttgatactatagctagacgaatagtaggaaaatcttgt

SEQ ID NO: 83754 - DNA, 501 bp, Zea Mays
ccttcctagagcgctcggcccatgtttaggagtgccgggcgtgcgcgcagcgtgcctcttcctaatccatcgcagagcgccgccggcgggtagcgctactgctagaggagaggaagcggaaagggcggcggcggcgcttgtggtcagtcaaagatccaacctccggactcgcgatggggcggcggatcctcaacgatgctctgcgcacgatggtcaacgcagaccggcgggggaacgcgtcggcgcttctccgacccatctccggcgtcatggtctccttcctcaacatcatgaagtaccgagggtatatcaaaaaatttgaggtcattgatgagaatagagttgggaaaattagagtggagcttgatggacgtcttaaagattgcaaagctctcacctacaggcaagacctcaaagctaaggagatagaacgatacagagttaggatgctcccaacacgccagtgtgctatccagtatgctaggtttgcatataatcctg

SEQ ID NO: 83755 - DNA, 1843 bp, Zea Mays
acaccaaccaccttccccatcatcagcaatctctctctctcactctctcacggtcgattgattagtccaaagctggacggagaccttgaggaatccatcccgaactgaacggcattattctttctcgccactgttactgttctctctctctctctccaccttccaacagaattcacaggaaggtggttggggttgggcggaccagcaaaggcacatgggccgctccttcagtagtacagcggcgcctgttcggcctgctgcgctcgcggcgccgcccctcctcctcttcctcttgctcgggctcctgggagctgcggctgccaatgtcggggactcctgctccacgagcgcggactgcggcgccggccagtggtgcttcgactgcgagccccagctctccggctcccactgcgtccgctccgccgccaccaaccccttccagctcattaacaactcgttgccgttcaacaagtacgcctacctcacgacgcacaacgcgtacgccatcgtcggggagccctcgcacaccgggatcccgcgcgtcaccttcgacaaccaggaggacacggtcaccgaccagctgaataacggagtccgggcgctgatgctcgacacgtacgacttcaagggagacgtgtggctgtgccattcgagcggagggaaatgcaacgacttcaccgcgttcgtgagaacctgcactggacactttcaaggagatcgaggcgttccttgcagcaaacccgtccgaaatcgtcacgctgatcctagaggactacgtccacgcgccgaacgggctgacgaacgtgttcaacgcgtctggcctgctcaagtactggttcccggtgtcgaggatgccgccgagcggccaggactggcctctcgtcagcgacatggtcgcgaccaaccagcgcctcctggtgttcacctccgtcagctccaaacagagcgcggaaggcatcgcttaccagtggaacttcatggtcgagaacaactacggtgatgacgggatggatgccgggaaatgctcgaaccgtgccgagtctgctcctctcaacgacaacaccaagtcgctggtcctcatgaactacttcccgtcgctccctgtcaagtttacagcgtgcctgcagcactcccagagccttgttgacatggtgagtacgtgctacggcgccgcggggaaccgatgggctaattttgtcgcggttgattactacaagagaagcgacggaggcggggccttccaggccacggacttgctcaatggtagactgttatgcgggtgccaggacatcagggcatgctcgcaaggttccggtgtagtatgttctgcataagtccataacaaatagagatcaatttgattggagtggcgaaagaagacagagagcacagagggattgaaagctgtgagctccttaagccggcgtctacgtctttgtataggacagggatcaccgttgccttggtttgcaagcttaaagataaagaagtctagatttagttgttatattttttttatctttgtctaaaccaaatcagtatatctcttatatttagaaagtacatctaatgttatgtatacagagagaattttgcaagcttaaagataaagaagtctagatttagttgttatatttttttttatctttgtctaaaccaaatcagtatatctcttatatttagaaagtacatctaatgttatgtatacagagagaattttgcaagcttaaagataaagaagtctagatttagttgttatatttttttttatctttgtctaaaccaaatcagtatatctcttatatttagaaagtacatctaatgttatgtatacagagagaat

SEQ ID NO: 83756 - DNA, 1849 bp, Zea Mays
acaccaaccaccttccccatcatcagcaatctctctctctcactctctcacggtcgattgattagtccaaagctggacggagaccttgaggaatccatcccgaactgaacggcattattctttctcgccactgttactgttctctctctctctctccaccttccaacagaattcacaggaaggtggttggggttgggcggaccagcaaaggcacatgggccgctccttcagtagtacagcggcgcctgttcggcctgctgcgctcgcggcgccgcccctcctcctcttcctcttgctcgggctcctgggagctgcggctgccaatgtcggggactcctgctccacgagcgcggactgcggcgccggccagtggtgcttcgactgcgagccccagctctccggctcccactgcgtccgctccgccgccaccaaccccttccagctcattaacaactcgttgccgttcaacaagtacgcctacctcacgacgcacaacgcgtacgccatcgtcggggagccctcgcacaccgggatcccgcgcgtcaccttcgacaaccaggaggacacggtcaccgaccagctgaatgtgataacggagtccgggcgctgatgctcgacacgtacgacttcaagggagacgtgtggctgtgccattcgagcggagggaaatgcaacgacttcaccgcgttcgaacctgcactggacactttcaaggagatcgaggcgttccttgcagcaaacccgtccgaaatcgtcacgctgatcctagaggactacgtccacgcgccgaacgggctgacgaacgtgttcaacgcgtctggcctgctcaagtactggttcccggtgtcgaggatgccgccgagcggccaggactggcctctcgtcagcgacatggtcgcgaccaaccagcgcctcctggtgttcacctccgtcagctccaaacagagcgcggaaggcatcgcttaccagtggaacttcatggtcgagaacaactgtgagacggtgatgacgggatggatgccgggaaatgctcgaaccgtgccgagtctgctcctctcaacgacaacaccaagtcgctggtcctcatgaactacttcccgtcgctccctgtcaagtttacagcgtgcctgcagcactcccagagccttgttgacatggtgagtacgtgctacggcgccgcggggaaccgatgggctaattttgtcgcggttgattactacaagagaagcgacggaggcggggccttccaggccacggacttgctcaatggtagactgttatgcgggtgccaggacatcagggcatgctcgcaaggttccggtgtagtatgttctgcataagtccataacaaatagagatcaatttgattggagtggcgaaagaagacagagagcacagagggattgaaagctgtgagctccttaagccggcgtctacgtctttgtataggacagggatcaccgttgccttggtttgcaagcttaaagataaagaagtctagatttagttgttatattttttttatctttgtctaaaccaaatcagtatatctcttatatttagaaagtacatctaatgttatgtatacagagagaattttgcaagcttaaagataaagaagtctagatttagttgttatatttttttttatctttgtctaaaccaaatcagtatatctcttatatttagaaagtacatctaatgttatgtatacagagagaattttgcaagcttaaagataaagaagtctagatttagttgttatatttttttttatctttgtctaaaccaaatcagtatatctcttatatttagaaagtacatctaatgttatgtatacagagagaat

SEQ ID NO: 83757 - DNA, 1838 bp, Zea Mays
acaccaaccaccttccccatcatcagcaatctctctctctcactctctcacggtcgattgattagtccaaagctggacggagaccttgaggaatccatcccgaactgaacggcattattctttctcgccactgttactgttctctctctctctctccaccttccaacagaattcacaggaaggtggttggggttgggcggaccagcaaaggcacatgggccgctccttcagtagtacagcggcgcctgttcggcctgctgcgctcgcggcgccgcccctcctcctcttcctcttgctcgggctcctgggagctgcggctgccaatgtcggggactcctgctccacgagcgcggactgcggcgccggccagtggtgcttcgactgcgagccccagctctccggctcccactgcgtccgctccgccgccaccaaccccttccagctcataacaactcgttgccgttcaacaagtacgcctacctcacgacgcacaacgcgtacgccatcgtcggggagccctcgcacaccgggatcccgcgcgtcaccttcgacaaccaggaggacacggtcaccgaccagctgaataacggagtccgggcgctgatgctcgacacgtacgacttcaagggagacgtgtggctgtgccattcgagcggagggaaatgcaacgacttcaccgcgttcgaacctgcactggacactttcaaggagatcgaggcgttccttgcagcaaacccgtccgaaatcgtcacgctgatcctagaggactacgtccacgcgccgaacgggctgacgaacgtgttcaacgcgtctggcctgctcaagtactggttcccggtgtcgaggatgccgccgagcggccaggactggcctctcgtcagcgacatggtcgcgaccaaccagcgcctcctggtgttcacctccgtcagctccaaacagagcgcggaaggcatcgcttaccagtggaacttcatggtcgagaacaactacggtgatgacgggatggatgccgggaaatgctcgaaccgtgccgagtctgctcctctcaacgacaacaccaagtcgctggtcctcatgaactacttcccgtcgctccctgtcaagtttacagcgtgcctgcagcactcccagagccttgttgacatggtgagtacgtgctacggcgccgcggggaaccgatgggctaattttgtcgcggttgattactacaagagaagcgacggaggcggggccttccaggccacggacttgctcaatggtagactgttatgcgggtgccaggacatcagggcatgctcgcaaggttccggtgtagtatgttctgcataagtccataacaaatagagatcaatttgattggagtggcgaaagaagacagagagcacagagggattgaaagctgtgagctccttaagccggcgtctacgtctttgtataggacagggatcaccgttgccttggtttgcaagcttaaagataaagaagtctagatttagttgttatattttttttatctttgtctaaaccaaatcagtatatctcttatatttagaaagtacatctaatgttatgtatacagagagaattttgcaagcttaaagataaagaagtctagatttagttgttatatttttttttatctttgtctaaaccaaatcagtatatctcttatatttagaaagtacatctaatgttatgtatacagagagaattttgcaagcttaaagataaagaagtctagatttagttgttatatttttttttatctttgtctaaaccaaatcagtatatctcttatatttagaaagtacatctaatgttatgtatacagagagaat

SEQ ID NO: 83758 - DNA, 763 bp, Zea Mays
gcagttttaaagcttgaacatctgaagagttgctcctggagcagttcagtagtttgatcagattcgtcaaatctcgtccagcggatgagacggctgcaaattccgagaaagccagcattgccgaagttgagccactggtaaaggatttcgcgagccggtataaggccgcgatcgagctgatgcactatgatgtgatcacatctttcagcaactttctttgcgggatggagatcttgagagcgacgctcgcacagctcctgctatactacaccaggctctccgagtgtgtcaagagaatcaacggcggctctgctctcaacaaggaccttgtctccatatcctccatcctgttcgaaatcaagaagtattctaggacgttttagttgtttcacccccttccatgtacactaggacggctagctgaggggtagctgtgtatccttactttgtaactggtatgtgcgactgcaggggaaacaagggcattttgtcgtggtttgtatcttcgtctgtgttacccgacttgacccctgcccctttccagcacagaactatgatctctaggctgtctccacagttatcctattctatcttctgtcctatcatctattttaaacttcattttgtaaacagtatcgattatagtgcaaatctacaattttatacgatccgctgtggataaccatatgctgcatactaatgaatgcgtaccaaacgcttgccttaatgttatttttatgactggcaattttctagtgtttat

SEQ ID NO: 83759 - DNA, 1157 bp, Zea Mays
gttctgaatccattcttagctccttacgttaatatgtcactctggcctcgcttcaagatggtgttcgacttgcatttgaacagcttgcgaaatgcaaatattaaaacactttgggaggatgatgtccatccacactatgttacaaggagatatgctgaatttacagcttctctagttcatctcaatgttgagcatggggacggtcagcttgatctaaatttggagcgattgcggatggccattgaggatttgcttgttaagttggccaagatgttttccaaaccgaagctacaaactgtctttctgataaacaactatgatttaacaatttccattttgaaggaagctggaactgagggtgggaaagcacaacaacacttcgaggaggttcttaagagcaacatcgcaatatatgtggaagagttgctcctggagcagttcagtagtttgatcagattcgtcaaatctcgtccagcggatgagacggctgcaaattccgagaaagccagcattgccgaagttgagccactggtaaaggatttcgcgagccggtataaggccgcgatcgagctgatgcactatgatgtgatcacatctttcagcaactttctttgcgggatggagatcttgagagcgacgctcgcacagctcctgctatactacaccaggctctccgagtgtgtcaagagaatcaacggcggctctgctctcaacaaggaccttgtctccatatcctccatcctgttcgaaatcaagaagtattctaggacgttttagttgtttcacccccttccatgtacactaggacggctagctgaggggtagctgtgtatccttactttgtaactggtatgtgcgactgcaggggaaacaagggcattttgtcgtggtttgtatcttcgtctgtgttacccgacttgacccctgcccctttccagcacagaactatgatctctaggctgtctccacagttatcctattctatcttctgtcctatcatctattttaaacttcattttgtaaacagtatcgattatagtgcaaatctacaattttatacgatccgctgtggataaccatatgctgcatactaatgaatgcgtaccaaacgcttgccttaatgttatttttatgactggcaattttctagtgtttat

SEQ ID NO: 83760 - DNA, 1780 bp, Zea Mays
tagtactacacaattttcaactgtgtaaacatataggtcatttcatctgtttgcggtacacgataaatttccttaaggaacatgctaaggagatatatgcagaagttcgtacggcgtatattgacaccatgaataaggtgctaagtgcacatttccgggcttacatacaagcattggagaaactacagatggacatagcaacttccactgatttgcttggtgttgaaaccagaagcacaggcttcattttctccattggaaaagaacctctgaaaacccgtccttcagtgtttgctctgggtgaacgaataaacattttgaaggaaatcgaccagccagcattgatacctcatatagctgaagcgaagtcacagaaatactcgtatgaagttcttttcagaagcttgcagaaacttcttattgatactgccacttcagaatacctgtttactgatgatttctttggcgaagaatccatattccatgatatatttgcaggaccgattcaagttgttgatgaacatttcaatactgtactcctgaactgttatgatgcaattggcataatgcttatgatcagaataattcatcagcaccagctcatcatgtttaagcggcgaatcccatgtttggactcttacctagacaaagttaatatgtcactctggcctcgcttcaagatggtgttcgacttgcatttgaacagcttgcgaaatgcaaatattaaaacactttgggaggatgatgtccatccacactatgttacaaggagatatgctgaatttacagcttctctagttcatctcaatgttgagcatggggacggtcagcttgatctaaatttggagcgattgcggatggccattgaggatttgcttgttaagttggccaagatgttttccaaaccgaagctacaaactgtctttctgataaacaactatgatttaacaatttccattttgaaggaagctggaactgagggtgggaaagcacaacaacacttcgaggaggttcttaagagcaacatcgcaatatatgtggaagagttgctcctggagcagttcagtagtttgatcagattcgtcaaatctcgtccagcggatgagacggctgcaaattccgagaaagccagcattgccgaagttgagccactggtaaaggatttcgcgagccggtataaggccgcgatcgagctgatgcactatgatgtgatcacatctttcagcaactttctttgcgggatggagatcttgagagcgacgctcgcacagctcctgctatactacaccaggctctccgagtgtgtcaagagaatcaacggcggctctgctctcaacaaggaccttgtctccatatcctccatcctgttcgaaatcaagaagtattctaggacgttttagttgtttcacccccttccatgtacactaggacggctagctgaggggtagctgtgtatccttactttgtaactggtatgtgcgactgcaggggaaacaagggcattttgtcgtggtttgtatcttcgtctgtgttacccgacttgacccctgcccctttccagcacagaactatgatctctaggctgtctccacagttatcctattctatcttctgtcctatcatctattttaaacttcattttgtaaacagtatcgattatagtgcaaatctacaattttatacgatccgctgtggataaccatatgctgcatactaatgaatgcgtaccaaacgcttgccttaatgttatttttatgactggcaattttctagtgtttat

SEQ ID NO: 83761 - DNA, 2729 bp, Zea Mays
ctacatttttatgatgtttggatgagagtcacacggaaataagatacgagcatagactacaggctcaaagttccaattccaacccacccgacgtccgacgacagctggtccgggtctcctccatttcccggggacccgtccgatccgatcccagtcctcaacgccaacggtgggagatctagatcggagctagccagccagccggccgacgctgtccgccggccgccccggcgattctgacccgagatggcggtcgtccctgctgcagagaccctcgacgggctcaaggacaggttcgatctcggggtcttcgtaggcgacctcgccctcgatgaggaagtcaccagtgacgacgagtccctggaggggctgcagcaggagcttgacaactgcaagaatgaccaggaagtcgcaaacattctagccagtggcatcaaactgcgcgagtacacaaaaggcgtcgagaataacatacgccaaatcgagctggattctatccaggattacattaaggaaagtgaaaatctagtttctctgcatgatcaaatttgtgattgtgacaatattttgttacaaatggaaacagttctgactggattccagacagaaattggttccataagttcagagataaaggtccttcaggagaaatctatggacatgggattaaagctgaaaaatcgtaaggctgcagaatctaaattgtcaaaatttgtcgaggatataatagtacctccaagaatgattgacataattgttgatggagaggtcaatgatgaatacatgaaaacacttgagactctaagcaaaaaaatcaaattcatcgatgctgaccccatggttaaatcatccaaggctctaaaagatgttcaacctgaggttgagagactacgacagaaagccgtctcaaagattttcgagtttgtcatccaaaagttctatgccttgagaaaaccaaagactaatattcagattctacagcagagtgttcttcttaaatacaagtacacgataaatttccttaaggaacatgctaaggagatatatgcagaagttcgtacggcgtatattgacaccatgaataaggtgctaagtgcacatttccgggcttacatacaagcattggagaaactacagatggacatagcaacttccactgatttgcttggtgttgaaaccagaagcacaggcttcattttctccattggaaaagaacctctgaaaacccgtccttcagtgtttgctctgggtgaacgaataaacattttgaaggaaatcgaccagccagcattgatacctcatatagctgaagcgaagtcacagaaatactcgtatgaagttcttttcagaagcttgcagaaacttcttattgatactgccacttcagaatacctgtttactgatgatttctttggcgaagaatccatattccatgatatatttgcaggaccgattcaagttgttgatgaacatttcaatactgtactcctgaactgttatgatgcaattggcataatgcttatgatcagaataattcatcagcaccagctcatcatgtttaagcggcgaatcccatgtttggactcttacctagacaaagttaatatgtcactctggcctcgcttcaagatggtgttcgacttgcatttgaacagcttgcgaaatgcaaatattaaaacactttgggaggatgatgtccatccacactatgttacaaggagatatgctgaatttacagcttctctagttcatctcaatgttgagcatggggacggtcagcttgatctaaatttggagcgattgcggatggccattgaggatttgcttgttaagttggccaagatgttttccaaaccgaagctacaaactgtctttctgataaacaactatgatttaacaatttccattttgaaggaagctggaactgagggtgggaaagcacaacaacacttcgaggaggttcttaagagcaacatcgcaatatatgtggaagagttgctcctggagcagttcagtagtttgatcagattcgtcaaatctcgtccagcggatgagacggctgcaaattccgagaaagccagcattgccgaagttgagccactggtaaaggatttcgcgagccggtataaggccgcgatcgagctgatgcactatgatgtgatcacatctttcagcaactttctttgcgggatggagatcttgagagcgacgctcgcacagctcctgctatactacaccaggctctccgagtgtgtcaagagaatcaacggcggctctgctctcaacaaggaccttgtctccatatcctccatcctgttcgaaatcaagaagtattctaggacgttttagttgtttcacccccttccatgtacactaggacggctagctgaggggtagctgtgtatccttactttgtaactggtatgtgcgactgcaggggaaacaagggcattttgtcgtggtttgtatcttcgtctgtgttacccgacttgacccctgcccctttccagcacagaactatgatctctaggctgtctccacagttatcctattctatcttctgtcctatcatctattttaaacttcattttgtaaacagtatcgattatagtgcaaatctacaattttatacgatccgctgtggataaccatatgctgcatactaatgaatgcgtaccaaacgcttgccttaatgttatttttatgactggcaattttctagtgtttat

SEQ ID NO: 83762 - DNA, 2310 bp, Zea Mays
ccattttcgagcgcagaagcgagagagatccggagcagccgcagtcccaccgacctcgccgccggtcgccctccatctcctcgccgctgcctctcggaagtcgcaaacattctagccagtggcatcaaactgcgcgagtacacaaaaggcgtcgagaataacatacgccaaatcgagctggattctatccaggattacattaaggaaagtgaaaatctagtttctctgcatgatcaaatttgtgattgtgacaatattttgttacaaatggaaacagttctgactggattccagaaattggttccataagttcagagataaaggtccttcaggagaaatctatggacatgggattaaagctgaaaaatcgctgcagaatctaaattgtcaaaatttgtcgaggatataatagtacctccaagaatgattgacataattgttgatggagaggtcaatgatgaatacatgaaaacacttgagactctaagcaaaaaaatcaaattcatcgatgctgaccccatggttaaatcatccaaggctctaaaagatgttcaacctgaggttgagagactacgacagaaagccgtctcaaagattttcgagtttgtcatccaaaagttctatgccttgagaaaaccaaagactaatattcagattctacagcagagtgttcttcttaaatacaagtacacgataaatttccttaaggaacatgctaaggagatatatgcagaagttcgtacggcgtatattgacaccatgaataaggtgctaagtgcacatttccgggcttacatacaagcattggagaaactacagatggacatagcaacttccactgatttgcttggtgttgaaaccagaagcacaggcttcattttctccattggaaaagaacctctgaaaacccgtccttcagtgtttgctctgggtgaacgaataaacattttgaaggaaatcgaccagccagcattgatacctcatatagctgaagcgaagtcacagaaatactcgtatgaagttcttttcagaagcttgcagaaacttcttattgatactgccacttcagaatacctgtttactgatgatttctttggcgaagaatccatattccatgatatatttgcagctcatcatgtttaagcggcgaatcccatgtttggactcttacctagacaaagttaatatgtcactctggcctcgcttcaagatggtgttcgacttgcatttgaacagcttgcgaaatgcaaatattaaaacactttgggaggatgatgtccatccacactatgttacaaggagatatgctgaatttacagcttctctagttcatctcaatgttgagcatggggacggtcagcttgatctaaatttggagcgattgcggatggccattgaggatttgcttgttaagttggccaagatgttttccaaaccgaagctacaaactgtctttctgataaacaactatgatttaacaatttccattttgaaggaagctggaactgagggtgggaaagcacaacaacacttcgaggaggttcttaagagcaacatcgcaatatatgtggaagagttgctcctggagcagttcagtagtttgatcagattcgtcaaatctcgtccagcggatgagacggctgcaaattccgagaaagccagcattgccgaagttgagccactggtaaaggatttcgcgagccggtataaggccgcgatcgagctgatgcactatgatgtgatcacatctttcagcaactttctttgcgggatggagatcttgagagcgacgctcgcacagctcctgctatactacaccaggctctccgagtgtgtcaagagaatcaacggcggctctgctctcaacaaggaccttgtctccatatcctccatcctgttcgaaatcaagaagtattctaggacgttttagttgtttcacccccttccatgtacactaggacggctagctgaggggtagctgtgtatccttactttgtaactggtatgtgcgactgcaggggaaacaagggcattttgtcgtggtttgtatcttcgtctgtgttacccgacttgacccctgcccctttccagcacagaactatgatctctaggctgtctccacagttatcctattctatcttctgtcctatcatctattttaaacttcattttgtaaacagtatcgattatagtgcaaatctacaattttatacgatccgctgtggataaccatatgctgcatactaatgaatgcgtaccaaacgcttgccttaatgttatttttatgactggcaattttctagtgtttat

SEQ ID NO: 83763 - DNA, 3486 bp, Zea Mays
ccattttcgagcgcagaagcgagagagatccggagcagccgcagtcccaccgacctcgccgccggtcgccctccatctcctcgccgctgcctctcgatgagggaaggaaggagacaactacatttttatgatgtttggatgagagtcacacggaaataaggtgaacacaagagcaatttttggtggcggcgtgttttccaaaatatcgagtggacgatgccgcccccgcctcatactactttgacatcaaaccaaacacatactaaatcaggctatccaaaaataaagaacaaatatatagggatagagagttattaaatttgaaagggccatttacaaagtatagtgaaaatattttttccttctaataatagccaaatttacttttacaaaatgatttagctagtctcttggagttgctgttaggctgtggctagaataccgtatatagtcatacaaatacaaacaatgacaaaccgtattgtttataaagttggatttgaaatagaagatgagataagtaatactactaaaaataccttagaagagtagcttagaatacgagtgagtttgtttataggtacgtgagaactgtgtctaaactatatttggaaaatatacttaaaattcaatatataaattaaagtaaggcataataatcaagaagaaagacaaaaacaattaaattcagtcaagacaaaaagcaaagaacctggtctgaaatggcaaaatatgttaaccaggcgaaaagcatacaatcatatgggtcgaaagaactaactgggccgtgtggtctgctgttagatacgagcatagactacaggctcaaagttccaattccaacccacccgacgtccgacgacagctggtccgggtctcctccatttcccggggacccgtccgatccgatcccagtcctcaacgccaacggtgggagatctagatcggagctagccagccagccggccgacgctgtccgccggccgccccggcgattctgacccgagatggcggtcgtccctgctgcagagaccctcgacgggctcaaggacaggttcgatctcggggtcttcgtaggcgacctcgccctcgatgaggaagtcaccagtgacgacgagtccctggaggggctgcagcaggagcttgacaactgcaagaatgaccaggaagtcgcaaacattctagccagtggcatcaaactgcgcgagtacacaaaaggcgtcgagaataacatacgccaaatcgagctggattctatccaggattacattaaggaaagtgaaaatctagtttctctgcatgatcaaatttgtgattgtgacaatattttgttacaaatggaaacagttctgactggattccagaaattggttccataagttcagagataaaggtccttcaggagaaatctatggacatgggattaaagctgaaaaatcgtaaggctgcagaatctaaattgtcaaaatttgtcgaggatataatagtacctccaagaatgattgacataattgttgatggagaggtcaatgatgaatacatgaaaacacttgagactctaagcaaaaaaatcaaattcatcgatgctgaccccatggttaaatcatccaaggctctaaaagatgttcaacctgaggttgagagactacgacagaaagccgtctcaaagattttcgagtttgtcatccaaaagttctatgccttgagaaaaccaaagactaatattcagattctacagcagagtgttcttcttaaatacaagtacacgataaatttccttaaggaacatgctaaggagatatatgcagaagttcgtacggcgtatattgacaccatgaataaggtgctaagtgcacatttccgggcttacatacaagcattggagaaactacagatggacatagcaacttccactgatttgcttggtgttgaaaccagaagcacaggcttcattttctccattggaaaagaacctctgaaaacccgtccttcagtgtttgctctgggtgaacgaataaacattttgaaggaaatcgaccagccagcattgatacctcatatagctgaagcgaagtcacagaaatactcgtatgaagttcttttcagaagcttgcagaaacttcttattgatactgccacttcagaatacctgtttactgatgatttctttggcgaagaatccatattccatgatatatttgcaggaccgattcaagttgttgatgaacatttcaatactgtactcctgaactgttatgatgcaattggcataatgcttatgatcagaataattcatcagcaccagctcatcatgtttaagcggcgaatcccatgtttggactcttacctagacaaagttaatatgtcactctggcctcgcttcaagatggtgttcgacttgcatttgaacagcttgcgaaatgcaaatattaaaacactttgggaggatgatgtccatccacactatgttacaaggagatatgctgaatttacagcttctctagttcatctcaatgttgagcatggggacggtcagcttgatctaaatttggagcgattgcggatggccattgaggatttgcttgttaagttggccaagatgttttccaaaccgaagctacaaactgtctttctgataaacaactatgatttaacaatttccattttgaaggaagctggaactgagggtgggaaagcacaacaacacttcgaggaggttcttaagagcaacatcgcaatatatgtggaagagttgctcctggagcagttcagtagtttgatcagattcgtcaaatctcgtccagcggatgagacggctgcaaattccgagaaagccagcattgccgaagttgagccactggtaaaggatttcgcgagccggtataaggccgcgatcgagctgatgcactatgatgtgatcacatctttcagcaactttctttgcgggatggagatcttgagagcgacgctcgcacagctcctgctatactacaccaggctctccgagtgtgtcaagagaatcaacggcggctctgctctcaacaaggaccttgtctccatatcctccatcctgttcgaaatcaagaagtattctaggacgttttagttgtttcacccccttccatgtacactaggacggctagctgaggggtagctgtgtatccttactttgtaactggtatgtgcgactgcaggggaaacaagggcattttgtcgtggtttgtatcttcgtctgtgttacccgacttgacccctgcccctttccagcacagaactatgatctctaggctgtctccacagttatcctattctatcttctgtcctatcatctattttaaacttcattttgtaaacagtatcgattatagtgcaaatctacaattttatacgatccgctgtggataaccatatgctgcatactaatgaatgcgtaccaaacgcttgccttaatgttatttttatgactggcaattttctagtgtttat

SEQ ID NO: 83764 - DNA, 2412 bp, Zea Mays
ccattttcgagcgcagaagcgagagagatccggagcagccgcagtcccaccgacctcgccgccggtcgccctccatctcctcgccgctgcctctcggaagtcgcaaacattctagccagtggcatcaaactgcgcgagtacacaaaaggcgtcgagaataacatacgccaaatcgagctggattctatccaggattacattaaggaaagtgaaaatctagtttctctgcatgatcaaatttgtgattgtgacaatattttgttacaaatggaaacagttctgactggattccagaaattggttccataagttcagagataaaggtccttcaggagaaatctatggacatgggattaaagctgaaaaatcgtaaggctgcagaatctaaattgtcaaaatttgtcgaggatataatagtacctccaagaatgattgacataattgttgatggagaggtcaatgatgaatacatgaaaacacttgagactctaagcaaaaaaatcaaattcatcgatgctgaccccatggttaaatcatccaaggctctaaaagatgttcaacctgaggttgagagactacgacagaaagccgtctcaaagattttcgagtttgtcatccaaaagttctatgccttgagaaaaccaaagactaatattcagattctacagcagagtgttcttcttaaatacaagtacacgataaatttccttaaggaacatgctaaggagatatatgcagaagttcgtacggcgtatattgacaccatgaataaggtgctaagtgcacatttccgggcttacatacaagcattggagaaactacagatggacatagcaacttccactgatttgcttggtgttgaaaccagaagcacaggcttcattttctccattggaaaagaacctctgaaaacccgtccttcagtgtttgctctgggtgaacgaataaacattttgaaggaaatcgaccagccagcattgatacctcatatagctgaagcgaagtcacagaaatactcgtatgaagttcttttcagaagcttgcagaaacttcttattgatactgccacttcagaatacctgtttactgatgatttctttggcgaagaatccatattccatgatatatttgcaggaccgattcaagttgttgatgaacatttcaatactgtactcctgaactgttatgatgcaattggcataatgcttatgatcagaataattcatcagcaccagctcatcatgtttaagcggcgaatcccatgtttggactcttacctagacaaagttaatatgtcactctggcctcgcttcaagatggtgttcgacttgcatttgaacagcttgcgaaatgcaaatattaaaacactttgggaggatgatgtccatccacactatgttacaaggagatatgctgaatttacagcttctctagttcatctcaatgttgagcatggggacggtcagcttgatctaaatttggagcgattgcggatggccattgaggatttgcttgttaagttggccaagatgttttccaaaccgaagctacaaactgtctttctgataaacaactatgatttaacaatttccattttgaagctggaactgagggtgggaaagcacaacaacacttcgaggaggttcttaagagcaacatcgcaatatatgtggaagagttgctcctggagcagttcagtagtttgatcagattcgtcaaatctcgtccagcggatgagacggctgcaaattccgagaaagccagcattgccgaagttgagccactggtaaaggatttcgcgagccggtataaggccgcgatcgagctgatgcactatgatgtgatcacatctttcagcaactttctttgcgggatggagatcttgagagcgacgctcgcacagctcctgctatactacaccaggctctccgagtgtgtcaagagaatcaacggcggctctgctctcaacaaggaccttgtctccatatcctccatcctgttcgaaatcaagaagtattctaggacgttttagttgtttcacccccttccatgtacactaggacggctagctgaggggtagctgtgtatccttactttgtaactggtatgtgcgactgcaggggaaacaagggcattttgtcgtggtttgtatcttcgtctgtgttacccgacttgacccctgcccctttccagcacagaactatgatctctaggctgtctccacagttatcctattctatcttctgtcctatcatctattttaaacttcattttgtaaacagtatcgattatagtgcaaatctacaattttatacgatccgctgtggataaccatatgctgcatactaatgaatgcgtaccaaacgcttgccttaatgttatttttatgactggcaattttctagtgtttat

SEQ ID NO: 83765 - DNA, 2778 bp, Zea Mays
ccattttcgagcgcagaagcgagagagatccggagcagccgcagtcccaccgacctcgccgccggtcgccctccatctcctcgccgctgcctctcgatacgagcatagactacaggctcaaagttccaattccaacccacccgacgtccgacgacagctggtccgggtctcctccatttcccggggacccgtccgatccgatcccagtcctcaacgccaacggtgggagatctagatcggagctagccagccagccggccgacgctgtccgccggccgccccggcgattctgacccgagatggcggtcgtccctgctgcagagaccctcgacgggctcaaggacaggttcgatctcggggtcttcgtaggcgacctcgccctcgatgaggaagtcaccagtgacgacgagtccctggaggggctgcagcaggagcttgacaactgcaagaatgaccaggaagtcgcaaacattctagccagtggcatcaaactgcgcgagtacacaaaaggcgtcgagaataacatacgccaaatcgagctggattctatccaggattacattaaggaaagtgaaaatctagtttctctgcatgatcaaatttgtgattgtgacaatattttgttacaaatggaaacagttctgactggattccagaaattggttccataagttcagagataaaggtccttcaggagaaatctatggacatgggattaaagctgaaaaatcgtaaggctgcagaatctaaattgtcaaaatttgtcgaggatataatagtacctccaagaatgattgacataattgttgatggagaggtcaatgatgaatacatgaaaacacttgagactctaagcaaaaaaatcaaattcatcgatgctgaccccatggttaaatcatccaaggctctaaaagatgttcaacctgaggttgagagactacgacagaaagccgtctcaaagattttcgagtttgtcatccaaaagttctatgccttgagaaaaccaaagactaatattcagattctacagcagagtgttcttcttaaatacaagtacacgataaatttccttaaggaacatgctaaggagatatatgcagaagttcgtacggcgtatattgacaccatgaataaggtgctaagtgcacatttccgggcttacatacaagcattggagaaactacagatggacatagcaacttccactgatttgcttggtgttgaaaccagaagcacaggcttcattttctccattggaaaagaacctctgaaaacccgtccttcagtgtttgctctgggtgaacgaataaacattttgaaggaaatcgaccagccagcattgatacctcatatagctgaagcgaagtcacagaaatactcgtatgaagttcttttcagaagcttgcagaaacttcttattgatactgccacttcagaatacctgtttactgatgatttctttggcgaagaatccatattccatgatatatttgcaggaccgattcaagttgttgatgaacatttcaatactgtactcctgaactgttatgatgcaattggcataatgcttatgatcagaataattcatcagcaccagctcatcatgtttaagcggcgaatcccatgtttggactcttacctagacaaagttaatatgtcactctggcctcgcttcaagatggtgttcgacttgcatttgaacagcttgcgaaatgcaaatattaaaacactttgggaggatgatgtccatccacactatgttacaaggagatatgctgaatttacagcttctctagttcatctcaatgttgagcatggggacggtcagcttgatctaaatttggagcgattgcggatggccattgaggatttgcttgttaagttggccaagatgttttccaaaccgaagctacaaactgtctttctgataaacaactatgatttaacaatttccattttgaaggaagctggaactgagggtgggaaagcacaacaacacttcgaggaggttcttaagagcaacatcgcaatatatgtggaagagttgctcctggagcagttcagtagtttgatcagattcgtcaaatctcgtccagcggatgagacggctgcaaattccgagaaagccagcattgccgaagttgagccactggtaaaggatttcgcgagccggtataaggccgcgatcgagctgatgcactatgatgtgatcacatctttcagcaactttctttgcgggatggagatcttgagagcgacgctcgcacagctcctgctatactacaccaggctctccgagtgtgtcaagagaatcaacggcggctctgctctcaacaaggaccttgtctccatatcctccatcctgttcgaaatcaagaagtattctaggacgttttagttgtttcacccccttccatgtacactaggacggctagctgaggggtagctgtgtatccttactttgtaactggtatgtgcgactgcaggggaaacaagggcattttgtcgtggtttgtatcttcgtctgtgttacccgacttgacccctgcccctttccagcacagaactatgatctctaggctgtctccacagttatcctattctatcttctgtcctatcatctattttaaacttcattttgtaaacagtatcgattatagtgcaaatctacaattttatacgatccgctgtggataaccatatgctgcatactaatgaatgcgtaccaaacgcttgccttaatgttatttttatgactggcaattttctagtgtttat

SEQ ID NO: 83766 - DNA, 2557 bp, Zea Mays
ccattttcgagcgcagaagcgagagagatccggagcagccgcagtcccaccgacctcgccgccggtcgccctccatctcctcgccgctgcctctcgagaccctcgacgggctcaaggacaggttcgatctcggggtcttcgtaggcgacctcgccctcgatgaggaagtcaccagtgacgacgagtccctggaggggctgcagcaggagcttgacaactgcaagaatgaccaggaagtcgcaaacattctagccagtggcatcaaactgcgcgagtacacaaaaggcgtcgagaataacatacgccaaatcgagctggattctatccaggattacattaaggaaagtgaaaatctagtttctctgcatgatcaaatttgtgattgtgacaatattttgttacaaatggaaacagttctgactggattccagacagaaattggttccataagttcagagataaaggtccttcaggagaaatctatggacatgggattaaagctgaaaaatcgtaaggctgcagaatctaaattgtcaaaatttgtcgaggatataatagtacctccaagaatgattgacataattgttgatggagaggtcaatgatgaatacatgaaaacacttgagactctaagcaaaaaaatcaaattcatcgatgctgaccccatggttaaatcatccaaggctctaaaagatgttcaacctgaggttgagagactacgacagaaagccgtctcaaagattttcgagtttgtcatccaaaagttctatgccttgagaaaaccaaagactaatattcagattctacagcagagtgttcttcttaaatacaagtacacgataaatttccttaaggaacatgctaaggagatatatgcagaagttcgtacggcgtatattgacaccatgaataaggtgctaagtgcacatttccgggcttacatacaagcattggagaaactacagatggacatagcaacttccactgatttgcttggtgttgaaaccagaagcacaggcttcattttctccattggaaaagaacctctgaaaacccgtccttcagtgtttgctctgggtgaacgaataaacattttgaaggaaatcgaccagccagcattgatacctcatatagctgaagcgaagtcacagaaatactcgtatgaagttcttttcagaagcttgcagaaacttcttattgatactgccacttcagaatacctgtttactgatgatttctttggcgaagaatccatattccatgatatatttgcaggaccgattcaagttgttgatgaacatttcaatactgtactcctgaactgttatgatgcaattggcataatgcttatgatcagaataattcatcagcaccagctcatcatgtttaagcggcgaatcccatgtttggactcttacctagacaaagttaatatgtcactctggcctcgcttcaagatggtgttcgacttgcatttgaacagcttgcgaaatgcaaatattaaaacactttgggaggatgatgtccatccacactatgttacaaggagatatgctgaatttacagcttctctagttcatctcaatgttgagcatggggacggtcagcttgatctaaatttggagcgattgcggatggccattgaggatttgcttgttaagttggccaagatgttttccaaaccgaagctacaaactgtctttctgataaacaactatgatttaacaatttccattttgaaggaagctggaactgagggtgggaaagcacaacaacacttcgaggaggttcttaagagcaacatcgcaatatatgtggaagagttgctcctggagcagttcagtagtttgatcagattcgtcaaatctcgtccagcggatgagacggctgcaaattccgagaaagccagcattgccgaagttgagccactggtaaaggatttcgcgagccggtataaggccgcgatcgagctgatgcactatgatgtgatcacatctttcagcaactttctttgcgggatggagatcttgagagcgacgctcgcacagctcctgctatactacaccaggctctccgagtgtgtcaagagaatcaacggcggctctgctctcaacaaggaccttgtctccatatcctccatcctgttcgaaatcaagaagtattctaggacgttttagttgtttcacccccttccatgtacactaggacggctagctgaggggtagctgtgtatccttactttgtaactggtatgtgcgactgcaggggaaacaagggcattttgtcgtggtttgtatcttcgtctgtgttacccgacttgacccctgcccctttccagcacagaactatgatctctaggctgtctccacagttatcctattctatcttctgtcctatcatctattttaaacttcattttgtaaacagtatcgattatagtgcaaatctacaattttatacgatccgctgtggataaccatatgctgcatactaatgaatgcgtaccaaacgcttgccttaatgttatttttatgactggcaattttctagtgtttat

SEQ ID NO: 83767 - DNA, 2411 bp, Zea Mays
ccattttcgagcgcagaagcgagagagatccggagcagccgcagtcccaccgacctcgccgccggtcgccctccatctcctcgccgctgcctctcggaagtcgcaaacattctagccagtggcatcaaactgcgcgagtacacaaaaggcgtcgagaataacatacgccaaatcgagctggattctatccaggattacattaaggaaagtgaaaatctagtttctctgcatgatcaaatttgtgattgtgacaatattttgttacaaatggaaacagttctgactggattccagaaattggttccataagttcagagataaaggtccttcaggagaaatctatggacatgggattaaagctgaaaaatcgctgcagaatctaaattgtcaaaatttgtcgaggatataatagtacctccaagaatgattgacataattgttgatggagaggtcaatgatgaatacatgaaaacacttgagactctaagcaaaaaaatcaaattcatcgatgctgaccccatggttaaatcatccaaggctctaaaagatgttcaacctgaggttgagagactacgacagaaagccgtctcaaagattttcgagtttgtcatccaaaagttctatgccttgagaaaaccaaagactaatattcagattctacagcagagtgttcttcttaaatacaagtacacgataaatttccttaaggaacatgctaaggagatatatgcagaagttcgtacggcgtatattgacaccatgaataaggtgctaagtgcacatttccgggcttacatacaagcattggagaaactacagatggacatagcaacttccactgatttgcttggtgttgaaaccagaagcacaggcttcattttctccattggaaaagaacctctgaaaacccgtccttcagtgtttgctctgggtgaacgaataaacattttgaaggaaatcgaccagccagcattgatacctcatatagctgaagcgaagtcacagaaatactcgtatgaagttcttttcagaagcttgcagaaacttcttattgatactgccacttcagaatacctgtttactgatgatttctttggcgaagaatccatattccatgatatatttgcaggaccgattcaagttgttgatgaacatttcaatactgtactcctgaactgttatgatgcaattggcataatgcttatgatcagaataattcatcagcaccagctcatcatgtttaagcggcgaatcccatgtttggactcttacctagacaaagttaatatgtcactctggcctcgcttcaagatggtgttcgacttgcatttgaacagcttgcgaaatgcaaatattaaaacactttgggaggatgatgtccatccacactatgttacaaggagatatgctgaatttacagcttctctagttcatctcaatgttgagcatggggacggtcagcttgatctaaatttggagcgattgcggatggccattgaggatttgcttgttaagttggccaagatgttttccaaaccgaagctacaaactgtctttctgataaacaactatgatttaacaatttccattttgaaggaagctggaactgagggtgggaaagcacaacaacacttcgaggaggttcttaagagcaacatcgcaatatatgtggaagagttgctcctggagcagttcagtagtttgatcagattcgtcaaatctcgtccagcggatgagacggctgcaaattccgagaaagccagcattgccgaagttgagccactggtaaaggatttcgcgagccggtataaggccgcgatcgagctgatgcactatgatgtgatcacatctttcagcaactttctttgcgggatggagatcttgagagcgacgctcgcacagctcctgctatactacaccaggctctccgagtgtgtcaagagaatcaacggcggctctgctctcaacaaggaccttgtctccatatcctccatcctgttcgaaatcaagaagtattctaggacgttttagttgtttcacccccttccatgtacactaggacggctagctgaggggtagctgtgtatccttactttgtaactggtatgtgcgactgcaggggaaacaagggcattttgtcgtggtttgtatcttcgtctgtgttacccgacttgacccctgcccctttccagcacagaactatgatctctaggctgtctccacagttatcctattctatcttctgtcctatcatctattttaaacttcattttgtaaacagtatcgattatagtgcaaatctacaattttatacgatccgctgtggataaccatatgctgcatactaatgaatgcgtaccaaacgcttgccttaatgttatttttatgactggcaattttctagtgtttat

SEQ ID NO: 83768 - DNA, 2843 bp, Zea Mays
ccattttcgagcgcagaagcgagagagatccggagcagccgcagtcccaccgacctcgccgccggtcgccctccatctcctcgccgctgcctctcggcgaaaagcatacaatcatatgggtcgaaagaactaactgggccgtgtggtctgctgttagatacgagcatagactacaggctcaaagttccaattccaacccacccgacgtccgacgacagctggtccgggtctcctccatttcccggggacccgtccgatccgatcccagtcctcaacgccaacggtgggagatctagatcggagctagccagccagccggccgacgctgtccgccggccgccccggcgattctgacccgagatggcggtcgtccctgctgcagagaccctcgacgggctcaaggacaggttcgatctcggggtcttcgtaggcgacctcgccctcgatgaggaagtcaccagtgacgacgagtccctggaggggctgcagcaggagcttgacaactgcaagaatgaccaggaagtcgcaaacattctagccagtggcatcaaactgcgcgagtacacaaaaggcgtcgagaataacatacgccaaatcgagctggattctatccaggattacattaaggaaagtgaaaatctagtttctctgcatgatcaaatttgtgattgtgacaatattttgttacaaatggaaacagttctgactggattccagacagaaattggttccataagttcagagataaaggtccttcaggagaaatctatggacatgggattaaagctgaaaaatcgtaaggctgcagaatctaaattgtcaaaatttgtcgaggatataatagtacctccaagaatgattgacataattgttgatggagaggtcaatgatgaatacatgaaaacacttgagactctaagcaaaaaaatcaaattcatcgatgctgaccccatggttaaatcatccaaggctctaaaagatgttcaacctgaggttgagagactacgacagaaagccgtctcaaagattttcgagtttgtcatccaaaagttctatgccttgagaaaaccaaagactaatattcagattctacagcagagtgttcttcttaaatacaagtacacgataaatttccttaaggaacatgctaaggagatatatgcagaagttcgtacggcgtatattgacaccatgaataaggtgctaagtgcacatttccgggcttacatacaagcattggagaaactacagatggacatagcaacttccactgatttgcttggtgttgaaaccagaagcacaggcttcattttctccattggaaaagaacctctgaaaacccgtccttcagtgtttgctctgggtgaacgaataaacattttgaaggaaatcgaccagccagcattgatacctcatatagctgaagcgaagtcacagaaatactcgtatgaagttcttttcagaagcttgcagaaacttcttattgatactgccacttcagaatacctgtttactgatgatttctttggcgaagaatccatattccatgatatatttgcaggaccgattcaagttgttgatgaacatttcaatactgtactcctgaactgttatgatgcaattggcataatgcttatgatcagaataattcatcagcaccagctcatcatgtttaagcggcgaatcccatgtttggactcttacctagacaaagttaatatgtcactctggcctcgcttcaagatggtgttcgacttgcatttgaacagcttgcgaaatgcaaatattaaaacactttgggaggatgatgtccatccacactatgttacaaggagatatgctgaatttacagcttctctagttcatctcaatgttgagcatggggacggtcagcttgatctaaatttggagcgattgcggatggccattgaggatttgcttgttaagttggccaagatgttttccaaaccgaagctacaaactgtctttctgataaacaactatgatttaacaatttccattttgaaggaagctggaactgagggtgggaaagcacaacaacacttcgaggaggttcttaagagcaacatcgcaatatatgtggaagagttgctcctggagcagttcagtagtttgatcagattcgtcaaatctcgtccagcggatgagacggctgcaaattccgagaaagccagcattgccgaagttgagccactggtaaaggatttcgcgagccggtataaggccgcgatcgagctgatgcactatgatgtgatcacatctttcagcaactttctttgcgggatggagatcttgagagcgacgctcgcacagctcctgctatactacaccaggctctccgagtgtgtcaagagaatcaacggcggctctgctctcaacaaggaccttgtctccatatcctccatcctgttcgaaatcaagaagtattctaggacgttttagttgtttcacccccttccatgtacactaggacggctagctgaggggtagctgtgtatccttactttgtaactggtatgtgcgactgcaggggaaacaagggcattttgtcgtggtttgtatcttcgtctgtgttacccgacttgacccctgcccctttccagcacagaactatgatctctaggctgtctccacagttatcctattctatcttctgtcctatcatctattttaaacttcattttgtaaacagtatcgattatagtgcaaatctacaattttatacgatccgctgtggataaccatatgctgcatactaatgaatgcgtaccaaacgcttgccttaatgttatttttatgactggcaattttctagtgtttat

SEQ ID NO: 83769 - DNA, 3490 bp, Zea Mays
ccattttcgagcgcagaagcgagagagatccggagcagccgcagtcccaccgacctcgccgccggtcgccctccatctcctcgccgctgcctctcgatgagggaaggaaggagacaactacatttttatgatgtttggatgagagtcacacggaaataaggtgaacacaagagcaatttttggtggcggcgtgttttccaaaatatcgagtggacgatgccgcccccgcctcatactactttgacatcaaaccaaacacatactaaatcaggctatccaaaaataaagaacaaatatatagggatagagagttattaaatttgaaagggccatttacaaagtatagtgaaaatattttttccttctaataatagccaaatttacttttacaaaatgatttagctagtctcttggagttgctgttaggctgtggctagaataccgtatatagtcatacaaatacaaacaatgacaaaccgtattgtttataaagttggatttgaaatagaagatgagataagtaatactactaaaaataccttagaagagtagcttagaatacgagtgagtttgtttataggtacgtgagaactgtgtctaaactatatttggaaaatatacttaaaattcaatatataaattaaagtaaggcataataatcaagaagaaagacaaaaacaattaaattcagtcaagacaaaaagcaaagaacctggtctgaaatggcaaaatatgttaaccaggcgaaaagcatacaatcatatgggtcgaaagaactaactgggccgtgtggtctgctgttagatacgagcatagactacaggctcaaagttccaattccaacccacccgacgtccgacgacagctggtccgggtctcctccatttcccggggacccgtccgatccgatcccagtcctcaacgccaacggtgggagatctagatcggagctagccagccagccggccgacgctgtccgccggccgccccggcgattctgacccgagatggcggtcgtccctgctgcagagaccctcgacgggctcaaggacaggttcgatctcggggtcttcgtaggcgacctcgccctcgatgaggaagtcaccagtgacgacgagtccctggaggggctgcagcaggagcttgacaactgcaagaatgaccaggaagtcgcaaacattctagccagtggcatcaaactgcgcgagtacacaaaaggcgtcgagaataacatacgccaaatcgagctggattctatccaggattacattaaggaaagtgaaaatctagtttctctgcatgatcaaatttgtgattgtgacaatattttgttacaaatggaaacagttctgactggattccagacagaaattggttccataagttcagagataaaggtccttcaggagaaatctatggacatgggattaaagctgaaaaatcgtaaggctgcagaatctaaattgtcaaaatttgtcgaggatataatagtacctccaagaatgattgacataattgttgatggagaggtcaatgatgaatacatgaaaacacttgagactctaagcaaaaaaatcaaattcatcgatgctgaccccatggttaaatcatccaaggctctaaaagatgttcaacctgaggttgagagactacgacagaaagccgtctcaaagattttcgagtttgtcatccaaaagttctatgccttgagaaaaccaaagactaatattcagattctacagcagagtgttcttcttaaatacaagtacacgataaatttccttaaggaacatgctaaggagatatatgcagaagttcgtacggcgtatattgacaccatgaataaggtgctaagtgcacatttccgggcttacatacaagcattggagaaactacagatggacatagcaacttccactgatttgcttggtgttgaaaccagaagcacaggcttcattttctccattggaaaagaacctctgaaaacccgtccttcagtgtttgctctgggtgaacgaataaacattttgaaggaaatcgaccagccagcattgatacctcatatagctgaagcgaagtcacagaaatactcgtatgaagttcttttcagaagcttgcagaaacttcttattgatactgccacttcagaatacctgtttactgatgatttctttggcgaagaatccatattccatgatatatttgcaggaccgattcaagttgttgatgaacatttcaatactgtactcctgaactgttatgatgcaattggcataatgcttatgatcagaataattcatcagcaccagctcatcatgtttaagcggcgaatcccatgtttggactcttacctagacaaagttaatatgtcactctggcctcgcttcaagatggtgttcgacttgcatttgaacagcttgcgaaatgcaaatattaaaacactttgggaggatgatgtccatccacactatgttacaaggagatatgctgaatttacagcttctctagttcatctcaatgttgagcatggggacggtcagcttgatctaaatttggagcgattgcggatggccattgaggatttgcttgttaagttggccaagatgttttccaaaccgaagctacaaactgtctttctgataaacaactatgatttaacaatttccattttgaaggaagctggaactgagggtgggaaagcacaacaacacttcgaggaggttcttaagagcaacatcgcaatatatgtggaagagttgctcctggagcagttcagtagtttgatcagattcgtcaaatctcgtccagcggatgagacggctgcaaattccgagaaagccagcattgccgaagttgagccactggtaaaggatttcgcgagccggtataaggccgcgatcgagctgatgcactatgatgtgatcacatctttcagcaactttctttgcgggatggagatcttgagagcgacgctcgcacagctcctgctatactacaccaggctctccgagtgtgtcaagagaatcaacggcggctctgctctcaacaaggaccttgtctccatatcctccatcctgttcgaaatcaagaagtattctaggacgttttagttgtttcacccccttccatgtacactaggacggctagctgaggggtagctgtgtatccttactttgtaactggtatgtgcgactgcaggggaaacaagggcattttgtcgtggtttgtatcttcgtctgtgttacccgacttgacccctgcccctttccagcacagaactatgatctctaggctgtctccacagttatcctattctatcttctgtcctatcatctattttaaacttcattttgtaaacagtatcgattatagtgcaaatctacaattttatacgatccgctgtggataaccatatgctgcatactaatgaatgcgtaccaaacgcttgccttaatgttatttttatgactggcaattttctagtgtttat

SEQ ID NO: 83770 - DNA, 2839 bp, Zea Mays
ccattttcgagcgcagaagcgagagagatccggagcagccgcagtcccaccgacctcgccgccggtcgccctccatctcctcgccgctgcctctcggcgaaaagcatacaatcatatgggtcgaaagaactaactgggccgtgtggtctgctgttagatacgagcatagactacaggctcaaagttccaattccaacccacccgacgtccgacgacagctggtccgggtctcctccatttcccggggacccgtccgatccgatcccagtcctcaacgccaacggtgggagatctagatcggagctagccagccagccggccgacgctgtccgccggccgccccggcgattctgacccgagatggcggtcgtccctgctgcagagaccctcgacgggctcaaggacaggttcgatctcggggtcttcgtaggcgacctcgccctcgatgaggaagtcaccagtgacgacgagtccctggaggggctgcagcaggagcttgacaactgcaagaatgaccaggaagtcgcaaacattctagccagtggcatcaaactgcgcgagtacacaaaaggcgtcgagaataacatacgccaaatcgagctggattctatccaggattacattaaggaaagtgaaaatctagtttctctgcatgatcaaatttgtgattgtgacaatattttgttacaaatggaaacagttctgactggattccagaaattggttccataagttcagagataaaggtccttcaggagaaatctatggacatgggattaaagctgaaaaatcgtaaggctgcagaatctaaattgtcaaaatttgtcgaggatataatagtacctccaagaatgattgacataattgttgatggagaggtcaatgatgaatacatgaaaacacttgagactctaagcaaaaaaatcaaattcatcgatgctgaccccatggttaaatcatccaaggctctaaaagatgttcaacctgaggttgagagactacgacagaaagccgtctcaaagattttcgagtttgtcatccaaaagttctatgccttgagaaaaccaaagactaatattcagattctacagcagagtgttcttcttaaatacaagtacacgataaatttccttaaggaacatgctaaggagatatatgcagaagttcgtacggcgtatattgacaccatgaataaggtgctaagtgcacatttccgggcttacatacaagcattggagaaactacagatggacatagcaacttccactgatttgcttggtgttgaaaccagaagcacaggcttcattttctccattggaaaagaacctctgaaaacccgtccttcagtgtttgctctgggtgaacgaataaacattttgaaggaaatcgaccagccagcattgatacctcatatagctgaagcgaagtcacagaaatactcgtatgaagttcttttcagaagcttgcagaaacttcttattgatactgccacttcagaatacctgtttactgatgatttctttggcgaagaatccatattccatgatatatttgcaggaccgattcaagttgttgatgaacatttcaatactgtactcctgaactgttatgatgcaattggcataatgcttatgatcagaataattcatcagcaccagctcatcatgtttaagcggcgaatcccatgtttggactcttacctagacaaagttaatatgtcactctggcctcgcttcaagatggtgttcgacttgcatttgaacagcttgcgaaatgcaaatattaaaacactttgggaggatgatgtccatccacactatgttacaaggagatatgctgaatttacagcttctctagttcatctcaatgttgagcatggggacggtcagcttgatctaaatttggagcgattgcggatggccattgaggatttgcttgttaagttggccaagatgttttccaaaccgaagctacaaactgtctttctgataaacaactatgatttaacaatttccattttgaaggaagctggaactgagggtgggaaagcacaacaacacttcgaggaggttcttaagagcaacatcgcaatatatgtggaagagttgctcctggagcagttcagtagtttgatcagattcgtcaaatctcgtccagcggatgagacggctgcaaattccgagaaagccagcattgccgaagttgagccactggtaaaggatttcgcgagccggtataaggccgcgatcgagctgatgcactatgatgtgatcacatctttcagcaactttctttgcgggatggagatcttgagagcgacgctcgcacagctcctgctatactacaccaggctctccgagtgtgtcaagagaatcaacggcggctctgctctcaacaaggaccttgtctccatatcctccatcctgttcgaaatcaagaagtattctaggacgttttagttgtttcacccccttccatgtacactaggacggctagctgaggggtagctgtgtatccttactttgtaactggtatgtgcgactgcaggggaaacaagggcattttgtcgtggtttgtatcttcgtctgtgttacccgacttgacccctgcccctttccagcacagaactatgatctctaggctgtctccacagttatcctattctatcttctgtcctatcatctattttaaacttcattttgtaaacagtatcgattatagtgcaaatctacaattttatacgatccgctgtggataaccatatgctgcatactaatgaatgcgtaccaaacgcttgccttaatgttatttttatgactggcaattttctagtgtttat

SEQ ID NO: 83771 - DNA, 2553 bp, Zea Mays
ccattttcgagcgcagaagcgagagagatccggagcagccgcagtcccaccgacctcgccgccggtcgccctccatctcctcgccgctgcctctcgagaccctcgacgggctcaaggacaggttcgatctcggggtcttcgtaggcgacctcgccctcgatgaggaagtcaccagtgacgacgagtccctggaggggctgcagcaggagcttgacaactgcaagaatgaccaggaagtcgcaaacattctagccagtggcatcaaactgcgcgagtacacaaaaggcgtcgagaataacatacgccaaatcgagctggattctatccaggattacattaaggaaagtgaaaatctagtttctctgcatgatcaaatttgtgattgtgacaatattttgttacaaatggaaacagttctgactggattccagaaattggttccataagttcagagataaaggtccttcaggagaaatctatggacatgggattaaagctgaaaaatcgtaaggctgcagaatctaaattgtcaaaatttgtcgaggatataatagtacctccaagaatgattgacataattgttgatggagaggtcaatgatgaatacatgaaaacacttgagactctaagcaaaaaaatcaaattcatcgatgctgaccccatggttaaatcatccaaggctctaaaagatgttcaacctgaggttgagagactacgacagaaagccgtctcaaagattttcgagtttgtcatccaaaagttctatgccttgagaaaaccaaagactaatattcagattctacagcagagtgttcttcttaaatacaagtacacgataaatttccttaaggaacatgctaaggagatatatgcagaagttcgtacggcgtatattgacaccatgaataaggtgctaagtgcacatttccgggcttacatacaagcattggagaaactacagatggacatagcaacttccactgatttgcttggtgttgaaaccagaagcacaggcttcattttctccattggaaaagaacctctgaaaacccgtccttcagtgtttgctctgggtgaacgaataaacattttgaaggaaatcgaccagccagcattgatacctcatatagctgaagcgaagtcacagaaatactcgtatgaagttcttttcagaagcttgcagaaacttcttattgatactgccacttcagaatacctgtttactgatgatttctttggcgaagaatccatattccatgatatatttgcaggaccgattcaagttgttgatgaacatttcaatactgtactcctgaactgttatgatgcaattggcataatgcttatgatcagaataattcatcagcaccagctcatcatgtttaagcggcgaatcccatgtttggactcttacctagacaaagttaatatgtcactctggcctcgcttcaagatggtgttcgacttgcatttgaacagcttgcgaaatgcaaatattaaaacactttgggaggatgatgtccatccacactatgttacaaggagatatgctgaatttacagcttctctagttcatctcaatgttgagcatggggacggtcagcttgatctaaatttggagcgattgcggatggccattgaggatttgcttgttaagttggccaagatgttttccaaaccgaagctacaaactgtctttctgataaacaactatgatttaacaatttccattttgaaggaagctggaactgagggtgggaaagcacaacaacacttcgaggaggttcttaagagcaacatcgcaatatatgtggaagagttgctcctggagcagttcagtagtttgatcagattcgtcaaatctcgtccagcggatgagacggctgcaaattccgagaaagccagcattgccgaagttgagccactggtaaaggatttcgcgagccggtataaggccgcgatcgagctgatgcactatgatgtgatcacatctttcagcaactttctttgcgggatggagatcttgagagcgacgctcgcacagctcctgctatactacaccaggctctccgagtgtgtcaagagaatcaacggcggctctgctctcaacaaggaccttgtctccatatcctccatcctgttcgaaatcaagaagtattctaggacgttttagttgtttcacccccttccatgtacactaggacggctagctgaggggtagctgtgtatccttactttgtaactggtatgtgcgactgcaggggaaacaagggcattttgtcgtggtttgtatcttcgtctgtgttacccgacttgacccctgcccctttccagcacagaactatgatctctaggctgtctccacagttatcctattctatcttctgtcctatcatctattttaaacttcattttgtaaacagtatcgattatagtgcaaatctacaattttatacgatccgctgtggataaccatatgctgcatactaatgaatgcgtaccaaacgcttgccttaatgttatttttatgactggcaattttctagtgtttat

SEQ ID NO: 83772 - DNA, 4753 bp, Zea Mays
ccattttcgagcgcagaagcgagagagatccggagcagccgcagtcccaccgacctcgccgccggtcgccctccatctcctcgccgctgcctctcgggtatcccctccctagggaccgtgaatgcgtctgttgcggctgtacgcattagattcttcggagtatgttgcggcttagattctccagagaaagatgaagatctgttgtgcattgcggtcttcggtggttgatccgtcgatttttttcgtttcatgttgtgtctaggttagacctaattgtttaggtaacctcgtatcactggatgcgcatctccccagtgttagtctcaaagatactaacttacagagtgacttttctctaaaagtgtgcatacaagttttgaatacttgtatgagacatgtacttggaacttttaatttcaggatacaacttataggataatatcacatgagtgtgagcattactcataggtgatatttaggagcaagtcatctatattttaaactttgacatgtattaaattgaatgataccaattgataatatgaaatacctcttgaataatgttaataccatttgttagaaaactagaagagctatatgccaggcttctagagaattttaagatcatgtaggtttgctctgtatgagtgaaaacaagtaattctacatacggtatatccaaagtgtatgtctgcgaaaaatataaactgatcatgctagaagcctagaacatatgggtatgcgtggttcaatatttttaccagcttttctgagaatctggttgtggaaataatctaaatatcgtggggattacatgcggaggaagataaagcggtgcaaagggttcaggatctagaaaccgacgagtctaagtttcttcactttctaaatcctaaatcctgtggatgttttcatcttcctccgcatataagcctcatgatatccagattctccgcataaccatattcttcgggaatccagattctcaggaaaacttgttcgaaaaaatgaaccaaatgtggcctctgtcttatccatattctcgaggaatctagattctcaaaaaaaaaaaaacttacaaacatgccctctgtctcatgttcgcgtcctataattgtaatcggcgaggaaaaataacactaggattcaatgacacaaggcgacatgcctgttcacctcgaggttcccattactttgagatgtgtcggattagactttttaggcgattagcaaaaaaatagctaaattgattaatttagttattctctaaatgttttttaaaaagagtagattagttcaacatgctcgataaattcagaactctgtatgaaaagtaaaagtgtgtttggttggatgtagatgagggaaggaaggagacaactacatttttatgatgtttggatgagagtcacacggaaataaggtgaacacaagagcaatttttggtggcggcgtgttttccaaaatatcgagtggacgatgccgcccccgcctcatactactttgacatcaaaccaaacacatactaaatcaggctatccaaaaataaagaacaaatatatagggatagagagttattaaatttgaaagggccatttacaaagtatagtgaaaatattttttccttctaataatagccaaatttacttttacaaaatgatttagctagtctcttggagttgctgttaggctgtggctagaataccgtatatagtcatacaaatacaaacaatgacaaaccgtattgtttataaagttggatttgaaatagaagatgagataagtaatactactaaaaataccttagaagagtagcttagaatacgagtgagtttgtttataggtacgtgagaactgtgtctaaactatatttggaaaatatacttaaaattcaatatataaattaaagtaaggcataataatcaagaagaaagacaaaaacaattaaattcagtcaagacaaaaagcaaagaacctggtctgaaatggcaaaatatgttaaccaggcgaaaagcatacaatcatatgggtcgaaagaactaactgggccgtgtggtctgctgttagatacgagcatagactacaggctcaaagttccaattccaacccacccgacgtccgacgacagctggtccgggtctcctccatttcccggggacccgtccgatccgatcccagtcctcaacgccaacggtgggagatctagatcggagctagccagccagccggccgacgctgtccgccggccgccccggcgattctgacccgagatggcggtcgtccctgctgcagagaccctcgacgggctcaaggacaggttcgatctcggggtcttcgtaggcgacctcgccctcgatgaggaagtcaccagtgacgacgagtccctggaggggctgcagcaggagcttgacaactgcaagaatgaccaggaagtcgcaaacattctagccagtggcatcaaactgcgcgagtacacaaaaggcgtcgagaataacatacgccaaatcgagctggattctatccaggattacattaaggaaagtgaaaatctagtttctctgcatgatcaaatttgtgattgtgacaatattttgttacaaatggaaacagttctgactggattccagacagaaattggttccataagttcagagataaaggtccttcaggagaaatctatggacatgggattaaagctgaaaaatcgtaaggctgcagaatctaaattgtcaaaatttgtcgaggatataatagtacctccaagaatgattgacataattgttgatggagaggtcaatgatgaatacatgaaaacacttgagactctaagcaaaaaaatcaaattcatcgatgctgaccccatggttaaatcatccaaggctctaaaagatgttcaacctgaggttgagagactacgacagaaagccgtctcaaagattttcgagtttgtcatccaaaagttctatgccttgagaaaaccaaagactaatattcagattctacagcagagtgttcttcttaaatacaagtacacgataaatttccttaaggaacatgctaaggagatatatgcagaagttcgtacggcgtatattgacaccatgaataaggtgctaagtgcacatttccgggcttacatacaagcattggagaaactacagatggacatagcaacttccactgatttgcttggtgttgaaaccagaagcacaggcttcattttctccattggaaaagaacctctgaaaacccgtccttcagtgtttgctctgggtgaacgaataaacattttgaaggaaatcgaccagccagcattgatacctcatatagctgaagcgaagtcacagaaatactcgtatgaagttcttttcagaagcttgcagaaacttcttattgatactgccacttcagaatacctgtttactgatgatttctttggcgaagaatccatattccatgatatatttgcaggaccgattcaagttgttgatgaacatttcaatactgtactcctgaactgttatgatgcaattggcataatgcttatgatcagaataattcatcagcaccagctcatcatgtttaagcggcgaatcccatgtttggactcttacctagacaaagttaatatgtcactctggcctcgcttcaagatggtgttcgacttgcatttgaacagcttgcgaaatgcaaatattaaaacactttgggaggatgatgtccatccacactatgttacaaggagatatgctgaatttacagcttctctagttcatctcaatgttgagcatggggacggtcagcttgatctaaatttggagcgattgcggatggccattgaggatttgcttgttaagttggccaagatgttttccaaaccgaagctacaaactgtctttctgataaacaactatgatttaacaatttccattttgaaggaagctggaactgagggtgggaaagcacaacaacacttcgaggaggttcttaagagcaacatcgcaatatatgtggaagagttgctcctggagcagttcagtagtttgatcagattcgtcaaatctcgtccagcggatgagacggctgcaaattccgagaaagccagcattgccgaagttgagccactggtaaaggatttcgcgagccggtataaggccgcgatcgagctgatgcactatgatgtgatcacatctttcagcaactttctttgcgggatggagatcttgagagcgacgctcgcacagctcctgctatactacaccaggctctccgagtgtgtcaagagaatcaacggcggctctgctctcaacaaggaccttgtctccatatcctccatcctgttcgaaatcaagaagtattctaggacgttttagttgtttcacccccttccatgtacactaggacggctagctgaggggtagctgtgtatccttactttgtaactggtatgtgcgactgcaggggaaacaagggcattttgtcgtggtttgtatcttcgtctgtgttacccgacttgacccctgcccctttccagcacagaactatgatctctaggctgtctccacagttatcctattctatcttctgtcctatcatctattttaaacttcattttgtaaacagtatcgattatagtgcaaatctacaattttatacgatccgctgtggataaccatatgctgcatactaatgaatgcgtaccaaacgcttgccttaatgttatttttatgactggcaattttctagtgtttat

SEQ ID NO: 83773 - DNA, 4749 bp, Zea Mays
ccattttcgagcgcagaagcgagagagatccggagcagccgcagtcccaccgacctcgccgccggtcgccctccatctcctcgccgctgcctctcgggtatcccctccctagggaccgtgaatgcgtctgttgcggctgtacgcattagattcttcggagtatgttgcggcttagattctccagagaaagatgaagatctgttgtgcattgcggtcttcggtggttgatccgtcgatttttttcgtttcatgttgtgtctaggttagacctaattgtttaggtaacctcgtatcactggatgcgcatctccccagtgttagtctcaaagatactaacttacagagtgacttttctctaaaagtgtgcatacaagttttgaatacttgtatgagacatgtacttggaacttttaatttcaggatacaacttataggataatatcacatgagtgtgagcattactcataggtgatatttaggagcaagtcatctatattttaaactttgacatgtattaaattgaatgataccaattgataatatgaaatacctcttgaataatgttaataccatttgttagaaaactagaagagctatatgccaggcttctagagaattttaagatcatgtaggtttgctctgtatgagtgaaaacaagtaattctacatacggtatatccaaagtgtatgtctgcgaaaaatataaactgatcatgctagaagcctagaacatatgggtatgcgtggttcaatatttttaccagcttttctgagaatctggttgtggaaataatctaaatatcgtggggattacatgcggaggaagataaagcggtgcaaagggttcaggatctagaaaccgacgagtctaagtttcttcactttctaaatcctaaatcctgtggatgttttcatcttcctccgcatataagcctcatgatatccagattctccgcataaccatattcttcgggaatccagattctcaggaaaacttgttcgaaaaaatgaaccaaatgtggcctctgtcttatccatattctcgaggaatctagattctcaaaaaaaaaaaaacttacaaacatgccctctgtctcatgttcgcgtcctataattgtaatcggcgaggaaaaataacactaggattcaatgacacaaggcgacatgcctgttcacctcgaggttcccattactttgagatgtgtcggattagactttttaggcgattagcaaaaaaatagctaaattgattaatttagttattctctaaatgttttttaaaaagagtagattagttcaacatgctcgataaattcagaactctgtatgaaaagtaaaagtgtgtttggttggatgtagatgagggaaggaaggagacaactacatttttatgatgtttggatgagagtcacacggaaataaggtgaacacaagagcaatttttggtggcggcgtgttttccaaaatatcgagtggacgatgccgcccccgcctcatactactttgacatcaaaccaaacacatactaaatcaggctatccaaaaataaagaacaaatatatagggatagagagttattaaatttgaaagggccatttacaaagtatagtgaaaatattttttccttctaataatagccaaatttacttttacaaaatgatttagctagtctcttggagttgctgttaggctgtggctagaataccgtatatagtcatacaaatacaaacaatgacaaaccgtattgtttataaagttggatttgaaatagaagatgagataagtaatactactaaaaataccttagaagagtagcttagaatacgagtgagtttgtttataggtacgtgagaactgtgtctaaactatatttggaaaatatacttaaaattcaatatataaattaaagtaaggcataataatcaagaagaaagacaaaaacaattaaattcagtcaagacaaaaagcaaagaacctggtctgaaatggcaaaatatgttaaccaggcgaaaagcatacaatcatatgggtcgaaagaactaactgggccgtgtggtctgctgttagatacgagcatagactacaggctcaaagttccaattccaacccacccgacgtccgacgacagctggtccgggtctcctccatttcccggggacccgtccgatccgatcccagtcctcaacgccaacggtgggagatctagatcggagctagccagccagccggccgacgctgtccgccggccgccccggcgattctgacccgagatggcggtcgtccctgctgcagagaccctcgacgggctcaaggacaggttcgatctcggggtcttcgtaggcgacctcgccctcgatgaggaagtcaccagtgacgacgagtccctggaggggctgcagcaggagcttgacaactgcaagaatgaccaggaagtcgcaaacattctagccagtggcatcaaactgcgcgagtacacaaaaggcgtcgagaataacatacgccaaatcgagctggattctatccaggattacattaaggaaagtgaaaatctagtttctctgcatgatcaaatttgtgattgtgacaatattttgttacaaatggaaacagttctgactggattccagaaattggttccataagttcagagataaaggtccttcaggagaaatctatggacatgggattaaagctgaaaaatcgtaaggctgcagaatctaaattgtcaaaatttgtcgaggatataatagtacctccaagaatgattgacataattgttgatggagaggtcaatgatgaatacatgaaaacacttgagactctaagcaaaaaaatcaaattcatcgatgctgaccccatggttaaatcatccaaggctctaaaagatgttcaacctgaggttgagagactacgacagaaagccgtctcaaagattttcgagtttgtcatccaaaagttctatgccttgagaaaaccaaagactaatattcagattctacagcagagtgttcttcttaaatacaagtacacgataaatttccttaaggaacatgctaaggagatatatgcagaagttcgtacggcgtatattgacaccatgaataaggtgctaagtgcacatttccgggcttacatacaagcattggagaaactacagatggacatagcaacttccactgatttgcttggtgttgaaaccagaagcacaggcttcattttctccattggaaaagaacctctgaaaacccgtccttcagtgtttgctctgggtgaacgaataaacattttgaaggaaatcgaccagccagcattgatacctcatatagctgaagcgaagtcacagaaatactcgtatgaagttcttttcagaagcttgcagaaacttcttattgatactgccacttcagaatacctgtttactgatgatttctttggcgaagaatccatattccatgatatatttgcaggaccgattcaagttgttgatgaacatttcaatactgtactcctgaactgttatgatgcaattggcataatgcttatgatcagaataattcatcagcaccagctcatcatgtttaagcggcgaatcccatgtttggactcttacctagacaaagttaatatgtcactctggcctcgcttcaagatggtgttcgacttgcatttgaacagcttgcgaaatgcaaatattaaaacactttgggaggatgatgtccatccacactatgttacaaggagatatgctgaatttacagcttctctagttcatctcaatgttgagcatggggacggtcagcttgatctaaatttggagcgattgcggatggccattgaggatttgcttgttaagttggccaagatgttttccaaaccgaagctacaaactgtctttctgataaacaactatgatttaacaatttccattttgaaggaagctggaactgagggtgggaaagcacaacaacacttcgaggaggttcttaagagcaacatcgcaatatatgtggaagagttgctcctggagcagttcagtagtttgatcagattcgtcaaatctcgtccagcggatgagacggctgcaaattccgagaaagccagcattgccgaagttgagccactggtaaaggatttcgcgagccggtataaggccgcgatcgagctgatgcactatgatgtgatcacatctttcagcaactttctttgcgggatggagatcttgagagcgacgctcgcacagctcctgctatactacaccaggctctccgagtgtgtcaagagaatcaacggcggctctgctctcaacaaggaccttgtctccatatcctccatcctgttcgaaatcaagaagtattctaggacgttttagttgtttcacccccttccatgtacactaggacggctagctgaggggtagctgtgtatccttactttgtaactggtatgtgcgactgcaggggaaacaagggcattttgtcgtggtttgtatcttcgtctgtgttacccgacttgacccctgcccctttccagcacagaactatgatctctaggctgtctccacagttatcctattctatcttctgtcctatcatctattttaaacttcattttgtaaacagtatcgattatagtgcaaatctacaattttatacgatccgctgtggataaccatatgctgcatactaatgaatgcgtaccaaacgcttgccttaatgttatttttatgactggcaattttctagtgtttat

SEQ ID NO: 83774 - DNA, 639 bp, Zea Mays
ctggaatcgagcgggtccgattgattgggcttagtggtgtgtgacatatgtggcagtggtagtgcccctcatcttattgcaaactgcgctcggtgcaatgcgcgtgagcacggatgccaacgcaacgccaacagggcacccagatcctaaccaaggttctggagatggtgttgggcgccaaattcccttgaggaaggtagcagctagtgtcgtgtgagaaatgttggcttgtttttgtggttgtgtgtattggcaatcgctggagcctggagctgtgtgtattggcatcgctggagcaaaatgtccatgtggcttggcactgatgctggctggcctcagaacatacgtcggatattctttcaccgcgagtgagcaattgaaattgggcaggtaataccatgttgtgggcgtaaatgcgatggacactgtcagtttcgtgggttttcttttcttctttttcgggccaagagtttcgtggattctcagcctcggttgcatgcgcaagatcttgagtgcagcatagaacacgcttgttcttaccagtacgtgtgcaagaaaaatggatctcggtatatttaattaatatattttcttgtttgatggtgaacataattatttgaactaatatatttactagtg

SEQ ID NO: 83775 - DNA, 929 bp, Zea Mays
agcgtaccgaactacctatcctatcccctcgcgtcgcatctttcctctcgtaacgcgtatcagtgccaaccaggcagccatcgccgcggccctcgtgcctctgcatcgcggcgcgccttggtgctccatccacgtaatccctgaggtgcggcacaggcgtggaggtatctcggcagtcggcagggcggctggagttcggtcccagaagagatggcggggggccctgatgtcgcgggcttgatcgaggatgatgcggtctccgtcatcacggagggcttagtggtgtgtgacatatgtggcagtggtagtgcccctcatcttattgcaaactgcgctcggtgcaatgcgcgtactgtatggaggggttgacgttcctgattccgctcatatggttttgtaatagatgccaacgcaacgccaacagggcacccagatcctaaccaaggttctggagatggtgttgggcgccaaattcccttgaggaaggtagcagctagtgtcgtgtgagaaatgttggcttgtttttgtggttgtgtgtattggcaatcgctggagcctggagctgtgtgtattggcatcgctggagcaaaatgtccatgtggcttggcactgatgctggctggcctcagaacatacgtcggatattctttcaccgcgagtgagcaattgaaattgggcaggtaataccatgttgtgggcgtaaatgcgatggacactgtcagtttcgtgggttttcttttcttctttttcgggccaagagtttcgtggattctcagcctcggttgcatgcgcaagatcttgagtgcagcatagaacacgcttgttcttaccagtacgtgtgcaagaaaaatggatctcggtatatttaattaatatattttcttgtttgatggtgaacataattatttgaactaatatatttactagtg

SEQ ID NO: 83776 - DNA, 853 bp, Zea Mays
agcgtaccgaactacctatcctatcccctcgcgtcgcatctttcctctcgtaacgcgtatcagtgccaaccaggcagccatcgccgcggccctcgtgcctctgcatcgcggcgcgccttggtgctccatccacgtaatccctgaggtgcggcacaggcgtggaggtatctcggcagtcggcagggcggctggagttcggtcccagaagagatggcggggggccctgatgtcgcgggcttgatcgaggatgatgcggtctccgtcatcacggaggtactgtatggaggggttgacgttcctgattccgctcatatggttttgtaatagatgccaacgcaacgccaacagggcacccagatcctaaccaaggttctggagatggtgttgggcgccaaattcccttgaggaaggtagcagctagtgtcgtgtgagaaatgttggcttgtttttgtggttgtgtgtattggcaatcgctggagcctggagctgtgtgtattggcatcgctggagcaaaatgtccatgtggcttggcactgatgctggctggcctcagaacatacgtcggatattctttcaccgcgagtgagcaattgaaattgggcaggtaataccatgttgtgggcgtaaatgcgatggacactgtcagtttcgtgggttttcttttcttctttttcgggccaagagtttcgtggattctcagcctcggttgcatgcgcaagatcttgagtgcagcatagaacacgcttgttcttaccagtacgtgtgcaagaaaaatggatctcggtatatttaattaatatattttcttgtttgatggtgaacataattatttgaactaatatatttactagtg

SEQ ID NO: 83777 - DNA, 892 bp, Zea Mays
agcgtaccgaactacctatcctatcccctcgcgtcgcatctttcctctcgtaacgcgtatcagtgccaaccaggcagccatcgccgcggccctcgtgcctctgcatcgcggcgcgccttggtgctccatccacgtaatccctgaggtgcggcacaggcgtggaggtatctcggcagtcggcagggcggctggagttcggtcccagaagagatggcggggggccctgatgtcgcgggcttgatcgaggatgatgcggtctccgtcatcacggagggcttagtggtgtgtgacatatgtggcagtggtagtgcccctcatcttattgcaaactgcgctcggtgcaatgcgcgtgagcacggatgccaacgcaacgccaacagggcacccagatcctaaccaagcctgcaggttctggagatggtgttgggcgccaaattcccttgaggaaggtagcagctagtgtcgtgtgagaaatgttggcttgtttttgtggttgtgtgtattggcaatcgctggagcctggagctgtgtgtattggcatcgctggagcaaaatgtccatgtggcttggcactgatgctggctggcctcagaacatacgtcggatattctttcaccgcgagtgagcaattgaaattgggcaggtaataccatgttgtgggcgtaaatgcgatggacactgtcagtttcgtgggttttcttttcttctttttcgggccaagagtttcgtggattctcagcctcggttgcatgcgcaagatcttgagtgcagcatagaacacgcttgttcttaccagtacgtgtgcaagaaaaatggatctcggtatatttaattaatatattttcttgtttgatggtgaacataattatttgaactaatatatttactagtg

SEQ ID NO: 83778 - DNA, 887 bp, Zea Mays
ctagcgtaccgaactacctatcctatcccctcgcgtcgcatctttcctctcgtaacgcgtatcagtgccaaccaggcagccatcgccgcggccctcgtgcctctgcatcgcggcgcgccttggtgctccatccacgtaatccctgaggtgcggcacaggcgtggaggtatctcggcagtcggcagggcggctggagttcggtcccagaagagatggcggggggccctgatgtcgcgggcttgatcgaggatgatgcggtctccgtcatcacggagggcttagtggtgtgtgacatatgtggcagtggtagtgcccctcatcttattgcaaactgcgctcggtgcaatgcgcgtgagcacggatgccaacgcaacgccaacagggcacccagatcctaaccaaggttctggagatggtgttgggcgccaaattcccttgaggaaggtagcagctagtgtcgtgtgagaaatgttggcttgtttttgtggttgtgtgtattggcaatcgctggagcctggagctgtgtgtattggcatcgctggagcaaaatgtccatgtggcttggcactgatgctggctggcctcagaacatacgtcggatattctttcaccgcgagtgagcaattgaaattgggcaggtaataccatgttgtgggcgtaaatgcgatggacactgtcagtttcgtgggttttcttttcttctttttcgggccaagagtttcgtggattctcagcctcggttgcatgcgcaagatcttgagtgcagcatagaacacgcttgttcttaccagtacgtgtgcaagaaaaatggatctcggtatatttaattaatatattttcttgtttgatggtgaacataattatttgaactaatatatttactagtg

SEQ ID NO: 83779 - DNA, 1765 bp, Zea Mays
ttggagctcgacaccaataatgatggcgccgaggtaagagtctattttttaatgaaaatgaaaagtacgtatttgtgaaaataaacaaaaaaaactaaaatgtaaaaaagacggtcgcccgcaccacccgccaaggccccaagacctgaccgatctcgcctaggggttccggtgatccgcgcgcgccctcctcgagatgtctgacgtcacctctgactcggcgcagagccgccgctcgccgcccccgccgtcgccgtcgccgtcgatgccgcgcttccagcagcagccgagcggacgccagccgccccagcccggcgccgactccttcgtcttcggcgtcttcgccttcatcgccatctgcttcgtcttgctatagaagaggaaacatcttagtacttcaggatgcttcctagttgatttcactctcagtcccatcaagtgttctacatcaagttcctgaaggacatgttggggtatactggagaggaggtgctcttctgaagacaatcacccctccagggtttcatctgaagctccctttaatcacacagtatgagccaatacaggttacacttcaaacagaccaggtcagagatattccttgcggaacaaaaggtggtgttatgatcagctttgacaagatagaggtcgtaaaccgcctccgcaaagagtttgtgcatgaaaccctactcaactatggtgtgcactatgacaagacatggatatatgacaaaattcatcatgagattaaccagttctgcagtgctcacagtttgcagcaagtttacattgacatgtttgatcagattgatgaaacaatgaaagaagctattcaaagagactgtacacgctatgctcctggaattgaaatcatcagtgttcgtgttacaaagccaaatatacctggtagtatcagaagaaactttgaacttatggaggaggagcgtacaaaggcactgatcgccatcgagaagcaaaaggtagcagagaaggaggcagaaacacagaagaagattgcgctatctgaagcagagaagaacgcgcaggtgagcaagatcctgatggagcaaaagctgatggagaaggacagttccaagagacaggagaagattgataatgaaatgtacctggcacgagagaaagcactagcagatgcaaactactacaggattttgaaggaagcagaggcaaataggctcaaactgacacctgagtatctggagctgaggttcattgaatcaattgccaacaactcaaagattttctttggtgaaaagattcctaacatgatcatggatcaaaggttgctcaagaattaccttgatgctgttcctaggaaggaccattatgaaatgtagccgcgggttccgtgggttggaagcagaagtctttcttttttgtgtgatcccacgcagtagataggattaccgtgtagccgtccagtatactagtaagccagaaaggagtcatcaggatcctcttgaagatgaaattagcagtcatgagatctttggcttgttttgtgtagtagcagcattagggcacctggagcattcgcatgtgaccgacagtgatgcaaccagtgcaaatcctgtagtcttcaaaactgatggtcaaggccgctggcctccaaacccaggtaatctcttgaaaaggatctgggttataatttttgactgatgggcagaacaatttgtagcactgctgatgccaaagttttctcgatcataaatgtgcaagtttgctccctgacttaattatgtct

SEQ ID NO: 83780 - DNA, 641 bp, Zea Mays
caaagagaggtgaacgggcaatctcactcactctccttcgtagttgaaattgaactcgctggccgcctgtgtatagtccagtacttccagctagaatctgaaagaaactcgtcaccagctcgatctcgtccttcctcccttcgctcgactcctctgcttctcccccatccggtacgtgcggtgcggggaggctagccgggcggccggagctccaaccgcaatcggtctcttgctctgctgctgcgatggaggcgtcgtcgttggcgctcgtggccgccgtgctcctcctgtcctccacgcttgccgcgtcagatttctgcgtgtgcagttcggaccagccgacggcggtgctgcagaaggcgatcgacttcgcgtgcggtccgcaggggggcgccgactgcacggccatcctgcagggcggcgggtgctacagccccaacaccgtcgccgcgcactgctcctgggccgccaacagctactaccagaacaacaaggccaggggcgccacctgcgatttcggcggcgccgccgccgtctccaccacagaccccagtttctccgggtgcactttcgcttccagtgccaccaggttgattatgaagagtgggatatagagagtttcacctagattaccatataac

SEQ ID NO: 83781 - DNA, 669 bp, Zea Mays
gttctgtcatgcacgcgcatgcacaatgcactagctacggcctacagcgctggcgctgggaccgggacggcgggtaccaccaccggcaccacgaccgcgggcggtgcgacgacgggcaccctgagccctggcgtgggcatcggcggcctcaacggcacggggatgggcggcagcaccggcctgggaccggcggacaacaccctggacgccgccgcgcccggcctgctccccggcgccgcatccctcgccgccgccgccgccgccctctccttgctcgccctgctgcagcattgattacgtgggctagctgcttgctctgtggtccgtgaaaaagaaagggggcacgggggattgtactggagaatgtgaattggttcggttggttggaggacggatccgatttcacttcacccatctttgttagtagtggcaggcggtggttgggggcggtgtattctttctttcttttccttatgcctttttgatgtatggtttatttagcggtaggatgccagtctctttcctacaaggaccattgtctctcctctctctctctttctttttaaattttgtttatttataaaagttgtacttgctatcctcttttcttaacctctctgtttttattagaccagtttcaataaaaattcttaagaagtattgttttta

SEQ ID NO: 83782 - DNA, 3953 bp, Zea Mays
cccgaagctcccagaacctcctcctccgcttctctccactcttcacgccgccaccgagtttatacacgcttcgtcccgtcctgccgcgcccgtctgttccatagcataccattattgtgataaaccatccaatccagagttccattccattctgaattgctcctcccagcttcagataaaccatcgagattgtgccgccagcgccccaccatggccgccgcgccgccgctgtccgccgacgtactctccttcctaacctccgcccccgccgcgccgacgccggtcgtagccgcggcgtggggcgcggcgagggcgggtcctgtgaggggtaaggcggcactaaggacgacgagaggaggaaggggcggggtgctggctccgctggtcgggaggaggccccgccggacgccgctctcggtgcgctgcaacgccaccagccgggacggcaggattacacaacaagagttcactgagatggcgtggcaagcaattgtctcatcccccgaggtggcaaaggagagcaaacaccagattgtggagaccgaacatctgatgaaatccctgctggagcaacggaatggccttgcccgccgtatcttttctaaggcaggagttgacaatacaaggcttctcgatgccacaaagaaattcatccagaggcagcctaaggtattaggtgaagaacctggatctatgttggggcgtgacttagaagctctgatacaaagagcaagggactttaagaaagagtatggtgattcatatgtctcagttgaacatctagtccttggctttgccgaagataagcggtttgggacacagctgttcaaggattttcagattactgtgaagaccttgaaatcagccattgaatcgatcagagggaagcaaaatgtaattgatcaagggttcgagcccctggtcacacccattttttgcagctgagcgctgggcatgcacacggggcaaatctcactgggcgcgcgggacgggcacagaagatgcacgaagaaactcgtgctttgaagttgtagtgatgtgctgaaatcctgagggtaagtacgaagctttggataagtatggaaaggatctgacagctatggcacgtcaagggaagcttgatccagttattggaagagatgatgagattcgaagatgtatacaaattttatcacgaagaacaaagaacaatccagttctaattggtgaacctggtgtagggaaaacggctatagctgaaggactagctcagaggattgttcaaggagatgtcccacaagctctgacaaaccggcgactaattgcacttgatatgggtgcattgattgctggtgcaaaatatcgtggagagtttgaggatagacttaaggctgttctcaaagaagttacagattctgatgggcagaccattcttttcattgatgagattcacacagttgttggagcaggtgccacaaatggtgcaatggatgctggtaatcttctcaaaccaatgcttgggagaggagagctacggtgcattggtgcaacaacccttgatgaataccgcaaatatattgagaaagatccagcactagagcggcgcttccaacaagtttatgttgatcagccttcagttgaagatacaatttcaatactccgaggactaagagagagatatgagttgcaccatggtgtacgaatatctgacagtgcccttgtagctgcagctgttctttcagaccgttatatcagtggacgattcttgcctgacaaagctattgatctggttgatgaatcagccgccaaattaaaaatggagataacatcaaaacctactgctctggatgagatcgatcgtgctgtcctaaagattgaaatggagcgtctctcacttacaaatgatacagacaaagcatcaaaggacagactatcccgtcttgaagcagaactatcactcttgaaggataaacaacgtcagttgactgagaagtgggagcacgagaaatcagtgatgactaaaattcaatctatcaaagaagaggtaaggtttgcctttccacaatgactgtgaatgcatttacagagttggtgcagccgtgcaggcaatcgacttaaatctactacctgttgcaacagattgacagggtaaatgtggagatacagcaggcagaacgtgagtacgatcttaatcgagctgctgaactgaaatatggcagcctgaatgccttgcagcgccagcttcaaacgacagagaaggagcttgatgaatatcagagttctgggaaatccatgctaagggaagaggtgacccaagacgatattgcagaaatagtgagcaggtggacaggcattccagtttctaaactaaagcaatctgacagggagaaattgctgtatctggaggaagagctgcacaagcgagttgttggtcaggatcctgctgtaaaagcagttgcagaggccattcagagatccagagctggattatctgacccaaaccgtcctattgccagtttcatgttcatgggacctacaggagttggcaagacagagttagcgaaagcccttgcttcctttatgttcaacactgaggaagctgttgtcaggattgacatgagcgagtacatggagaagcattcagtctcgaggttgattggtgctccaccaggttatgttgggtatgaagagggtggtcaactgacagaggctgttcgccgtaggccatattcggttgtcttgtttgatgagattgagaaagctcatttggatgtcttcaatgtcttccttcaaatattggacgatggtagggttactgattctcaaggccggaaagtgagcttcaccaactccatcattatcatgacgtccaacgttgggtcacagtatatactaaacatggatgaagaagatggatcatctgattcagcctatgagaacataaagaggagggtgatggatgctgcaagatcggtgttccgtccagagttcatgaatcgtgtagatgagtacattgttttcaagcctctcgagagagaacagatcaacagcattgtcaaattacagcttgcaagagtacagaagaggattgcagatcgcaaaataaagctcgatgtctcgcctggagccattgaattcttgggaagcctcgggtatgacccgaattatggcgcgaggcctgtgaagagagtgattcaacagtatgtggagaacgaactcgcaaagggcatcctcagaggtgatttcaaggacgaggacagcatcttcgtggacacccaggttacggtgccctccaatggccagcttccgctgcgaaagctagtttttcagaaagtgggtgagcaatcgaagcctgctgctgaaggcgagaagttcttgccggctgtttgattggagtacggttgcagttttgcagatcgtgagcaataaaatgtacatataagggtgacagactggtattccctttggcttagaagagcattacagccacaatttgttctacgatacacgtagcttaaggttacgtcgagcaacgaattttgattttttttttctgccgtttttttttccttttcagtggaagtgtattcgattttgatgtcctccgacgtaactgatgcaaactaacaagaaacaggtatccagttggaactccctttgccaattgatgtgagtgtttacaggcaacttgttggtgaccgtcaatcgctgacattacaatcagctgcggtggcgaaccagaatataaagaggtgactaaatagtactggctctggctcagtatacggcggcgagcgtgctcttctagttcaaacatcaagaaatatatttgattctctctatcaacactaacattattgtatcaatatatatttaaagagaaaatataaaagatcaagaaatatatgtaattttctctatcaacactaacactattgtatcaatgtatgttatatgtgcctttaaagagagag

SEQ ID NO: 83783 - DNA, 3531 bp, Zea Mays
cccgaagctcccagaacctcctcctccgcttctctccactcttcacgccgccaccgagtttatacacgcttcgtcccgtcctgccgcgcccgtctgttccatagcataccattattgtgataaaccatccaatccagagttccattccattctgaattgctcctcccagcttcagataaaccatcgagattgtgccgccagcgccccaccatggccgccgcgccgccgctgtccgccgacgtactctccttcctaacctccgcccccgccgcgccgacgccggtcgtagccgcggcgtggggcgcggcgagggcgggtcctgtgaggggtaaggcggcactaaggacgacgagaggaggaaggggcggggtgctggctccgctggtcgggaggaggccccgccggacgccgctctcggtgcgctgcaacgccaccagccgggacggcaggattacacaacaagagttcactgagatggcgtggcaagcaattgtctcatcccccgaggtggcaaaggagagcaaacaccagattgtggagaccgaacatctgatgaaatccctgctggagcaacggaatggccttgcccgccgtatcttttctaaggcaggagttgacaatacaaggcttctcgatgccacaaagaaattcatccagaggcagcctaaggtattaggtgaagaacctggatctatgttggggcgtgacttagaagctctgatacaaagagcaagggactttaagaaagagtatggtgattcatatgtctcagttgaacatctagtccttggctttgccgaagataagcggtttgggacacagctgttcaaggattttcagattactgtgaagaccttgaaatcagccattgaatcgatcagagggaagcaaaatgtaattgatcaagggaagcttgatccagttattggaagagatgatgagattcgaagatgtatacaaattttatcacgaagaacaaagaacaatccagttctaattggtgaacctggtgtagggaaaacggctatagctgaaggactagctcagaggattgttcaaggagatgtcccacaagctctgacaaaccggcgactaattgcacttgatatgggtgcattgattgctggtgcaaaatatcgtggagagtttgaggatagacttaaggctgttctcaaagaagttacagattctgatgggcagaccattcttttcattgatgagattcacacagttgttggagcaggtgccacaaatggtgcaatggatgctggtaatcttctcaaaccaatgcttgggagaggagagctacggtgcattggtgcaacaacccttgatgaataccgcaaatatattgagaaagatccagcactagagcggcgcttccaacaagtttatgttgatcagccttcagttgaagatacaatttcaatactccgaggactaagagagagatatgagttgcaccatggtgtacgaatatctgacagtgcccttgtagctgcagctgttctttcagaccgttatatcagtggacgattcttgcctgacaaagctattgatctggttgatgaatcagccgccaaattaaaaatggagataacatcaaaacctactgctctggatgagatcgatcgtgctgtcctaaagattgaaatggagcgtctctcacttacaaatgatacagacaaagcatcaaaggacagactatcccgtcttgaagcagaactatcactcttgaaggataaacaacgtcagttgactgagaagtgggagcacgagaaatcagtgatgactaaaattcaatctatcaaagaagagattgacagggtaaatgtggagatacagcaggcagaacgtgagtacgatcttaatcgagctgctgaactgaaatatggcagcctgaatgccttgcagcgccagcttcaaacgacagagaaggagcttgatgaatatcagagttctgggaaatccatgctaagggaagaggtgacccaagacgatattgcagaaatagtgagcaggtggacaggcattccagtttctaaactaaagcaatctgacagggagaaattgctgtatctggaggaagagctgcacaagcgagttgttggtcaggatcctgctgtaaaagcagttgcagaggccattcagagatccagagctggattatctgacccaaaccgtcctattgccagtttcatgttcatgggacctacaggagttggcaagacagagttagcgaaagcccttgcttcctttatgttcaacactgaggaagctgttgtcaggattgacatgagcgagtacatggagaagcattcagtctcgaggttgattggtgctccaccaggttatgttgggtatgaagagggtggtcaactgacagaggctgttcgccgtaggccatattcggttgtcttgtttgatgagattgagaaagctcatttggatgtcttcaatgtcttccttcaaatattggacgatggtagggttactgattctcaaggccggaaagtgagcttcaccaactccatcattatcatgacgtccaacgttgggtcacagtatatactaaacatggatgaagaagatggatcatctgattcagcctatgagaacataaagaggagggtgatggatgctgcaagatcggtgttccgtccagagttcatgaatcgtgtagatgagtacattgttttcaagcctctcgagagagaacagatcaacagcattgtcaaattacagcttgcaagagtacagaagaggattgcagatcgcaaaataaagctcgatgtctcgcctggagccattgaattcttgggaagcctcgggtatgacccgaattatggcgcgaggcctgtgaagagagtgattcaacagtatgtggagaacgaactcgcaaagggcatcctcagaggtgatttcaaggacgaggacagcatcttcgtggacacccaggttacggtgccctccaatggccagcttccgctgcgaaagctagtttttcagaaagtgggtgagcaatcgaagcctgctgctgaaggcgagaagttcttgccggctgtttgattggagtacggttgcagttttgcagatcgtgagcaataaaatgtacatataagggtgacagactgtggaagtgtattcgattttgatgtcctccgacgtaactgatgcaaactaacaagaaacaggtatccagttggaactccctttgccaattgatgtgagtgtttacaggcaacttgttggtgaccgtcaatcgctgacattacaatcagctgcggtggcgaaccagaatataaagaggtgactaaatagtactggctctggctcagtatacggcggcgagcgtgctcttctagttcaaacatcaagaaatatatttgattctctctatcaacactaacattattgtatcaatatatatttaaagagaaaatataaaagatcaagaaatatatgtaattttctctatcaacactaacactattgtatcaatgtatgttatatgtgcctttaaagagagag

SEQ ID NO: 83784 - DNA, 3696 bp, Zea Mays
cacggttccaaaaaaaactctcacccacctcccttccgaagcttcctttcccaataatcttccggaccttctcaaatctccacggagtgctcgttggcccccgaagctcccagaacctcctcctccgcttctctccactcttcacgccgccaccgagtttatacacgcttcgtcccgtcctgccgcgcccgtctgttccatagcataccattattgtgataaaccatccaatccagagttccattccattctgaattgctcctcccagcttcagataaaccatcgagattgtgccgccagcgccccaccatggccgccgcgccgccgctgtccgccgacgtactctccttcctaacctccgcccccgccgcgccgacgccggtcgtagccgcggcgtggggcgcggcgagggcgggtcctgtgaggggtaaggcggcactaaggacgacgagaggaggaaggggcggggtgctggctccgctggtcgggaggaggccccgccggacgccgctctcggtgcgctgcaacgccaccagccgggacggcaggattacacaacaagagttcactgagatggcgtggcaagcaattgtctcatcccccgaggtggcaaaggagagcaaacaccagattgtggagaccgaacatctgatgaaatccctgctggagcaacggaatggccttgcccgccgtatcttttctaaggcaggagttgacaatacaaggcttctcgatgccacaaagaaattcatccagaggcagcctaaggtattaggtgaagaacctggatctatgttggggcgtgacttagaagctctgatacaaagagcaagggactttaagaaagagtatggtgattcatatgtctcagttgaacatctagtccttggctttgccgaagataagcggtttgggacacagctgttcaaggattttcagattactgtgaagaccttgaaatcagccattgaatcgatcagagggaagcaaaatgtaattgatcaagatcctgagggtaagtacgaagctttggataagtatggaaaggatctgacagctatggcacgtcaagggaagcttgatccagttattggaagagatgatgagattcgaagatgtatacaaattttatcacgaagaacaaagaacaatccagttctaattggtgaacctggtgtagggaaaacggctatagctgaaggactagctcagaggattgttcaaggagatgtcccacaagctctgacaaaccggcgactaattgcacttgatatgggtgcattgattgctggtgcaaaatatcgtggagagtttgaggatagacttaaggctgttctcaaagaagttacagattctgatgggcagaccattcttttcattgatgagattcacacagttgttggagcaggtgccacaaatggtgcaatggatgctggtaatcttctcaaaccaatgcttgggagaggagagctacggtgcattggtgcaacaacccttgatgaataccgcaaatatattgagaaagatccagcactagagcggcgcttccaacaagtttatgttgatcagccttcagttgaagatacaatttcaatactccgaggactaagagagagatatgagttgcaccatggtgtacgaatatctgacagtgcccttgtagctgcagctgttctttcagaccgttatatcagtggacgattcttgcctgacaaagctattgatctggttgatgaatcagccgccaaattaaaaatggagataacatcaaaacctactgctctggatgagatcgatcgtgctgtcctaaagattgaaatggagcgtctctcacttacaaatgatacagacaaagcatcaaaggacagactatcccgtcttgaagcagaactatcactcttgaaggataaacaacgtcagttgactgagaagtgggagcacgagaaatcagtgatgactaaaattcaatctatcaaagaagagattgacagggtaaatgtggagatacagcaggcagaacgtgagtacgatcttaatcgagctgctgaactgaaatatggcagcctgaatgccttgcagcgccagcttcaaacgacagagaaggagcttgatgaatatcagagttctgggaaatccatgctaagggaagaggtgacccaagacgatattgcagaaatagtgagcaggtggacaggcattccagtttctaaactaaagcaatctgacagggagaaattgctgtatctggaggaagagctgcacaagcgagttgttggtcaggatcctgctgtaaaagcagttgcagaggccattcagagatccagagctggattatctgacccaaaccgtcctattgccagtttcatgttcatgggacctacaggagttggcaagacagagttagcgaaagcccttgcttcctttatgttcaacactgaggaagctgttgtcaggattgacatgagcgagtacatggagaagcattcagtctcgaggttgattggtgctccaccaggttatgttgggtatgaagagggtggtcaactgacagaggctgttcgccgtaggccatattcggttgtcttgtttgatgagattgagaaagctcatttggatgtcttcaatgtcttccttcaaatattggacgatggtagggttactgattctcaaggccggaaagtgagcttcaccaactccatcattatcatgacgtccaacgttgggtcacagtatatactaaacatggatgaagaagatggatcatctgattcagcctatgagaacataaagaggagggtgatggatgctgcaagatcggtgttccgtccagagttcatgaatcgtgtagatgagtacattgttttcaagcctctcgagagagaacagatcaacagcattgtcaaattacagcttgcaagagtacagaagaggattgcagatcgcaaaataaagctcgatgtctcgcctggagccattgaattcttgggaagcctcgggtatgacccgaattatggcgcgaggcctgtgaagagagtgattcaacagtatgtggagaacgaactcgcaaagggcatcctcagaggtgatttcaaggacgaggacagcatcttcgtggacacccaggttacggtgccctccaatggccagcttccgctgcgaaagctagtttttcagaaagtgggtgagcaatcgaagcctgctgctgaaggcgagaagttcttgccggctgtttgattggagtacggttgcagttttgcagatcgtgagcaataaaatgtacatataagggtgacagactgtggaagtgtattcgattttgatgtcctccgacgtaactgatgcaaactaacaagaaacaggtatccagttggaactccctttgccaattgatgtgagtgtttacaggcaacttgttggtgaccgtcaatcgctgacattacaatcagctgcggtggcgaaccagaatataaagaggtgactaaatagtactggctctggctcagtatacggcggcgagcgtgctcttctagttcaaacatcaagaaatatatttgattctctctatcaacactaacattattgtatcaatatatatttaaagagaaaatataaaagatcaagaaatatatgtaattttctctatcaacactaacactattgtatcaatgtatgttatatgtgcctttaaagagagag

SEQ ID NO: 83785 - DNA, 3891 bp, Zea Mays
tacagccttaataggtagtagagattcagattgcgctattggggatactgattttcaaaagcccagtgttcgggatatcacggttccaaaaaaaactctcacccacctcccttccgaagcttcctttcccaataatcttccggaccttctcaaatctccacggagtgctcgttggcccccgaagctcccagaacctcctcctccgcttctctccactcttcacgccgccaccgagtttatacacgcttcgtcccgtcctgccgcgcccgtctgttccatagcataccattattgtgataaaccatccaatccagagttccattccattctgaattgctcctcccagcttcagataaaccatcgagattgtgccgccagcgccccaccatggccgccgcgccgccgctgtccgccgacgtactctccttcctaacctccgcccccgccgcgccgacgccggtcgtagccgcggcgtggggcgcggcgagggcgggtcctgtgaggggtaaggcggcactaaggacgacgagaggaggaaggggcggggtgctggctccgctggtcgggaggaggccccgccggacgccgctctcggtgcgctgcaacgccaccagccgggacggcaggattacacaacaagagttcactgagatggcgtggcaagcaattgtctcatcccccgaggtggcaaaggagagcaaacaccagattgtggagaccgaacatctgatgaaatccctgctggagcaacggaatggccttgcccgccgtatcttttctaaggcaggagttgacaatacaaggcttctcgatgccacaaagaaattcatccagaggcagcctaaggtattaggtgaagaacctggatctatgttggggcgtgacttagaagctctgatacaaagagcaagggactttaagaaagagtatggtgattcatatgtctcagttgaacatctagtccttggctttgccgaagataagcggtttgggacacagctgttcaaggattttcagattactgtgaagaccttgaaatcagccattgaatcgatcagagggaagcaaaatgtaattgatcaagatcctgagggtaagtacgaagctttggataagtatggaaaggatctgacagctatggcacgtcaagggaagcttgatccagttattggaagagatgatgagattcgaagatgtatacaaattttatcacgaagaacaaagaacaatccagttctaattggtgaacctggtgtagggaaaacggctatagctgaaggctcagaggattgttcaaggagatgtcccacaagctctgacaaaccggcgactaattgcacttgatatgggtgcattgattgctggtgcaaaatatcgtggagagtttgaggatagacttaaggctgttctcaaagaagttacagattctgatgggcagaccattcttttcattgatgagattcacacagttgttggagcaggtgccacaaatggtgcaatggatgctggtaatcttctcaaaccaatgcttgggagaggagagctacggtgcattggtgcaacaacccttgatgaataccgcaaatatattgagaaagatccagcactagagcggcgcttccaacaagtttatgttgatcagccttcagttgaagatacaatttcaatactccgaggactaagagagagatatgagttgcaccatggtgtacgaatatctgacagtgcccttgtagctgcagctgttctttcagaccgttatatcagtggacgattcttgcctgacaaagctattgatctggttgatgaatcagccgccaaattaaaaatggagataacatcaaaacctactgctctggatgagatcgatcgtgctgtcctaaagattgaaatggagcgtctctcacttacaaatgatacagacaaagcatcaaaggacagactatcccgtcttgaagcagaactatcactcttgaaggataaacaacgtcagttgactgagaagtgggagcacgagaaatcagtgatgactaaaattcaatctatcaaagaagagattgacagggtaaatgtggagatacagcaggcagaacgtgagtacgatcttaatcgagctgctgaactgaaatatggcagcctgaatgccttgcagcgccagcttcaaacgacagagaaggagcttgatgaatatcagagttctgggaaatccatgctaagggaagaggtgacccaagacgatattgcagaaatagtgagcaggtggacaggcattccagtttctaaactaaagcaatctgacagggagaaattgctgtatctggaggaagagctgcacaagcgagttgttggtcaggatcctgctgtaaaagcagttgcagaggccattcagagatccagagctggattatctgacccaaaccgtcctattgccagtttcatgttcatgggacctacaggagttggcaagacagagttagcgaaagcccttgcttcctttatgttcaacactgaggaagctgttgtcaggattgacatgagcgagtacatggagaagcattcagtctcgaggttgattggtgctccaccaggttatgttgggtatgaagagggtggtcaactgacagaggctgttcgccgtaggccatattcggttgtcttgtttgatgagattgagaaagctcatttggatgtcttcaatgtcttccttcaaatattggacgatggtagggttactgattctcaaggccggaaagtgagcttcaccaactccatcattatcatgacgtccaacgttgggtcacagtatatactaaacatggatgaagaagatggatcatctgattcagcctatgagaacataaagaggagggtgatggatgctgcaagatcggtgttccgtccagagttcatgaatcgtgtagatgagtacattgttttcaagcctctcgagagagaacagatcaacagcattgtcaaattacagcttgcaagagtacagaagaggattgcagatcgcaaaataaagctcgatgtctcgcctggagccattgaattcttgggaagcctcgggtatgacccgaattatggcgcgaggcctgtgaagagagtgattcaacagtatgtggagaacgaactcgcaaagggcatcctcagaggtgatttcaaggacgaggacagcatcttcgtggacacccaggttacggtgccctccaatggccagcttccgctgcgaaagctagtttttcagaaagtgggtgagcaatcgaagcctgctgctgaaggcgagaagttcttgccggctgtttgattggagtacggttgcagttttgcagatcgtgagcaataaaatgtacatataagggtgacagactggtattccctttggcttagaagagcattacagccacaatttgttctacgatacacgtagcttaaggttacgtcgagcaacgaattttgattttttttttctgccgtttttttttccttttcagtggaagtgtattcgattttgatgtcctccgacgtaactgatgcaaactaacaagaaacaggtatccagttggaactccctttgccaattgatgtgagtgtttacaggcaacttgttggtgaccgtcaatcgctgacattacaatcagctgcggtggcgaaccagaatataaagaggtgactaaatagtactggctctggctcagtatacggcggcgagcgtgctcttctagttcaaacatcaagaaatatatttgattctctctatcaacactaacattattgtatcaatatatatttaaagagaaaatataaaagatcaagaaatatatgtaattttctctatcaacactaacactattgtatcaatgtatgttatatgtgcctttaaagagagag

SEQ ID NO: 83786 - DNA, 3301 bp, Zea Mays
atcggttcaaaataaatcaggggcgctctgagattacacaacaagagttcactgagatggcgtggcaagcaattgtctcatcccccgaggtggcaaaggagagcaaacaccagattgtggagaccgaacatctgatgaaatccctgctggagcaacggaatggccttgcccgccgtatcttttctaaggcaggagttgacaatacaaggcttctcgatgccacaaagaaattcatccagaggcagcctaaggtattaggtgaagaacctggatctatgttggggcgtgacttagaagctctgatacaaagagcaagggactttaagaaagagtatggtgattcatatgtctcagttgaacatctagtccttggctttgccgaagataagcggtttgggacacagctgttcaaggattttcagattactgtgaagaccttgaaatcagccattgaatcgatcagagggaagcaaaatgtaattgatcaagatcctgagggtaagtacgaagctttggataagtatggaaaggatctgacagctatggcacgtcaagggaagcttgatccagttattggaagagatgatgagattcgaagatgtatacaaattttatcacgaagaacaaagaacaatccagttctaattggtgaacctggtgtagggaaaacggctatagctgaaggactagctcagaggattgttcaaggagatgtcccacaagctctgacaaaccggcgactaattgcacttgatatgggtgcattgattgctggtgcaaaatatcgtggagagtttgaggatagacttaaggctgttctcaaagaagttacagattctgatgggcagaccattcttttcattgatgagattcacacagttgttggagcaggtgccacaaatggtgcaatggatgctggtaatcttctcaaaccaatgcttgggagaggagagctacggtgcattggtgcaacaacccttgatgaataccgcaaatatattgagaaagatccagcactagagcggcgcttccaacaagtttatgttgatcagccttcagttgaagatacaatttcaatactccgaggactaagagagagatatgagttgcaccatggtgtacgaatatctgacagtgcccttgtagctgcagctgttctttcagaccgttatatcagtggacgattcttgcctgacaaagctattgatctggttgatgaatcagccgccaaattaaaaatggagataacatcaaaacctactgctctggatgagatcgatcgtgctgtcctaaagattgaaatggagcgtctctcacttacaaatgatacagacaaagcatcaaaggacagactatcccgtcttgaagcagaactatcactcttgaaggataaacaacgtcagttgactgagaagtgggagcacgagaaatcagtgatgactaaaattcaatctatcaaagaagagattgacagggtaaatgtggagatacagcaggcagaacgtgagtacgatcttaatcgagctgctgaactgaaatatggcagcctgaatgccttgcagcgccagcttcaaacgacagagaaggagcttgatgaatatcagagttctgggaaatccatgctaagggaagaggtgacccaagacgatattgcagaaatagtgagcaggtggacaggcattccagtttctaaactaaagcaatctgacagggagaaattgctgtatctggaggaagagctgcacaagcgagttgttggtcaggatcctgctgtaaaagcagttgcagaggccattcagagatccagagctggattatctgacccaaaccgtcctattgccagtttcatgttcatgggacctacaggagttggcaagacagagttagcgaaagcccttgcttcctttatgttcaacactgaggaagctgttgtcaggattgacatgagcgagtacatggagaagcattcagtctcgaggttgattggtgctccaccaggttatgttgggtatgaagagggtggtcaactgacagaggctgttcgccgtaggccatattcggttgtcttgtttgatgagattgagaaagctcatttggatgtcttcaatgtcttccttcaaatattggacgatggtagggttactgattctcaaggccggaaagtgagcttcaccaactccatcattatcatgacgtccaacgttgggtcacagtatatactaaacatggatgaagaagatggatcatctgattcagcctatgagaacataaagaggagggtgatggatgctgcaagatcggtgttccgtccagagttcatgaatcgtgtagatgagtacattgttttcaagcctctcgagagagaacagatcaacagcattgtcaaattacagcttgcaagagtacagaagaggattgcagatcgcaaaataaagctcgatgtctcgcctggagccattgaattcttgggaagcctcgggtatgacccgaattatggcgcgaggcctgtgaagagagtgattcaacagtatgtggagaacgaactcgcaaagggcatcctcagaggtgatttcaaggacgaggacagcatcttcgtggacacccaggttacggtgccctccaatggccagcttccgctgcgaaagctagtttttcagaaagtgggtgagcaatcgaagcctgctgctgaaggcgagaagttcttgccggctgtttgattggagtacggttgcagttttgcagatcgtgagcaataaaatgtacatataagggtgacagactggtattccctttggcttagaagagcattacagccacaatttgttctacgatacacgtagcttaaggttacgtcgagcaacgaattttgattttttttttctgccgtttttttttccttttcagtggaagtgtattcgattttgatgtcctccgacgtaactgatgcaaactaacaagaaacaggtatccagttggaactccctttgccaattgatgtgagtgtttacaggcaacttgttggtgaccgtcaatcgctgacattacaatcagctgcggtggcgaaccagaatataaagaggtgactaaatagtactggctctggctcagtatacggcggcgagcgtgctcttctagttcaaacatcaagaaatatatttgattctctctatcaacactaacattattgtatcaatatatatttaaagagaaaatataaaagatcaagaaatatatgtaattttctctatcaacactaacactattgtatcaatgtatgttatatgtgcctttaaagagagag

SEQ ID NO: 83787 - DNA, 4072 bp, Zea Mays
atggagctctgctgctcaggcgtcctaagcggcgccggcgcctcgcgaccggcgccatcgaggacctcaaggcccgtgaaaatgggggctccgtccactgggctcttggtagccccgccgaagcggcggcgaggcggccgcgccggctgccgccagtcggccccgccagtgccgccccgggacgaacggcgggtcgtgggcacggacagcgtcgtccacatgctccggtcggcgcccgaccccgccgaggccctggaactcttcacggccgcggcgcggcagcccacgaaggtccacacaacggagtcgtgcaactacatgctggagctgatgcgcgcccacggtcgtgtcggggacatggcgcaggtgttcgacctaatgcagaaacaggtcgtcaagaccaacgtcggcaccttcgccaccatcttcggcggcgtcggcgtcgagggggggctccgcagcgcgccggtcgccctgcctgtgatgagggaggcggggatgtccctcaacgcctacacgtacaatggcttgatttacttcctcgttaagtccggcttcgatgcggaggccatggaggtttacaaggcgatggttgaggacggcatctcgccgagtgtgaggacctactccgtgctgatggtggcgtttgggaagaagagggatgtcgacactgttctctggttgctgaacgagatggaggcccgcggcgtcaagccaaacgtgtatagctacaccatctgcattcgggttcttgggcaggccgcaaggttctctgtgatgctggccgtctgagcgacgccaaggctgtcttttggaagatgaaagcgagtgatcagaaacctgatcgtgtcacttacatcactctcttagacaagtgtggtgacagtggtgactcacaatcagttgtcgaagtttggaatgccatggtagctgatggttataatgacaatattgtttcttacactgcagttgtggatgcattatgccaagttggccgggttgatgaagctttagctgtgtttgatgagatgaaggaaaagggtatgtcgcctgagcagtattcctataactccttaatatctgggtttctgaaagctgatatgtttgaccgtgctctggagctcttcaaccatatgaatgcttgtggtcctagtccaaatggctacactcatgtcctcttcatcaactactacggaaaatctggtcaatctttgaaagcaatacaaagatatgagcacatgaagagcaaagggattgttcctgatgttgctgctgctaatgctgttctgtatagtcttgctggatctggcagacttggaatggcaaaaagggtcttttatgaactaaaagcgatgggagtctctccagacactatcacgtacacaatgatgatcaaatgttgcagtaaggcatcaaaagctgatgaagctatgaattttttttctgacatggtggaaagtggatgtgttcctgatgttcttgcattgaattcattgattgatacactctacaagggaggcaagggaaacgaagcatggcaacttttccataaattgaaagaaatgaaaattgagcccactaatggtacgtacaacacacttttgtcaggattaggaagagaaggcaaagttaaggaggtaatgcagctgctcgaagaaatgacacgtaccatttatccacctaatttaattacatacaacacagttctagattgcctcagcaaaaatggggaggtgaactgtgcaatagatatgctttacagtatgactgagaaaggttgcgcacctgacctttcatcttataacactgtcatgtatggccttattaaagaggaaagacttgaagaggcattcaggatgttttgtcaaatgaaaaagattcttgctccagattatgccacactgtgtactatcctcccaagttttgttaaaaatgggttgatgaaggaagctctgcatactgtaaaggaatatattttgaaggctggttgtaacgtggacaagtcttcattccattcactgatggaagggatactgaagaaggctggtgtggaaaaatcaatcgagtttgctgaaaacatagcatctaggggaattctgctgaatgatttctttttatgcccattgattagacacctctgcaagcacaagaaagctcttgaagcgcatcaactattcaataagtttaaaggtcttggagtttcactaaaaactggttcttataattctcttatccgtggccttgtggatgaaaacctgattgatatcgctgaagacttgttcactgaaatgaaaagactaggatgtggcccagatgaattcacttacaatttgattcttgatgccatgggaaaatcgatgcgggttgaggaaatgttaaaagtccaaaaggagatgcatcgtaagggatatgaatcaacatatgttacttataacactatcatttcgggtctcgtaaaatctaaaagattggaacaggctatagacctgtactacaatctgatgagtgaaggcttctccccaacaccatgtacatatggtcctcttcttgatggcttattaaaatctggaaagatggtggatgctgaaaatctttttaatgagatgctagagtatggatgcgaacctaattgcaccatctacaatattctactgaatggacaccgaatagctggcaacacagaaaacgtttgtcagctttttgaaaagatggttgagcagggaataaacccagatataaaatcctatacaattcttattgataccctgtgcacagctggaagattaaatgatggtttgtgttattttagacagctacatgaattaggacttgagcctgatcttatcgtttataatttgctcattgatggtcttggaaaatctgaaagaatagaggaagcagtcagtctcttcaacgagatgaagaagaaaggaattatcccaaacttatacacatacaattcactaattctccacttagggaaagcagggaaagctgctgaagctgcgcaaatgtatgaagaactactgagaaaaggatggaaacctagtgttttcacatataatgcactcatcaggggttacagtgtttctggcagtaccgataatgcatacgctgcctatggtcagatgattgttggagggtgccagcctaattctagcacttatatgcaacttccaaatcaattgtgactgagaaattagctatagtatgtagttatttctgtacagttttgtccatagtgcgaaaatggtcaactgtagatagtagccaatacttttaacatatccgaggatcgatagatcttgttctacattccattgttactagcagaaaattatgtaatatacagataatgttaccatgtgctccatttcactggcatgttgaaagcagtgacctactgaattcacctgtctgtcatgaaatagattgaggttttaccataatagtggtttctgttgctataaactgttcctgtagactgcactgttcgtagagtgtaatttaaaataaaatataagataggatgggcaagctgccgtagatagtcttaacgtgtcatgttatgtattttgtgaatattgcttatgattcaattactgaactatgctgacaaaattgcctttgctagttctatttgttgacacatagtatctgcatactacattacataacggtgtgataagtggtggagctaggatctttttatggactagtttagaaactcaaatcgattggagatgattgagatggaaataaactaatttctctctcaatctcatccaatcctaatggagatttgagtttataaactagccctaaatgtagggctggatataacactaaaaaaatatgtataccaattataaaaaataaatcgcacaaatgcatagatagcgacacatatgaacttcacttgaatacaataattgcaatttaatgtaatattgacttaaacaagtggttacctaattaagaatatgttagatctttgtctcaatgatcaattcatcaattgtttgggttgctttcatcaacaatatgaagacttcctgcaattgaatgatat

SEQ ID NO: 83788 - DNA, 1337 bp, Zea Mays
agtcacggacacatggtgtgtttggttggatctcgtcccggtctttcacctccaacaaaacacatcctaatcgactcgcgaccccgtttcccggagagccgcgacggtgcgacgccgaactccctaaccctaagtccctaagcgtaggcggcggggggcggcggtgcgaggcaagctgcacagcaacacgggccacgggcgcggcctccgcctccgcctccacgcttctgctgctaggctgcaagggcggcggcgcggcgcggtgggcggcggacagctggccaggtccagcccagtagtccaggtgacgagatgcaatttgcaactagactagaagtttagaacctataggttggattcttttttcatgcgggagtgggaatacccaaggatttgctccgtgcccttatctgcatgataaatgaatttggagacgaaggcaacttgaaagacagcagggttgcatcccacaatgtcagctcccaacagtgatagcaacatgcagcagctagtccctatagcaccaccaggaaaggcttctggtggtgacagtgggaaggagctggttgtggcagatcctgcaggtaagagatcaggaggtgtaaaactgcgagaggatgaggaagacctggaggtgaagctcaggcgcatcatggagaatgtccctgtgcgtgtcagtaacacatcagggtcatctgctggctctggctctggtgatttccaccagtatcggcaaatgaggaggagagagcaggaccgtctagcacgaatggatgcggactaccagaagagaaaagagatagctgagttcgaactgcggagggaggagaggatgaaagcagctgaggagcggacagccaagaagcgcctgaaacggcaaaagaagaaacagcgtaagaaagagaagcgagctaaaactggtgataatggtggtgaagaacctaacagagtggagtcgtctgacgatgacgaaggctcagatgacgatgacaagtccaagcaatgacacgtcaatttcgcacctgaagatgatttcggactctctggttgtctgggcaatgaaacaaacgtctgtacggttgttgtaacaggttacagggcgaatctggtgctgtttctgtaagaggatatgatattctgagcagagatggatagcactagataatttgctgttagtgttcatcattcagagaagtgacctgcgtcagtaccttttgttcaggtctatattatatcagctgccttttttggctccattttaccatgggctcaagagaaaatcaagcctcatttcttatgctaaataaatagaaaagtaatctggcatttaaagctca

SEQ ID NO: 83789 - DNA, 840 bp, Zea Mays
gtatttcctccccttcgctggtcatctttgccgagggcctgcgtctcgctatctcttccctccgccctcctgctctcccgccgttgtagaaatttccctctcccacgcgtcctcccgctcccgtgcacttgtcactgcgcctagcccgctcgctcgctcccactcccgtacccatgtatcctctcaaccgtgaccagcctgtgtcgccacgttattgcctctgcctcgtcgcgccatgtacagagcgaccccattcaacgacgggtgaagaaattgggttgtggaatgcatctgcagagattcccctttcgcagttagcgtcaggaaggctagatccggaggcacaccgcccggagggagagctggaacaatccaacgtcgattagatgcatcggggtgtgcttcctcccataagattcgaagtccaaatgccagaggatctgaccaattctactcaaatcgacggggaggaggcgtagatggggatttacaagcttaattccttgcctgcccccaagaagccacttggtagcaggaggaagacagcagcaggaacaaatcttgcatgaatcgtctcatctccctagtccaacaggcgttcgtgcgaggcatctcatctcacatcacctcgcctcgccttaaatcaaatcccagcggcgagacggaagatttggaatgcggagggagaatttcaccacccacgcgcaggggaggaatcgtcaccggatctacgagtgagcggcacgcacgtacggcgcgtgagtagaaggactcgatccaagaaccctaactaacaaaagagagagggaccaaccggagagaaagctgccagcgtagtag

SEQ ID NO: 83790 - DNA, 1349 bp, Zea Mays
cgcgcgcgcccggcaaactacccccaccgcggatcccctacctcccgtggatcccgcgcgcgcccgccaaactgcccccgccgtggatccctacctcccgcggatcatgttcccctacctccagcggatccctacgtgtcagcgcaaggatcacgaagtgctgctacaaatgcgtggtagaattgatgacggacaacgacggcgccgccgccaggctcccgtctccatgggtctcctctcaaacagttcaaccctcagatccgttccttctctggattaggaaggagagcctcaaggtgggggatcacatctactcctggaaggtgacgtgagtctacgcgcatcacgggttgagatttagctagcttcttgggcatggattgattatctagataaaacaccggcaccatttggtgagcatatccacgaaccctttgtttgtgcatcaaatcagtatggttgatttgtttctctacgtccagttcttggaaaaggctacttgcattgattcggcagtgggaagtgccctgggatgacaccttagatacagtagtttcttacaaaattagtcaggtaattctggcagtttgttgttgtgagcttccctttatttctcatcttcctttttaagttgttggcctttcagaacaatatcttacttttttatatacgagtatgttgatgaaatgtgagataaaaactcataggttttgtcacatttatcttattttatctttgccctttgaatatcacacaaatgtgttttgtttaatactgctaaatgctcacagtgctataatttcttagttgttttttgagttttcaggttgtggatgctaaagttattcatctggactataataatagtcgcatatttttgtcacttaaagatgtaaaggtgatgctggagacaacacttggcaaagaagagttgaaagagacaattttgatgtgcactaatagggttagctaggatctccatgatgtgcatttgatgggggactaatttatcgggttgctagcaggattggaacagcatacagactgagggcaaggatcgtcgatggagctgccaagttaaatggtttgttcaattgacagaaacaaagtcaattaactcacattctactacgtggaacaagaaatagcctttctagaggagcggtagcaggaactatgatatcatgtgttgtttattttgattgctggcatctgactgtttaggaggcagaaaatgagaaaagtcataccactctcatgtccaaaagattcggtccaacttagtatggaacatactatatttttcttcctataaattgtcacattctcctcgcgaaaaaatgtgttat

SEQ ID NO: 83791 - DNA, 1264 bp, Zea Mays
cgcgcgcgcccggcaaactacccccaccgcggatcccctacctcccgtggatcccgcgcgcgcccgccaaactgcccccgccgtggatccctacctcccgcggatcatgttcccctacctccagcggatccctacgtgtcagcgcaaggatcacgaagtgctgctacaaatgcgtggtagaattgatgacggacaacgacggcgccgccgccaggttagtcgttctgcgattagtgaggttttgtcatttggtcacgcttggatgcctggctgtcggagttgccgccgctgaggacgaccatggagcccgcctcagcattcctcgagcgcatggacaccgcgccaggcatcagccgccctcccgcggttgtcatctcgtctctccatctacactgatacagctcgccggtccaaattgactcatcgaccacgaccgtcgctaggctcccgtctccatgggtctcctctcaaacagttcaaccctcagatccgttccttctctggattaggaaggagagcctcaaggtgggggatcacatctactcctggaaggtgacgtgagtctacgcgcatcacgggttgagatttagctagcttcttgggcatggattgattatctagataaaacaccggcaccatttggtgagcatatccacgaaccctttgtttgtgcatcaaatcagtatggttgatttgtttctctacgtccagttcttggaaaaggctacttgcattgattcggcagtgggaagtgccctgggatgacaccttagatacagtagtttcttacaaaattagtcaggttgtggatgctaaagttattcatctggactataataatagtcgcatatttttgtcacttaaagatgtaaaggtgatgctggagacaacacttggcaaagaagagttgaaagagacaattttgatgtgcactaatagggattggaacagcatacagactgagggcaaggatcgtcgatggagctgccaagttaaatggtttgttcaattgacagaaacaaagtcaattaactcacattctactacgtggaacaagaaatagcctttctagaggagcggtagcaggaactatgatatcatgtgttgtttattttgattgctggcatctgactgtttaggaggcagaaaatgagaaaagtcataccactctcatgtccaaaagattcggtccaacttagtatggaacatactatatttttcttcctataaattgtcacattctcctcgcgaaaaaatgtgttat

SEQ ID NO: 83792 - DNA, 3344 bp, Zea Mays
gtcgtgcggccacgtgcaatcctagatccagttcaagcccacgtcaccggtcgtcgttgggcggccgtatgtgtccgccaaccgcgtatctcccaagtgcctaccgtgggcaagaaggcggtcatctcctccctcaatgcccacgcccagcatgcgctcctcaccaccaccatcaccccagtcccatggcatcgattggctccctcgagtcctccaccgtgggctaccagggctggacgactcacctggccgctgtggccaaagatattcaggatcatttgtcatccaaagggcacaaaatctcatcctttctctttggaagaggtctatcagcagatcgactaatatatgtaataaaacgacagtgcgctagagccactttatctcagaagataatataccatctgatcgatgtcggctactaaagatggattagattaatgcaactgttgatttgtgtgacatctctaagtcatttgataggcgcccatattatctaaggtacacgtacattctgctttctcatttgaggctgctcagcaacagaacctaccactttaggagttcatagcttccatccaaatggagagaacaaatgtgataaaagaggtgcgctctgctctcttccttaaaacactagagcttggaatgtagaatcaaatgaatatgtattttgtttctggtatatcaggtattttcttatttctttctagagagagatagttgaacagatattagaagaatctagcagaagctactcaggcatttaactttattgtgtatgttatagcgccaatcaaatggaacagggtggttcattagcagtgcagatgcttttgctatcccaagcaacgagcgcggagttgctgctcgtgacagtggtgcttttgcatgggagattgttctgattgaagttcctgttgggagagaaaaacacttgtacttattgagaaagatgaaagcctggataagataaatttcctcatgcaacacacacatagtaagactgacgtgctctttaattaattattcgtcctatcgttgcgacatgcctccttacatggggactatgtagataatcgttttacttatgccatgcaattttttgtgtctcttagtttaacccaacaaaactgaataaacttcgctcaacccgctcgtcgccgcttgacgcccctctccactttctatcctactgctccacgccgcggatagatcacctcccctcctccgcttgctgccacgttatgagggatggggtcgccgcaatgtatcaacgtgatggcagcagcatctggatccgtgcggtggtggcgggagccaaaatcgcggcacacaccatccggcgcaagtctgccaacaccagcacagtgttcgtcggagtcctcgccatggtggctcatatcatcattgggtataggttagagagctgcctctttccaattcttcctttttggtggaagggctcacccctaaaatcgtgatgacatttacatgaacacatgccttacctattgcatactcaaacaagcatgcaaccactataagtgttgcgcttcctcctcgatgttgtcgtcctatgttaactcccaactgtccatctctctctgtctccgccttcctaacccagattcttccgcaccaccatagatgacatcgagcaaactcttcgctgccatatgcctctgtaggcagcgggacaagaacattcgagtgagaggagggggaggcgtcgttgcaaccgcgccccacttgggacaccacctttaccttctcctgtcgacaagcacctcgaatcgctgcttctgtgactctccacgccatgcgcctttgcaggcaacggggcaagaacagtcgagggggaggcattgtcgtcagtgaccaaagaatttatgaatattaatgtcaataataatatatgtattgtttgtgttcatgtaattgttatgtgctaaaattttatcaaatatttatgtgtcgtcgcaacgcacgagcactgtactagttatatctctactaactattaagggtacagtgtagactgcccccgccatcccctacctcccgcggatcccgcgcgcgcccgacaaactaccccccgccgcggattccctacctcctgatcccctacctcccgcgtatcccgcacgcccagctaactacccccgccgcggatcccctacctcccgcggatcccgcgcgcgcccggcaaactacccccaccgcggatcccctacctcccgtggatcccgcgcgcgcccgccaaactgcccccgccgtggatccctacctcccgcggatcatgttcccctacctccagcggatccctacgtgtcagcgcaaggatcacgaagtgctgctacaaatgcgtggtagaattgatgacggacaacgacggcgccgccgccaggttagtcgttctgcgattagtgaggttttgtcatttggtcacgcttggatgcctggctgtcggagttgccgccgctgaggacgaccatggagcccgcctcagcattcctcgagcgcatggacaccgcgccaggcatcagccgccctcccgcggttgtcatctcgtctctccatctacactgatacagctcgccggtccaaattgactcatcgaccacgaccgtcgctaggctcccgtctccatgggtctcctctcaaacagttcaaccctcagatccgttccttctctggattaggaaggagagcctcaaggtgggggatcacatctactcctggaaggtgacgtgagtctacgcgcatcacgggttgagatttagctagcttcttgggcatggattgattatctagataaaacaccggcaccatttgttcttggaaaaggctacttgcattgattcggcagtgggaagtgccctgggatgacaccttagatacagtagtttcttacaaaattagtcagttgttttttgagttttcaggttgtggatgctaaagttattcatctggactataataatagtcgcatatttttgtcacttaaagatgtaaaggattggaacagcatacagactgagggcaaggatcgtcgatggagctgccaagttaaatggtttgttcaattgacagaaacaaagtcaattaactcacattctactacgtggaacaagaaatagcctttctagaggagcggtagcaggaactatgatatcatgtgttgtttattttgattgctggcatctgactgtttaggaggcagaaaatgagaaaagtcataccactctcatgtccaaaagattcggtccaacttagtatggaacatactatatttttcttcctataaattgtcacattctcctcgcgaaaaaatgtgttat

SEQ ID NO: 83793 - DNA, 3898 bp, Zea Mays
atcgtcgaggccaaccagttcgcgtgggacatcgtcatggctatcgggactacgcatcgggagcccccaaggaccccgaaaccggttcctaggatgaagccggcagcaactgagctgactcccctacacgtgcggcgcgcccgagagaagcagagccatcggggtggcaccgggacgcgtggcgccaacactgccatgccgtcgtgcggccacgtgcaatcctagatccagttcaagcccacgtcaccggtcgtcgttgggcggccgtatgtgtccgccaaccgcgtatctcccaagtgcctaccgtgggcaagaaggcggtcatctcctccctcaatgcccacgcccagcatgcgctcctcaccaccaccatcaccccagtcccatggcatcgattggctccctcgagtcctccaccgtgggctaccagggctggacgactcacctggccgctgtggccaaagatattcaggatcatttgtcatccaaagggcacaaaatctcatcctttctctttggaagaggtacacgtacattctgctttctcatttgaggctgctcagcaacagaacctaccactttaggagttcatagcttccatccaaatggagagaacaaatgtgataaaagaggtgcgctctgctctcttccttaaaacactagagcttggaatgtagaatcaaatgaatatgtattttgtttctggtatatcaggtattttcttatttctttctagagagagatagttgaacagatattagaagaatctagcagaagctactcaggcatttaactttattgtgtatgttatagcgccaatcaaatggaacagggtggttcattagcagtgcagtatgtgatttcctcctcatgtttcttctctctctgtaccttcataccattagaggatgtacaagcaaccatggtttatattgtctggactggcatatttattcgtagtctttgctgtgaattagtcgttcagacccttctaggagcaatgaacatcatgattgttgcatgattgctagccaattgatactctggatcttcaatgaaaccatctatttgattgctcccaaatatggaagtaggtgtgccatgcaaaaatgagtactatatgtgtccctatccttcttcatgatgtgcttttcagtacataacattatacattgatacctcagttatttttctatacctgttttcacttttcttcttatgaccatgtatttgttctctgaatttttttccatatctgatgctacatattttcgtttatatcgcagtgcaatatatttgcatttctggtgtgttgattttacttgtttactcataggatgcttttgctatcccaagcaacgagcgcggagttgctgctcgtgacagtggtgcttttgcatgggagattgttctgattgaagttcctgttgggagagaaaaacacttgtacttattgagaaagatgaaagcctggataagataaatttcctcatgcaacacacacatatttaacccaacaaaactgaataaacttcgctcaacccgctcgtcgccgcttgacgcccctctccactttctatcctactgctccacgccgcggatagatcacctcccctcctccgcttgctgccacgttatgagggatggggtcgccgcaatgtatcaacgtgatggcagcagcatctggatccgtgcggtggtggcgggagccaaaatcgcggcacacaccatccggcgcaagtctgccaacaccagcacagtgttcgtcggagtcctcgccatggtggctcatatcatcattgggtataggttagagagctgcctctttccaattcttcctttttggtggaagggctcacccctaaaatcgtgatgacatttacatgaacacatgccttacctattgcatactcaaacaagcatgcaaccactataagtgttgcgcttcctcctcgatgttgtcgtcctatgttaactcccaactgtccatctctctctgtctccgccttcctaacccagattcttccgcaccaccatagatgacatcgagcaaactcttcgctgccatatgcctctgtaggcagcgggacaagaacattcgagtgagaggagggggaggcgtcgttgcaaccgcgccccacttgggacaccacctttaccttctcctgtcgacaagcacctcgaatcgctgcttctgtgactctccacgccatgcgcctttgcaggcaacggggcaagaacagtcgagggggaggcattgtcgtcagtgaccaaagaatttatgaatattaatgtcaataataatatatgtattgtttgtgttcatgtaattgttatgtgctaaaattttatcaaatatttatgtgtcgtcgcaacgcacgagcactgtactagttatatctctactaactattaagggtacagtgtagactgcccccgccatcccctacctcccgcggatcccgcgcgcgcccgacaaactaccccccgccgcggattccctacctcctgatcccctacctcccgcgtatcccgcacgcccagctaactacccccgccgcggatcccctacctcccgcggatcccgcgcgcgcccggcaaactacccccaccgcggatcccctacctcccgtggatcccgcgcgcgcccgccaaactgcccccgccgtggatccctacctcccgcggatcatgttcccctacctccagcggatccctacgtgtcagcgcaaggatcacgaagtgctgctacaaatgcgtggtagaattgatgacggacaacgacggcgccgccgccaggattaggaaggagagcctcaaggtgggggatcacatctactcctggaaggtgacttcttggaaaaggctacttgcattgattcggcagtgggaagtgccctgggatgacaccttagatacagtagtttcttacaaaattagtcaggtaattctggcagtttgttgttgtgagcttccctttatttctcatcttcctttttaagttgttggcctttcagaacaatatcttacttttttatatacgagtatgttgatgaaatgtgagataaaaactcataggttttgtcacatttatcttattttatctttgccctttgaatatcacacaaatgtgttttgtttaatactgctaaatgctcacagtgctataatttcttagttgttttttgagttttcaggttgtggatgctaaagttattcatctggactataataatagtcgcatatttttgtcacttaaagatgtaaaggtaattgatcatttccttttataaaaaaattttagcatgtcaagccttcctgttttcctgtgtgggcatgtgttactttgccacttgcatcaccttttggtctgtagtttcatccaagtatatcatagactgcacactacgctttggacagctttccacatgtgctgctgctgtgcaggtgatgctggagacaacacttggcaaagaagagttgaaagagacaattttgatgtgcactaatagggttagctaggatctccatgatgtgcatttgatgggggactaatttatcgggttgctagcaggattggaacagcatacagactgagggcaaggatcgtcgatggagctgccaagttaaatggtttgttcaattgacagaaacaaagtcaattaactcacattctactacgtggaacaagaaatagcctttctagaggagcggtagcaggaactatgatatcatgtgttgtttattttgattgctggcatctgactgtttaggaggcagaaaatgagaaaagtcataccactctcatgtccaaaagattcggtccaacttagtatggaacatactatatttttcttcctataaattgtcacattctcctcgcgaaaaaatgtgttat

SEQ ID NO: 83794 - DNA, 4455 bp, Zea Mays
tgcaatctccattacacctccacgagctgctgtacaaggtcgtcggcgacaccaaggttgtctccgacatcagtcttagcccctgcagcacgcgcgggtacctctgaaccaacctccgatgcaagcaggagagcggtggcgacaaatgttgctgccagcgatgctgctcaacgagatcgtcgaggccaaccagttcgcgtgggacatcgtcatggctatcgggactacgcatcgggagcccccaaggaccccgaaaccggttcctaggatgaagccggcagcaactgagctgactcccctacacgtgcggcgcgcccgagagaagcagagccatcggggtggcaccgggacgcgtggcgccaacactgccatgccgtcgtgcggccacgtgcaatcctagatccagttcaagcccacgtcaccggtcgtcgttgggcggccgtatgtgtccgccaaccgcgtatctcccaagtgcctaccgtgggcaagaaggcggtcatctcctccctcaatgcccacgcccagcatgcgctcctcaccaccaccatcaccccagtcccatggcatcgattggctccctcgagtcctccaccgtgggctaccagggctggacgactcacctggccgctgtggccaaagatattcaggatcatttgtcatccaaagggcacaaaatctcatcctttctctttggaagaggtctatcagcagatcgactaatatatgtaataaaacgacagtgcgctagagccactttatctcagaagataatataccatctgatcgatgtcggctactaaagatggattagattaatgcaactgttgatttgtgtgacatctctaagtcatttgataggcgcccatattatctaaggtacacgtacattctgctttctcatttgaggctgctcagcaacagaacctaccactttaggagttcatagcttccatccaaatggagagaacaaatgtgataaaagaggtgcgctctgctctcttccttaaaacactagagcttggaatgtagaatcaaatgaatatgtattttgtttctggtatatcaggtattttcttatttctttctagagagagatagttgaacagatattagaagaatctagcagaagctactcaggcatttaactttattgtgtatgttatagcgccaatcaaatggaacagggtggttcattagcagtgcagtatgtgatttcctcctcatgtttcttctctctctgtaccttcataccattagaggatgtacaagcaaccatggtttatattgtctggactggcatatttattcgtagtctttgctgtgaattagtcgttcagacccttctaggagcaatgaacatcatgattgttgcatgattgctagccaattgatactctggatcttcaatgaaaccatctatttgattgctcccaaatatggaagtaggtgtgccatgcaaaaatgagtactatatgtgtccctatccttcttcatgatgtgcttttcagtacataacattatacattgatacctcagttatttttctatacctgttttcacttttcttcttatgaccatgtatttgttctctgaatttttttccatatctgatgctacatattttcgtttatatcgcagtgcaatatatttgcatttctggtgtgttgattttacttgtttactcataggatgcttttgctatcccaagcaacgagcgcggagttgctgctcgtgacagtggtgcttttgcatgggagattgttctggtgatttcctttctctttgctagaactagaaattgtagtatttgctttgtttggtttacttgttatgtttaatgttttgtcaatcagattgaagttcctgttgggagagaaaaacacttgtacttattgagaaagatgaaagcctggataagataaatttcctcatgcaacacacacatagtaagactgacgtgctctttaattaattattcgtcctatcgttgcgacatgcctccttacatggggactatgtagataatcgttttacttatgccatgcaattttttgtgtctcttagtttaacccaacaaaactgaataaacttcgctcaacccgctcgtcgccgcttgacgcccctctccactttctatcctactgctccacgccgcggatagatcacctcccctcctccgcttgctgccacgttatgagggatggggtcgccgcaatgtatcaacgtgatggcagcagcatctggatccgtgcggtggtggcgggagccaaaatcgcggcacacaccatccggcgcaagtctgccaacaccagcacagtgttcgtcggagtcctcgccatggtggctcatatcatcattgggtataggttagagagctgcctctttccaattcttcctttttggtggaagggctcacccctaaaatcgtgatgacatttacatgaacacatgccttacctattgcatactcaaacaagcatgcaaccactataagtgttgcgcttcctcctcgatgttgtcgtcctatgttaactcccaactgtccatctctctctgtctccgccttcctaacccagattcttccgcaccaccatagatgacatcgagcaaactcttcgctgccatatgcctctgtaggcagcgggacaagaacattcgagtgagaggagggggaggcgtcgttgcaaccgcgccccacttgggacaccacctttaccttctcctgtcgacaagcacctcgaatcgctgcttctgtgactctccacgccatgcgcctttgcaggcaacggggcaagaacagtcgagggggaggcattgtcgtcagtgaccaaagaatttatgaatattaatgtcaataataatatatgtattgtttgtgttcatgtaattgttatgtgctaaaattttatcaaatatttatgtgtcgtcgcaacgcacgagcactgtactagttatatctctactaactattaagggtacagtgtagactgcccccgccatcccctacctcccgcggatcccgcgcgcgcccgacaaactaccccccgccgcggattccctacctcctgatcccctacctcccgcgtatcccgcacgcccagctaactacccccgccgcggatcccctacctcccgcggatcccgcgcgcgcccggcaaactacccccaccgcggatcccctacctcccgtggatcccgcgcgcgcccgccaaactgcccccgccgtggatccctacctcccgcggatcatgttcccctacctccagcggatccctacgtgtcagcgcaaggatcacgaagtgctgctacaaatgcgtggtagaattgatgacggacaacgacggcgccgccgccaggattaggaaggagagcctcaaggtgggggatcacatctactcctggaaggtgacttcttggaaaaggctacttgcattgattcggcagtgggaagtgccctgggatgacaccttagatacagtagtttcttacaaaattagtcaggtaattctggcagtttgttgttgtgagcttccctttatttctcatcttcctttttaagttgttggcctttcagaacaatatcttacttttttatatacgagtatgttgatgaaatgtgagataaaaactcataggttttgtcacatttatcttattttatctttgccctttgaatatcacacaaatgtgttttgtttaatactgctaaatgctcacagtgctataatttcttagttgttttttgagttttcaggttgtggatgctaaagttattcatctggactataataatagtcgcatatttttgtcacttaaagatgtaaaggtaattgatcatttccttttataaaaaaattttagcatgtcaagccttcctgttttcctgtgtgggcatgtgttactttgccacttgcatcaccttttggtctgtagtttcatccaagtatatcatagactgcacactacgctttggacagctttccacatgtgctgctgctgtgcaggtgatgctggagacaacacttggcaaagaagagttgaaagagacaattttgatgtgcactaatagggttagctaggatctccatgatgtgcatttgatgggggactaatttatcgggttgctagcaggattggaacagcatacagactgagggcaaggatcgtcgatggagctgccaagttaaatggtttgttcaattgacagaaacaaagtcaattaactcacattctactacgtggaacaagaaatagcctttctagaggagcggtagcaggaactatgatatcatgtgttgtttattttgattgctggcatctgactgtttaggaggcagaaaatgagaaaagtcataccactctcatgtccaaaagattcggtccaacttagtatggaacatactatatttttcttcctataaattgtcacattctcctcgcgaaaaaatgtgttat

SEQ ID NO: 83795 - DNA, 3216 bp, Zea Mays
atttcatttccacgcaggcagctgaccattacagtccgcaatcacttcgatgtgatcagaggattctatggcccctccgcgcagctgcagtccacgcaggcagctgtagatctatggcccctccgcgcagctgcagtccacgcaggcagctgtagatctatggcccatccgcgcaggcagtctgcaatcacttcgccgcaatcccctccacgcaggagctgctgtacaaggtcgtcggcgacaccaaggttgtctccgacatcagtcttagcccctgcagcacgcgcgggtacctctgaaccaacctccgatgcaagcaggagagcggtggcgacaaatgttgctgccagcgatgctgctcaacgagatcgtcgaggccaaccagttcgcgtgggacatcgtcatggctatcgggactacgcatcgggagcccccaaggaccccgaaaccggttcctaggatgaagccggcagcaactgagctgactcccctacacgtgcggcgcgcccgagagaagcagagccatcggggtggcaccgggacgcgtggcgccaacactgccatgccgtcgtgcggccacgtgcaatcctagatccagttcaagcccacgtcaccggtcgtcgttgggcggccgtatgtgtccgccaaccgcgtatctcccaagtgcctaccgtgggcaagaaggcggtcatctcctccctcaatgcccacgcccagcatgcgctcctcaccaccaccatcaccccagtcccatggcatcgattggctccctcgagtcctccaccgtgggctaccagggctggacgactcacctggccgctgtggccaaagatattcaggatcatttgtcatccaaagggcacaaaatctcatcctttctctttggaagaggtaggtattcattgttgtcttatggtgagacttcatatttgtcatcattgtttctttgtatactattgcttcttagtcccagagtttttaattcacaactgtttatatgataatacagctccccaagtattctttagtccttgttgcacagtattttttgtccgcaattggttcaccatttattatgtgcacattgatgtaggtctatcagcagatcgactaatatatgtaataaaacgacagtgcgctagagccactttatctcagaagataatataccatctgatcgatgtcggctactaaagatggattagattaatgcaactgttgatttgtgtgacatctctaagtcatttgataggcgcccatattatctaaggtacacgtacattctgctttctcatttgaggctgctcagcaacagaacctaccactttaggagttcatagcttccatccaaatggagagaacaaatgtgataaaagaggtattttcttatttctttctagagagagatagttgaacagatattagaagaatctagcagaagctactcaggcatttaactttattgtgtatgttatagcgccaatcaaatggaacagggtggttcattagcagtgcagtatgtgatttcctcctcatgtttcttctctctctgtaccttcataccattagaggatgtacaagcaaccatggtttatattgtctggactggcatatttattcgtagtctttgctgtgaattagtcgttcagacccttctaggagcaatgaacatcatgattgttgcatgattgctagccaattgatactctggatcttcaatgaaaccatctatttgattgctcccaaatatggaagtaggtgtgccatgcaaaaatgagtactatatgtgtccctatccttcttcatgatgtgcttttcagtacataacattatacattgatacctcagttatttttctatacctgttttcacttttcttcttatgaccatgtatttgttctctgaatttttttccatatctgatgctacatattttcgtttatatcgcagtgcaatatatttgcatttctggtgtgttgattttacttgtttactcataggatgcttttgctatcccaagcaacgagcgcggagttgctgctcgtgacagtggtgcttttgcatgggagattgttctgattgaagttcctgttgggagagaaaaacacttgtacttattgagaaagatgaaagcctggataagataaatttcctcatgcaacacacacatattcttggaaaaggctacttgcattgattcggcagtgggaagtgccctgggatgacaccttagatacagtagtttcttacaaaattagtcaggtaattctggcagtttgttgttgtgagcttccctttatttctcatcttcctttttaagttgttggcctttcagaacaatatcttacttttttatatacgagtatgttgatgaaatgtgagataaaaactcataggttttgtcacatttatcttattttatctttgccctttgaatatcacacaaatgtgttttgtttaatactgctaaatgctcacagtgctataatttcttagttgttttttgagttttcaggttgtggatgctaaagttattcatctggactataataatagtcgcatatttttgtcacttaaagatgtaaaggtaattgatcatttccttttataaaaaaattttagcatgtcaagccttcctgttttcctgtgtgggcatgtgttactttgccacttgcatcaccttttggtctgtagtttcatccaagtatatcatagactgcacactacgctttggacagctttccacatgtgctgctgctgtgcaggtgatgctggagacaacacttggcaaagaagagttgaaagagacaattttgatgtgcactaatagggttagctaggatctccatgatgtgcatttgatgggggactaatttatcgggttgctagcaggattggaacagcatacagactgagggcaaggatcgtcgatggagctgccaagttaaatggtttgttcaattgacagaaacaaagtcaattaactcacattctactacgtggaacaagaaatagcctttctagaggagcggtagcaggaactatgatatcatgtgttgtttattttgattgctggcatctgactgtttaggaggcagaaaatgagaaaagtcataccactctcatgtccaaaagattcggtccaacttagtatggaacatactatatttttcttcctataaattgtcacattctcctcgcgaaaaaatgtgttat

SEQ ID NO: 83796 - DNA, 4140 bp, Zea Mays
ctcgcatttcatttccacgcaggcagctgaccattacagtccgcaatcacttcgatgtgatcagaggattctatggcccctccgcgcagctgcagtccacgcaggcagctgtagatctatggcccctccgcgcagctgcagtccacgcaggcagctgtagatctatggcccatccgcgcaggcagtctgcaatcacttcgccgcaatcccctccacgcaggagctgctgtacaaggtcgtcggcgacaccaaggttgtctccgacatcagtcttagcccctgcagcacgcgcgggtacctctgaaccaacctccgatgcaagcaggagagcggtggcgacaaatgttgctgccagcgatgctgctcaacgagatcgtcgaggccaaccagttcgcgtgggacatcgtcatggctatcgggactacgcatcgggagcccccaaggaccccgaaaccggttcctaggatgaagccggcagcaactgagctgactcccctacacgtgcggcgcgcccgagagaagcagagccatcggggtggcaccgggacgcgtggcgccaacactgccatgccgtcgtgcggccacgtgcaatcctagatccagttcaagcccacgtcaccggtcgtcgttgggcggccgtatgtgtccgccaaccgcgtatctcccaagtgcctaccgtgggcaagaaggcggtcatctcctccctcaatgcccacgcccagcatgcgctcctcaccaccaccatcaccccagtcccatggcatcgattggctccctcgagtcctccaccgtgggctaccagggctggacgactcacctggccgctgtggccaaagatattcaggatcatttgtcatccaaagggcacaaaatctcatcctttctctttggaagaggtctatcagcagatcgactaatatatgtaataaaacgacagtgcgctagagccactttatctcagaagataatataccatctgatcgatgtcggctactaaagatggattagattaatgcaactgttgatttgtgtgacatctctaagtcatttgataggcgcccatattatctaaggtacacgtacattctgctttctcatttgaggctgctcagcaacagaacctaccactttaggagttcatagcttccatccaaatggagagaacaaatgtgataaaagaggtattttcttatttctttctagagagagatagttgaacagatattagaagaatctagcagaagctactcaggcatttaactttattgtgtatgttatagcgccaatcaaatggaacagggtggttcattagcagtgcagtatgtgatttcctcctcatgtttcttctctctctgtaccttcataccattagaggatgtacaagcaaccatggtttatattgtctggactggcatatttattcgtagtctttgctgtgaattagtcgttcagacccttctaggagcaatgaacatcatgattgttgcatgattgctagccaattgatactctggatcttcaatgaaaccatctatttgattgctcccaaatatggaagtaggtgtgccatgcaaaaatgagtactatatgtgtccctatccttcttcatgatgtgcttttcagtacataacattatacattgatacctcagttatttttctatacctgttttcacttttcttcttatgaccatgtatttgttctctgaatttttttccatatctgatgctacatattttcgtttatatcgcagtgcaatatatttgcatttctggtgtgttgattttacttgtttactcataggatgcttttgctatcccaagcaacgagcgcggagttgctgctcgtgacagtggtgcttttgcatgggagattgttctgattgaagttcctgttgggagagaaaaacacttgtacttattgagaaagatgaaagcctggataagataaatttcctcatgcaacacacacatatttaacccaacaaaactgaataaacttcgctcaacccgctcgtcgccgcttgacgcccctctccactttctatcctactgctccacgccgcggatagatcacctcccctcctccgcttgctgccacgttatgagggatggggtcgccgcaatgtatcaacgtgatggcagcagcatctggatccgtgcggtggtggcgggagccaaaatcgcggcacacaccatccggcgcaagtctgccaacaccagcacagtgttcgtcggagtcctcgccatggtggctcatatcatcattgggtataggttagagagctgcctctttccaattcttcctttttggtggaagggctcacccctaaaatcgtgatgacatttacatgaacacatgccttacctattgcatactcaaacaagcatgcaaccactataagtgttgcgcttcctcctcgatgttgtcgtcctatgttaactcccaactgtccatctctctctgtctccgccttcctaacccagattcttccgcaccaccatagatgacatcgagcaaactcttcgctgccatatgcctctgtaggcagcgggacaagaacattcgagtgagaggagggggaggcgtcgttgcaaccgcgccccacttgggacaccacctttaccttctcctgtcgacaagcacctcgaatcgctgcttctgtgactctccacgccatgcgcctttgcaggcaacggggcaagaacagtcgagggggaggcattgtcgtcagtgaccaaagaatttatgaatattaatgtcaataataatatatgtattgtttgtgttcatgtaattgttatgtgctaaaattttatcaaatatttatgtgtcgtcgcaacgcacgagcactgtactagttatatctctactaactattaagggtacagtgtagactgcccccgccatcccctacctcccgcggatcccgcgcgcgcccgacaaactaccccccgccgcggattccctacctcctgatcccctacctcccgcgtatcccgcacgcccagctaactacccccgccgcggatcccctacctcccgcggatcccgcgcgcgcccggcaaactacccccaccgcggatcccctacctcccgtggatcccgcgcgcgcccgccaaactgcccccgccgtggatccctacctcccgcggatcatgttcccctacctccagcggatccctacgtgtcagcgcaaggatcacgaagtgctgctacaaatgcgtggtagaattgatgacggacaacgacggcgccgccgccagctcgccggtccaaattgactcatcgaccacgaccgtcgctaggctcccgtctccatgggtctcctctcaaacagttcaaccctcagatccgttccttctctggattaggaaggagagcctcaaggtgggggatcacatctactcctggaaggtgacgtgagtctacgcgcatcacgggttgagatttagctagcttcttgggcatggattgattatctagataaaacaccggcaccatttgttcttggaaaaggctacttgcattgattcggcagtgggaagtgccctgggatgacaccttagatacagtagtttcttacaaaattagtcagttgttttttgagttttcaggttgtggatgctaaagttattcatctggactataataatagtcgcatatttttgtcacttaaagatgtaaaggtgatgctggagacaacacttggcaaagaagagttgaaagagacaattttgatgtgcactaatagggttagctaggatctccatgatgtgcatttgatgggggactaatttatcgggttgctagcaggattggaacagcatacagactgagggcaaggatcgtcgatggagctgccaagttaaatggtttgttcaattgacagaaacaaagtcaattaactcacattctactacgtggaacaagaaatagcctttctagaggagcggtagcaggaactatgatatcatgtgttgtttattttgattgctggcatctgactgtttaggaggcagaaaatgagaaaagtcataccactctcatgtccaaaagattcggtccaacttagtatggaacatactatatttttcttcctataaattgtcacattctcctcgcgaaaaaatgtgttat

SEQ ID NO: 83797 - DNA, 2374 bp, Zea Mays
caatcccctcgcatttcatttccacgcaggcagctgaccattacagtccgcaatcacttcgatgtgatcagaggattctatggcccctccgcgcagctgcagtccacgcaggcagctgtagatctatggcccctccgcgcagctgcagtccacgcaggcagctgtagatctatggcccatccgcgcaggcagtctgcaatcacttcgccgcaatcccctccacgcaggagctgctgtacaaggtcgtcggcgacaccaaggttgtctccgacatcagtcttagcccctgcagcacgcgcgggtacctctgaaccaacctccgatgcaagcaggagagcggtggcgacaaatgttgctgccagcgatgctgctcaacgagatcgtcgaggccaaccagttcgcgtgggacatcgtcatggctatcgggactacgcatcgggagcccccaaggaccccgaaaccggttcctaggatgaagccggcagcaactgagctgactcccctacacgtgcggcgcgcccgagagaagcagagccatcggggtggcaccgggacgcgtggcgccaacactgccatgccgtcgtgcggccacgtgcaatcctagatccagttcaagcccacgtcaccggtcgtcgttgggcggccgtatgtgtccgccaaccgcgtatctcccaagtgcctaccgtgggcaagaaggcggtcatctcctccctcaatgcccacgcccagcatgcgctcctcaccaccaccatcaccccagtcccatggcatcgattggctccctcgagtcctccaccgtgggctaccagggctggacgactcacctggccgctgtggccaaagatattcaggatcatttgtcatccaaagggcacaaaatctcatcctttctctttggaagaggtaggtattcattgttgtcttatggtgagacttcatatttgtcatcattgtttctttgtatactattgcttcttagtcccagagtttttaattcacaactgtttatatgataatacagctccccaagtattctttagtccttgttgcacagtattttttgtccgcaattggttcaccatttattatgtgcacattgatgtaggtctatcagcagatcgactaatatatgtaataaaacgacagtgcgctagagccactttatctcagaagataatataccatctgatcgatgtcggctactaaagatggattagattaatgcaactgttgatttgtgtgacatctctaagtcatttgataggcgcccatattatctaaggtacacgtacattctgctttctcatttgaggctgctcagcaacagaacctaccactttaggagttcatagcttccatccaaatggagagaacaaatgtgataaaagaggtgcgctctgctctcttccttaaaacactagagcttggaatgtagaatcaaatgaatatgtattttgtttctggtatatcaggtattttcttatttctttctagagagagatagttgaacagatattagaagaatctagcagaagctactcaggcatttaactttattgtgtatgttatagcgccaatcaaatggaacagggtggttcattagcagtgcagtatgtgatttcctcctcatgtttcttctctctctgtaccttcataccattagaggatgtacaagcaaccatggtttatattgtctggactggcatatttattcgtagtctttgctgtgaattagtcgttcagacccttctaggagcaatgaacatcatgattgttgcatgattgctagccaattgatactctggatcttcaatgaaaccatctatttgattgctcccaaatatggaagtaggtgtgccatgcaaaaatgagtactatatgtgtccctatccttcttcatgatgtgcttttcagtacataacattatacattgatacctcagttatttttctatacctgttttcacttttcttcttatgaccatgtatttgttctctgaatttttttccatatctgatgctacatattttcgtttatatcgcagtgcaatatatttgcatttctggtgtgttgattttacttgtttactcataggatgcttttgctatcccaagcaacgagcgcggagttgctgctcgtgacagtggtgcttttgcatgggagattgttctggtgatttcctttctctttgctagaactagaaattgtagtatttgctttgtttggtttacttgttatgtttaatgttttgtcaatcagattgaagttcctgttgggagagaaaaacacttgtacttattgagaaagatgaaagcctggataagataaatttcctcatgcaacacacacatatttaacccaacaaaactgaata

SEQ ID NO: 83798 - DNA, 633 bp, Zea Mays
agagcccaatatcattgtctttataacatcgacagagctaaaaatgccactattgcccaggaacaacttcaccattcacccgtgacacaccacggcccgaccatgcgcacaaaatggcagcgcaggtgagtttcctgggcggtggtgttcatcccagcttcgcccgcgacgggacctgggttgggcacgacgccatgggttcggaggacaaagaggtcgcggctaggtcctttatgtagaggtgggcggaggtaatcagtcggccaaactgaccccgagttccccggcggccggtgagcgagcgagtcgcgcgaggggagaagaagacccagccacaggcgcccaccaaatcccaacggatttcgtcactggttcaagctccgcggagatctcaccaggaagagaaacagcgcccaacagaaaagtggataagggaggaaggagttcctgacgtccgggccccacgcgacagccaagtgggttcaagcgtgcatgtgtggctgaggcgctgcgacgtggagtgggccggcgggcgagggatacagcccaaatgaccgtgttgtttatgtacgggagatgggccgagcagcgactttgggcccaaaacgaggtcggtgaggaagcgcctcggcg

SEQ ID NO: 83799 - DNA, 2536 bp, Zea Mays
ccagactcccagtcacaaaccccaaacccctcacttgtcatcgacctgcgctttgcatccgtttcttcctccgccttcccttccctttgcagtcttgcactccactacccctcgccgcaccgctctcctctcttgacgcaaacctttccacactgctaattaatcgccatttcctcggaggatccggaggcaatggagaaggagagcaagcagggtttcttttcggcgctcaagggggaagtcgtgcgtggtctctcgccaggcagatcccgggggaagtcgctgctgcttccgcgcagccgcaagacggcggccgcggaggaagtggcgccgccagagaagctcgcccagtacgcgccggatccgctcgtcacccactccggcagcctgcggcttgccggcgaggtcctggcgccgctcatggagggcccggacgtcgccgaggacgacacgttcgccgaggattccggacggcgagacgggttcgggcagtgggtccgcggccacctgacccgtgccccgttgatcgccggcggcggcgacgggtctttccggcgctccgacctccgcctcctcctcggcgtcatgggcgcgccgctcgcgcccgtctcggtctccaccgccgagccgctgccgctcgcgcccgtcaagggcgcccccattgaatcctcgtcggcgcagtacatcctgcagcagtacttggcggcgtcgggtggcgccaaggtgctccggtcggcgcggaacgcgtacgcaatggggaaggtgcggatggtggcgtcggagttcgagacggccacgcgcgtggtcaagaaccggggcgccgccgccgccgccgccgtggagcaaggcgggttcgtgctctggcggatgtccccggacatgtggtacgtggagctggccgtcggcggcagcaaggtccgcgccggctgcaacggccgcctcgtctggcgccacacgccgtggctcggcgcccacgccgccaagggtcccgtccgcccgctccgccgagccctccagggtctggatccgctgtcgactgcggggctgttcgcggagacgctgcggcagcggagcgagggtccggcggagatcatccggcacgtggtgttcgggtacttcagccagcgcacgggcctgctggtgcaggtggaggactcgcacctgacgcgcatccagccgcacgccggcggggacgccgtgtactgggagaccaccatcagctcgttcctggaggactaccgcgcggtggacggcgtggcgatcgcgcacgcggggcggtccgccgtgacgctgttccggttcggcgagacggccatgagccacaccaagacgcgcatggaggaggcgtggaccatccaggaggccgccttcgacgtgccgggcctgtccaccgactgcttcatcccgccggcagacgtccggcgcgactccgactccgtgggcgagccctgcgagctcccgccgcgcggcgccaaggccggcgccgtgcaccccgcgtgcgacgcggtgcactcgcggcggcggcgggatgtggccccggccgatggggagctggcgacaagatctaccggacggtggagatgcgatttctgactgtgggcgacgggactgatcgagcggattcgtatcgtaagagtagcactattactagtagctaggaagaaggcgggggggaattcagcaagcaaacaatttgttcatagtactactagaaaccaaatctctctccaaatactaacgaactccatctcctcctcctaccagtcatcagtgccttgtattctgtacagatcggtgaggaagcgcctcggcgacaatgttgagctcatcaattgtactgtactccagttctagctgtatgaccgtaagaatcgcaagaatttacggtgcacaagtataccaccagattctggatatgagacgatggaactggatacttgttgcaattctacgtcacgtcttactgtgtaggcgccaggatgatcttcaagctgggtggtaaaagtggtaggtgaggtatgtcttgctgtcgacctccgtttcgtttccattccatggctttgggccttttgttttttgcttagaaactactccctccgtctccgttgcttatgaaatagacgggtcttttgttccttttggcacctatcatgtttgaccatttgtctttgtgggagggcgaatccctcggctgagtggcgagagtgtacacactccctcggaggaggagtaggcttaggcgtttgtctcgccttaggctgtctccagcagcgtcccctaaatttcgtcccctaaaggaatattccctgtactttataagacactctaaaagattctgtcctctatatcttctgtgtctccagcaacgtcccctaaattcgatcccctaaagctacagtgttaacagaattcgttttttcttttctttttctgttttctttgttttgtacccatttaatggtactgaaaggatgctaaaaattttgtaatcaataaaatttcaaataataatctaaaaactatggttcattaataa

SEQ ID NO: 83800 - DNA, 1196 bp, Zea Mays
agagggaggaagatcagcttgcgtattggtgaagagaggatccttggttgaaagtgatgtttctccatatctttataaggttaaggaagagcagttggggttcttgtgaaacgtagattgtatgaggtctataaatttttatgctctatcattacttgaatgaatcatgtatcactggcaagcaacttcagctcatactctgtaggaattctaattcacattgcattctatttaattgtttgttttatgttccgttcacacgaccatgatttttgtttgcacaaatcactatatatatcctcgttgaattaaaagtccagctttgtgtcataagcatattgtctatttccccttttggctattgcaaatagcaagtatagtttgttgtttaaatgttagtctattctgtttcaagaaaaaaagaatgcgccatcgctggggatgggtacgatgatcaaggtcagtgtttatcgagagacgttgttttgttttttatggattgtggagagaattttatgccaatgaccccaggttttgtgtgttgtttggctacgcgcagatcgtcgaacgacgaagggcaccgaggtgttcgtcagcgggctgccaatgtcgaccacggaaagcatgctcctctctcatctccacaccgtgcagtagctgctgcccgtagcatgtaatgcaatggaataagttatcaaggcaactaacactgaacatagttcttgggctccttggcagcgtcgaggcatggtatctgcccacaccattgtcagggcctcctgcgggtacccatgctcgacctacttcatcgaagatgtggtatggacaaatatacatgccactttccagatgaagtgaagagaccaaatgtggatgtcaatcaatctctagatgaaggaatgaaaggaaggagctaagttattgcactggatgtacggggtctagaaaagatggaaagattgaatgaagggttgtcattatttgatgcaatactgattgttccaatgtttcaaattgtttggaccttcttctctatttgtacaggatttgtttactttcaagaatatcaagtatttgatacgctcaggataattatgtgtgtgttaggcatgacatttgtctttgttgggatctccttgctagcacccgatgacagtaaaggaaagatggttcaagcacctccgaggactccataa

SEQ ID NO: 83801 - DNA, 1167 bp, Zea Mays
agagggaggaagatcagcttgcgtattggtgaagagaggatccttggttgaaagtgatgtttctccatatctttataaggttaaggaagagcagttggggttcttgtgaaacgtagattgtatgaggtctataaatttttatgctctatcattacttgaatgaatcatgtatcactggcaagcaacttcagctcatactctgtaggaattctaattcacattgcattctatttaattgtttgttttatgttccgttcacacgaccatgatttttgtttgcacaaatcactatatatatcctcgttgaattaaaagtccagctttgtgtcataagcatattgtctatttccccttttggctattgcaaatagcaagtatagtttgttgtttaaatgttagtctattctgtttcaagaaaaaaagaatgcgccatcgctggggatgggtacgatgatcaagatcgtcgaacgacgaagggcaccgaggtgttcgtcagcgggctgccaatgtcgaccacggaaagcatgctcctctctcatctccacaccgtgcagtagctgctgcccgtagcatgtaatgcaatggaataagttatcaaggcaactaacactgaacatagttcttgggctccttggcagcgtcgaggcatggtatctgcccacaccattgtcagggcctcctgcgggtacccatgctcgacctacttcatcgaagatgtggtatggacaaatatacatgccactttccagatgaagtgaagagaccaaatgtggatgtcaatcaatctctagatgaaggaatgaaaggaaggagctaagttattgcactggatgtacggggtctagaaaaggtgtcactttgatgccatttattagtgctgttgtacaaaagaaaaggttgaattgatgaattcatgggcaaccttataaaataaaactatattgaattcatgtgatcttgtgattttatgtaagactatcctataaataaaaactatgatttcactgtcttctctatgttgtagctagcagtgcaagcatagaacctatgaaacatggatacttggttacaaaattcaactttcagtcaagttttgttcaacaagggtctgattgagacttccatgaaactgatcgatttgtcgttgctgtcatgtatgggaactta

SEQ ID NO: 83802 - DNA, 1184 bp, Zea Mays
ctcacaagtacaagatcaaagactcgaaagcttaggttgctttgagccgtggtggatctctaggtgtgacgacatggggctgggtctcagagctcttctcaaatccgggggctatcagtctgctcttctcaatttagtgttatcttttcttttagaacaatgccaaagaaacatgacatactactttgcttgtttttgacatgatgcaaaagcaatggagtctttacttttaaacctttgttatttttgttttgattcaattctgatactgctgaaatgtacatatatctattattttgatgcaatagtggtgttttgcgatgtttaacagcttgtgtgatccaattattaaccctgctttgtatagaagagtttcttcagaatatatcaatttatgtatcctgattatggatattatgtggatattttctatctgtgaatggcccctgcactttgaatcgcttatgtcattgttagcaatcacataatatttttcttttctcttagatttaatttgtataatcatataatcattcatatattggtacaacaagatttggttcagcttctcactttgtttttaaaatgagaagaagcagacaacaaattatagtgaaggctcctctcatcccctgtcgcatggtggatcacccccatggaaccagcctagccaaagacagggtgactattcttacatgaagagactatttcgtgatctctttatctaggaaggataccagttcaacaatgtgtttgactggaccattctgaagtatcctcagataggctccaacctgcgaaccagggtaggtgaaagaaccagtggagttgctggacccttaatggataagatggagaaggccccaggagaagtgttcggtagaaggaaccctaacagtcctgtgaaccagactgacagttacgcgcaacagccacacgagaccgtatccatgtcgctaaaggaaattatgcatagcactgatcgagctgggaaaggataatggagagatcactccaaatatctataaagagatccctgccttttggacctccacttgctgatgacatgatcaaggacataaaaaaatcactggaaatattgtcaaagacccaaccaaagagaggggaggtgcacaagcgcagccactactatgagacccttgacgtatcatcgccacaacgag

SEQ ID NO: 83803 - DNA, 1115 bp, Zea Mays
atcggggacatgactatattcatagatgtgtccctgaggtgctatatgagtcaaaggaaagggttgatcatccgtaaccctagccgccatagttcctagacgatctgatctcctttagcccttgagtgacaaaaaatgtcaaactctctagggcgccggtagacactaatggttctacctcatcggctactgacgtgccaccccagctcctagattcataaggagaaggagaaacaagtctaaacggtggcgctctacgcatggacttgacaccgacaccgactttcgtcatccacctcgagctcaaagccagaaccagcttactatttcggatgttgcaacgaaggcattccttcacagtgtatgtgatagttctctttatacaggatgtaagcaatctcatgcacctgttgttgctcgcaaggttcatccctcacaagtacaagatcaaagactcgaaagcttaggagtggtggggaattgactatgagataaagaatcatgggatccacatttcccaacatggtgaaggatacagagcactcattccagagttgctttgagccgtggtggatctctaggtgtgacgacatggggctgggtctcagagctcttctcaaatccgggggctatcagtctgctcttctcaatttagtgttatcttttcttttagaacaatgccaaagaaacatgacatactactttgcttgtttttgacatgatgcaaaagcaatggagtctttacttttaaacctttgttatttttgttttgattcaattctgatactgctgaaatgtacatatatctattattttgatgcaatagtggtgttttgcgatgtttaacagcttgtgtgatccaattattaaccctgctttgtatagaagagtttcttcagaatatatcaatttatgtatcctgattatggatattatgtggatattttctatctgtgaatggcccctgcactttgaatcgcttatgtcattgttagcaatcacataatatttttcttttctcttagatttaatttgtataatcatataatcattcatatattggtacaacaagatttggttcagcttctcactttgtttttaaaatgagaagaagc

SEQ ID NO: 83804 - DNA, 1212 bp, Zea Mays
atcggggacatgactatattcatagatgtgtccctgaggtgctatatgagtcaaaggaaagggttgatcatccgtaaccctagccgccatagttcctagacgatctgatctcctttagcccttgagtgacaaaaaatgtcaaactctctagggcgccggtagacactaatggttctacctcatcggctactgacgtgccaccccagctcctagattcataaggagaaggagaaacaagtctaaacggtggcgctctacgcatggacttgacaccgacaccgactttcgtcatccacctcgagctcaaagctactgttttaaaggagaaactattagctttgggatcatccagaatattagcagagcatcaacttcaggcacaattacaagagcagcacttgaagggccagaaccagcttactatttcggatgttgcaacgaaggcattccttcacagtgtatgtgatagttctctttatacaggatgtaagcaatctcatgcacctgttgttgctcgcaaggttcatccctcacaagtacaagatcaaagactcgaaagcttaggagtggtggggaattgactatgagataaagaatcatgggatccacatttcccaacatggtgaaggatacagagcactcattccagagttgctttgagccgtggtggatctctaggtgtgacgacatggggctgggtctcagagctcttctcaaatccgggggctatcagtctgctcttctcaatttagtgttatcttttcttttagaacaatgccaaagaaacatgacatactactttgcttgtttttgacatgatgcaaaagcaatggagtctttacttttaaacctttgttatttttgttttgattcaattctgatactgctgaaatgtacatatatctattattttgatgcaatagtggtgttttgcgatgtttaacagcttgtgtgatccaattattaaccctgctttgtatagaagagtttcttcagaatatatcaatttatgtatcctgattatggatattatgtggatattttctatctgtgaatggcccctgcactttgaatcgcttatgtcattgttagcaatcacataatatttttcttttctcttagatttaatttgtataatcatataatcattcatatattggtacaacaagatttggttcagcttctcactttgtttttaaaatgagaagaagc

SEQ ID NO: 83805 - DNA, 918 bp, Zea Mays
ccagccttctctgcatacgatccactcaagttcgtgctagcagctgggatcgggacgctgcttctggtgtcactggcggttctcaggatatacctggggtggagctacgttggtgatcgcctgctgtcagcggtggtaccgtacgaagaaaccggatggtacgacggccagatgtgggtgaagccaccagaggtgttggcccgtgacaggctcctgggatcttacaaggtgaagccggtggtcaacctgctgaagcagacgctggtgggcaccggcgcgctgctcgtgggcgccgtgtcgctcttcgcgttcgccgcgccggtcgaggacttcctccacgccctgagccagcctccctcctccgccaccgcctcgtccaagccgagcttgaggaggagctgctgcggctaccagtcgaggtgatgcaggacgacgacctcgctgcggccgcggccgaggccgccgacggccggcccgtctactgcagggaccgctactaccgggccctcgccggcggtcagtactgcaggtgggacgacctgctcaactgataaatacctagagcagtattgctgtggtacgacgcggcaggacaggacgtattttttttgtcagatgggaaatttcggactgaactgctagaaattgagttcttaatggcacacaagcataaggaacagcaagaaaaagcaacacagaatcagagaaaaaacaagagtttatatattcacttttctctctttgtttctggagttacatctggtctttccgtttcttgagttacctctgatctttttgtttcttgagttacatctgtagagagtgaccttttatttacagcaaaggatgcaagggttaatacacattacagtgtgtacttctcagtttctcccctctaactaattttgccaccctcgg

SEQ ID NO: 83806 - DNA, 1588 bp, Zea Mays
gacgcaccgcacaccctagcataggaggcaaagaagtacagagggaggaggcgggcagcagatacgcggcgtgacagacacccagggccaggaagggtgctgtttatccatgctgctccggctgaagatcgtcgtcggcgtccactcggtggtgctcccggttcctgttccaggcggctatggccatggcgcctgctacgcggcagtagagccctgctggcgccgcagccggaggccagcgctagcggcggcgggtggcctcgtcgcgaggcggccgaggcagagcgccacggtggtgatggcgctgaaggaggagccggagggcagcagccgccgcggcttcgccggcggcggtccgagctgggaccccgggctggagatccaagtccccttcgagcaaagaccggtgaacgagtactctgctctcaaggatagcgccctctactcgtgggcggagctgagcccagggtccttcttcctccgcctcggcggcctgtgcctcgtgaccttcactgtgctcgcggctccaattgccgccgcaagcttcaatccaggaaaggatccactcaagttcgtgctagcagctgggatcgggacgctgcttctggtgtcactggcggttctcaggatatacctggggtggagctacgttggtgatcgcctgctgtcagcggtggtaccgtacgaagaaaccggatggtacgacggccagatgtgggtgaagccaccagaggctcctgggatcttacaaggtgaagccggtggtcaacctgctgaagcagacgctggtgggcaccggcgcgctgctcgtgggcgccgtgtcgctcttcgcgttcgccgcgccggtcgaggacttcctccacgccctgagccagcctccctcctccgccaccgcctcgtccaagccgagcttgaggtgcgcggccgtcacgtactcacgtgtgcccacggtccacggcgaacatatgctgcaagcaaagctctttgcatggtgcgtctcttctcttgttaactgcagcttcgtttcatgatgcgtgcaacgcatcgcccctacgcaggaaggaggagctgctgcggctaccagtcgaggtgatgcaggacgacgacctcgctgcggccgcggccgaggccgccgacggccggcccgtctactgcagggaccgctactaccgggccctcgccggcggtcagtactgcaggtgggacgacctgctcaactgataaatacctagagcagtattgctgtggtacgacgcggcaggacaggacgtattttttttgtcagatgggaaatttcggactgaactgctagaaattgagttcttaatggcacacaagcataaggaacagcaagaaaaagcaacacagaatcagagaaaaaacaagagtttatatattcacttttctctctttgtttctggagttacatctggtctttccgtttcttgagttacctctgatctttttgtttcttgagttacatctgtagagagtgaccttttatttacagcaaaggatgcaagggttaatacacattacagtgtgtacttctcagtttctcccctctaactaattttgccaccctcgg

SEQ ID NO: 83807 - DNA, 2269 bp, Zea Mays
tctctatccggcgccgcgagtcactttcaccagctctcactcttatccgcctgcgcgcccaccgcgccgcccacccgcgcccaccccagcgccccaaataccgctccaaccctagcctcccgccacgcctttcgatctcgggcggccatgggcaactgctgccgctcgccgaccaccatcgcgtgggaggacgtcagctcctcgcacttccccgcatccaacgcaaagaagaagccgcaccaagcgcggaacggcggcggcggcgacgggcagaagcggctctcggttctggccgggcgacgaggggagctgctcgcctgcaagtccatctccaagcgcaagctgcggacgaccatcgacgtggaggacgtgcgccgggaggtggccatcatgcgccacctgcccaagagcccgagcgtcatgtccctgcgggaggcgtgcggggacgagggcaccgtccacctcgtcatggagctctgcgagggcggcgagctcttggaccgcatcgtcgcgcaggggcactacaccgagtgcgccgccaccaatgtcacccgcaccatcgtcgtggtcgtccagctctaccatcggcatgacatcatccaccgcgacctcaagccggagaacatcctcttcaccaataagaaggagaactcgccactcatggtctctccatcttcttcaagcctagagatgagaaagaagaaagttgaaagatgggaccaatttgttgatgtcatagagcaaattaagaaggttgcatctgaaatcaggcctgcagattttgtaccctttagaattcatgtggatcagtctgatcagtctttaagaaagctggaggagctaacgaaagagctgcaatcccttcagaaggagaagagtgatcggctgaagcaagtcatggaacatcttaacactttgcattcgttatgcgaggtgcttggtgtagacttcaaacaaacagtaaatgaggtgcaccctagcctgggtgaggctgatgaatcaaagaacctaagcaactgtacaattgaaagccctgcatcagctacaagcagactgcgtgaattgaaagtccagaggatgcaaaagcttcaagatttggcctctagcatgcttgaactttggaatctcatggatacaccacttgaagaacagcagatgttccagaatgtaacgtgcaatattgctgcttctgaacatgaaataactgagcctaacaccctctctattgacttcctcagctacgtggaatctgaagttttaagactcgagcaacttaaagcgagcaagatgaaagaccttgttataaaaaagaagacagaactggaagagcataggagacgtgctcatttgtttggcgaggaaggctatgcagctgaatttcgcgatgaggctattgaggcagttggatgacacaatcatcaaaaccattgagactgctcccaacaatgaactgaaaaaagcaaaagaaatcattcaacgtattcgccgaagagaactttacaaggctggaaaaaagttgcttctcattactaattcagatttccattatacaaacaaaatgatgaatcatgcattcaatcgctttcttcctaatgatgtgggatggagagatctgtttgaaatggttatagtctctacaaggaagccagaatttctccagctttcacatccattgtatgaggttgtaacagatgatggactgatgcatccctgttttaaagtaaattcagttttgcaaccagtattctgttccaaaggacaaactagagcatttcaaaaatattactgcacaggacatagtttgttcgcagaaatcttctgaggtgctgctgaaggaagaggatgttgcagtaagcaatgttaagatagatcttactcgtggaaaagataacccccttgacagcatcaagttctttaaggattccggctctcatcaagtgactcctcccctcacgatgactttgcggacagatgtctcaattctagtggtggagctacgaacaacaatccgatgtcctgatcgagagcgatggagctaatgtttgaacttgtgtttgaacttgtgaactatggatgtgaacttgtgtgaatttgtgaacttatgtatttgaacttatgtgaatttgtgaacttatatatttggacttgtgtgaatttgtgatatgaacatatatcaatgtgtttgaaatctgtattgtatgtgatattctgtgttgcatgtgatattatgtgtgtctaatttttcatttctgtattttttatttttttc

SEQ ID NO: 83808 - DNA, 2788 bp, Zea Mays
tctctatccggcgccgcgagtcactttcaccagctctcactcttatccgcctgcgcgcccaccgcgccgcccacccgcgcccaccccagcgccccaaataccgctccaaccctagcctcccgccacgcctttcgatctcgggcggccatgggcaactgctgccgctcgccgaccaccatcgcgtgggaggacgtcagctcctcgcacttccccgcatccaacgcaaagaagaagccgcaccaagcgcggaacggcggcggcggcgacgggcagaagcggctctcggttctggccgggcgacgaggggtgcgaggtcatcgggatcgatgacaagtacgtcctggacagggagctcgaccgcggggagttcggggtgacatacctgtgtatggatcgggacaccaaggagctgctcgcctgcaagtccatctccaagcgcaagctgcggacgaccatcgacgtggaggacgtgcgccgggaggtggccatcatgcgccacctgcccaagagcccgagcgtcatgtccctgcgggaggcgtgcggggacgagggcaccgtccacctcgtcatggagctctgcgagggcggcgagctcttggaccgcatcgtcgcgcaggggcactacaccgagtgcgccgccaccaatgtcacccgcaccatcgtcgtggtcgtccagctctaccatcggcatgacatcatccaccgcgacctcaagccggagaacatcctcttcaccaataagaaggagaactcgccactcatggtctctccatcttcttcaagcctagagatgagaaagaagaaagttgaaagatgggaccaatttgttgatgtcatagagcaaattaagaaggttgcatctgaaatcaggcctgcagattttgtaccctttagaattcatgtggatcagtctgatcagtctttaagaaagctggaggagctaacgaaagagctgcaatcccttcagaaggagaagagtgatcggctgaagcaagtcatggaacatcttaacactttgcattcgttatgcgaggtgcttggtgtagacttcaaacaaacagtaaatgaggtgcaccctagcctgggtgaggctgatgaatcaaagaacctaagcaactgtacaattgaaagccctgcatcagctacaagcagactgcgtgaattgaaagtccagaggatgcaaaagcttcaagatttggcctctagcatgcttgaactttggaatctcatggatacaccacttgaagaacagcagatgttccagaatgtaacgtgcaatattgctgcttctgaacatgaaataactgagcctaacaccctctctattgacttcctcagctacgtggaatctgaagttttaagactcgagcaacttaaagcgagcaagatgaaagaccttgttataaaaaagaagacagaactggaagagcataggagacgtgctcatttgtttggcgaggaaggctatgcagctgaatttcgcgatgaggctattgaggcagttggatgacacaatcatcaaaaccattgagactgctcccaacaatgaactgaaaaaagcaaaagaaatcattcaacgtattcgccgaagagaactttacaaggtgcataggatattcatcatcgcacgaaggcgaagcacattgagattgaaatccacttcatccgtaaaaaggttgctttgtggcaccttcgagtgctacatgtcccttctgcacatcagtccatggacatcatgacttagggactgtctgtacagttgtttagtgactttcagtccagtctatgcgtccagttctctccagatgtgaatgcgggacgggtattagagatatgtatagtctagagatatgtatgtacttgtatttcaaggtgtattttgactatacacatgaaagtcaccctttctataacgagtgtgaggtgttctcttaatcttctacatttatggtgttgtatgatcaattcagtgtaacaaaaccattgtgctgatatgctggcttttcctccaacaaactatcaggctggaaaaaagttgcttctcattactaattcagatttccattatacaaacaaaatgatgaatcatgcattcaatcgctttcttcctaatgatgtgggatggagagatctgtttgaaatggttatagtctctacaaggaagccagaatttctccagctttcacatccattgtatgaggttgtaacagatgatggactgatgcatccctgttttaaagtaaattcagttttgcaaccagtattctgttccaaaggacaaactagagcatttcaaaaatattactgcacaggacatagtttgttcgcagaaatcttctgaggtgctgctgaaggaagaggatgttgcagtaagcaatgttaagatagatcttactcgtggaaaagataacccccttgacagcatcaagttctttaaggattccggctctcatcaagtgactcctcccctcacgatgactttgcggacagatgtctcaattctagtggtggagctacgaacaacaatccgatgtcctgatcgagagcgatggagctaatgtttgaacttgtgtttgaacttgtgaactatggatgtgaacttgtgtgaatttgtgaacttatgtatttgaacttatgtgaatttgtgaacttatatatttggacttgtgtgaatttgtgatatgaacatatatcaatgtgtttgaaatctgtattgtatgtgatattctgtgttgcatgtgatattatgtgtgtctaatttttcatttctgtattttttatttttttc

SEQ ID NO: 83809 - DNA, 2219 bp, Zea Mays
tctctatccggcgccgcgagtcactttcaccagctctcactcttatccgcctgcgcgcccaccgcgccgcccacccgcgcccaccccagcgccccaaataccgctccaaccctagcctcccgccacgcctttcgatctcgggcggccatgggcaactgctgccgctcgccgaccaccatcgcgtgggaggacgtcagctcctcgcacttccccgcatccaacgcaaagaagaagccgcaccaagcgcggaacggcggcggcggcgacgggcagaagcggctctcggttctggccgggcgacgaggggagctgctcgcctgcaagtccatctccaagcgcaagctgcggacgaccatcgacgtggaggacgtgcgccgggaggtggccatcatgcgccacctgcccaagagcccgagcgtcatgtccctgcgggaggcgtgcggggacgagggcaccgtccacctcgtcatggagctctgcgagggcggcgagctcttggaccgcatcgtcgcgcaggggcactacaccgagtgcgccgccaccaatgtcacccgcaccatcgtcgtggtcgtccagctctaccatcggcatgacatcatccaccgcgacctcaagccggagaacatcctcttcaccaataagaaggagaactcgccactcatggtctctccatcttcttcaagcctaattttgtaccctttagaattcatgtggatcagtctgatcagtctttaagaaagctggaggagctaacgaaagagctgcaatcccttcagaaggagaagagtgatcggctgaagcaagtcatggaacatcttaacactttgcattcgttatgcgaggtgcttggtgtagacttcaaacaaacagtaaatgaggtgcaccctagcctgggtgaggctgatgaatcaaagaacctaagcaactgtacaattgaaagccctgcatcagctacaagcagactgcgtgaattgaaagtccagaggatgcaaaagcttcaagatttggcctctagcatgcttgaactttggaatctcatggatacaccacttgaagaacagcagatgttccagaatgtaacgtgcaatattgctgcttctgaacatgaaataactgagcctaacaccctctctattgacttcctcagctacgtggaatctgaagttttaagactcgagcaacttaaagcgagcaagatgaaagaccttgttataaaaaagaagacagaactggaagagcataggagacgtgctcatttgtttggcgaggaaggctatgcagctgaatttcgcgatgaggctattgaggcagccataattttccagcctatcttacatcccctaaaattacagttggatgacacaatcatcaaaaccattgagactgctcccaacaatgaactgaaaaaagcaaaagaaatcattcaacgtattcgccgaagagaactttacaaggctggaaaaaagttgcttctcattactaattcagatttccattatacaaacaaaatgatgaatcatgcattcaatcgctttcttcctaatgatgtgggatggagagatctgtttgaaatggttatagtctctacaaggaagccagaatttctccagctttcacatccattgtatgaggttgtaacagatgatggactgatgcatccctgttttaaagtaaattcagttttgcaaccagtattctgttccaaaggacaaactagagcatttcaaaaatattactgcacaggacatagtttgttcgcagaaatcttctgaggtgctgctgaaggaagaggatgttgcagtaagcaatgttaagatagatcttactcgtggaaaagataacccccttgacagcatcaagttctttaaggattccggctctcatcaagtgactcctcccctcacgatgactttgcggacagatgtctcaattctagtggtggagctacgaacaacaatccgatgtcctgatcgagagcgatggagctaatgtttgaacttgtgtttgaacttgtgaactatggatgtgaacttgtgtgaatttgtgaacttatgtatttgaacttatgtgaatttgtgaacttatatatttggacttgtgtgaatttgtgatatgaacatatatcaatgtgtttgaaatctgtattgtatgtgatattctgtgttgcatgtgatattatgtgtgtctaatttttcatttctgtattttttatttttttc

SEQ ID NO: 83810 - DNA, 2346 bp, Zea Mays
tctctatccggcgccgcgagtcactttcaccagctctcactcttatccgcctgcgcgcccaccgcgccgcccacccgcgcccaccccagcgccccaaataccgctccaaccctagcctcccgccacgcctttcgatctcgggcggccatgggcaactgctgccgctcgccgaccaccatcgcgtgggaggacgtcagctcctcgcacttccccgcatccaacgcaaagaagaagccgcaccaagcgcggaacggcggcggcggcgacgggcagaagcggctctcggttctggccgggcgacgaggggagctgctcgcctgcaagtccatctccaagcgcaagctgcggacgaccatcgacgtggaggacgtgcgccgggaggtggccatcatgcgccacctgcccaagagcccgagcgtcatgtccctgcgggaggcgtgcggggacgagggcaccgtccacctcgtcatggagctctgcgagggcggcgagctcttggaccgcatcgtcgcgcaggggcactacaccgagtgcgccgccaccaatgtcacccgcaccatcgtcgtggtcgtccagctctaccatcggcatgacatcatccaccgcgacctcaagccggagaacatcctcttcaccaataagaaggagaactcgccactcatggtctctccatcttcttcaagcctaaaagaaattggtacactcaaataccatccaaagtctgctcggttatactttattactcacggtaaggtcccatacttggaggagatgagaaagaagaaagttgaaagatgggaccaatttgttgatgtcatagagcaaattaagaaggttgcatctgaaatcaggcctgcagattttgtaccctttagaattcatgtggatcagtctgatcagtctttaagaaagctggaggagctaacgaaagagctgcaatcccttcagaaggagaagagtgatcggctgaagcaagtcatggaacatcttaacactttgcattcgttatgcgaggtgcttggtgtagacttcaaacaaacagtaaatgaggtgcaccctagcctgggtgaggctgatgaatcaaagaacctaagcaactgtacaattgaaagccctgcatcagctacaagcagactgcgtgaattgaaagtccagaggatgcaaaagcttcaagatttggcctctagcatgcttgaactttggaatctcatggatacaccacttgaagaacagcagatgttccagaatgtaacgtgcaatattgctgcttctgaacatgaaataactgagcctaacaccctctctattgacttcctcagctacgtggaatctgaagttttaagactcgagcaacttaaagcgagcaagatgaaagaccttgttataaaaaagaagacagaactggaagagcataggagacgtgctcatttgtttggcgaggaaggctatgcagctgaatttcgcgatgaggctattgagttggatgacacaatcatcaaaaccattgagactgctcccaacaatgaactgaaaaaagcaaaagaaatcattcaacgtattcgccgaagagaactttacaaggctggaaaaaagttgcttctcattactaattcagatttccattatacaaacaaaatgatgaatcatgcattcaatcgctttcttcctaatgatgtgggatggagagatctgtttgaaatggttatagtctctacaaggaagccagaatttctccagctttcacatccattgtatgaggttgtaacagatgatggactgatgcatccctgttttaaagtaaattcagttttgcaaccagtattctgttccaaaggacaaactagagcatttcaaaaatattactgcacaggacatagtttgttcgcagaaatcttctgaggtgctgctgaaggaagaggatgttgcagtaagcaatgttaagatagatcttactcgtggaaaagataacccccttgacagcatcaagttctttaaggattccggctctcatcaagtgactcctcccctcacgatgactttgcggacagatgtctcaattctagtggtggagctacgaacaacaatccgatgtcctgatcgagagcgatggagctaatgtttgaacttgtgtttgaacttgtgaactatggatgtgaacttgtgtgaatttgtgaacttatgtatttgaacttatgtgaatttgtgaacttatatatttggacttgtgtgaatttgtgatatgaacatatatcaatgtgtttgaaatctgtattgtatgtgatattctgtgttgcatgtgatattatgtgtgtctaatttttcatttctgtattttttatttttttc

SEQ ID NO: 83811 - DNA, 2522 bp, Zea Mays
acgagcgctctctgccatcgctgtcaccgccacgagttgtgttctcctcctccctcgccccatccgccgcgcccttccccgccgttgacccggtgggcccgggccaaggcctcggccgtgatctgcccaccgccccgacgccccgtccgtctacgcagcgggcggagactggcgcgctgcgtcgtggatggagcctcccgcgagctacatggccccgccgccacgccaccgagttataaagagcaacgagagggacgaacattccccacctgagaaacttaaactaataagggagggacaagaaagaaaaaaaaggcgaaggttacacattgccgaaggagttgcacacgatatgttagccttttgcaccattaatctagctggggagtcgcatctgctattgccttctatttcatgtcctgtgtgcaattcatgtgattgttaggtgagacgaaccagccaccaccgtatcagagcgagtatgcttttcaaaccagtttgggatgggtaactgaaacttcccagctagctagattaatggattttcacctttacacacgttgatggataactgaaacttcccaactagattaatggattttcatctttacacccctaggatagataagggtgtccccaacgggttcaccaaatcgccagtgaagttgaaagctgaaaataataataaaaagaagtgaagagcgtaggtatgcagactgcagagcaacggagctgagagagggagcttactgtggcagcagcagcactagctcattgctctatctcctattcgcccaatagaatttcacaagagctggcaatttaagcactgttggttacgcccttataatcttggggctagattggacgtttggtttggactttggagaatgctagggtgtttcgtctggtggcagttggcacccagttgtatttggcaaataaacgaatggcacaaccttgtcctccccaaatctggtgagatctctattgagattatactattagagtttggtgtttggtctttggggttgggttttggggatggacaatgggagtttcttgcctgacggcttttgctgggctggcagcgaggcaaagcagcaatgacaccactagcccagcaggaggatttctgtctagtggagttgaggcttggggaacaccggcgctttattattttgattccgtgtggaatgaacaaaagggtcttagataccaaactactgataagcagtatggaaaatggagtaaccctgatgacaaggcaacagtggggaactatttcctcaattcttgtggagagatccaccttaatccggagcatttagggaatgagagactaatgtggggatcttctgaaatgaaacatgatctaggaagttttagttccaaggtttcttcggctgagtctagatttattcagacttgtgaaggttcatctgagtttcctgatgtcaataacactagtgttgattcgccttgttggaagggcacaccagcctcgtaccagtgttcgtttgggattatggaaaataacggtgttcctcctgtggcgataagaacagcaggctacatcaattcacataaaaaccagaagccccctgagttgggttctgggtatccatggcgattctgtgaacaccaagtagcattgagttctgagattgacccttttaaggtgttcaagttgcccgaaagatgtaaaatctccaaagatcataaagaagttccaccaattgatgtcaaggttcttaatgacatgactactcatgcttgttgtttgcctgacaaacagcattccgcaacacagaaatgctatgattctagagaagattctcagaatgtgataacttcaagtcaacgggaaagtttgtgtcctgccagcaagccaaaacttttagttgtggagaaggaagaaagcactcacacaagaggtgaagacccttctcaatgttatccaggtgttgaggggaatatgatgaatatggcttctgaatccagctctagcactcgggcaatatttctgaaactaatgcacaacctatcagtagtgcttctattgacatgcaagggtggttctttgttgcacgaagatgaagaggaccttctgcaatcagtgattcaaaatcttacagctgccagttccaaaagaagcaaggttgaacaaaaaaactggtgatgggttgagcaactccagtcaaatgaaattaaaaaatattaactgtgcgaggaacaacttttggcggtcaatgcatgaagactcagtacgggagaatgctgattcagaatttaaggccactgtttcacagtatatcactgcgggtagccttactaatcaccaggaggataagatgcttgacaacactaaagtttctcaagcgtcaatctatagaaacttgtggattgaagcagaagcttcagcttgtaaactcaaatatgagcttcaacatgctcacctgggcttgagacagcaaaaggcctcaatgtcacagtagaaggagcaattatggacatcagcg

SEQ ID NO: 83812 - DNA, 2105 bp, Zea Mays
cttggcagctagattagccttttggttttgtgttgggtgtgggtgggtggtaatggaggatcatggtaggctctgccaaaaggttttaactgtatatttagtaggcttgcaggcagggcgggttttttatgggaacccgcatatccaccccacaaaatcatgctttgtggcagatgcagaccagctgcagcagtttttcggcatcatgtctgttgtttcattaagcccatcggtacccttttgtttctacttatgacaaatacatgacacagctttcgtcatgttcaacagatacacaacctcacatctcttctacacaatatgtcaattcatctaaaatggccaatacaaccattccattgatgaatgacactattggcgaaagttcctttttttttccttatatgaattcttgcaaaaatcaagctttattattttgattccgtgtggaatgaacaaaagggtcttagataccaaactactgataagcagtatggaaaatggagtaaccctgatgacaaggcaacagtggggaactatttcctcaattcttgtggagagatccaccttaatccggagcatttagggaatgagagactaatgtggggatcttctgaaatgaaacatgatctaggaagttttagttccaaggtttcttcggctgagtctagatttattcagacttgtgaaggttcatctgagtttcctgatgtcaataacactagtgttgattcgccttgttggaagggcacaccagcctcgtaccagtgttcgtttgggattatggaaaataacggtgttcctcctgtggcgataagaacagcaggctacatcaattcacataaaaaccagaagccccctgagttgggttctgggtatccatggcgattctgtgaacaccaagtagcattgagttctgagattgacccttttaaggtgttcaagttgcccgaaagatgtaaaatctccaaagatcataaagaagttccaccaattgatgtcaaggttcttaatgacatgactactcatgcttgttgtttgcctgacaaacagcattccgcaacacagaaatgctatgattctagagaagattctcagaatgtgataacttcaagtcaacgggaaagtttgtgtcctgccagcaagccaaaacttttagttgtggagaaggaagaaagcactcacacaagaggtgaagacccttctcaatgttatccagggtggttctttgttgcacgaagatgaagaggaccttctgcaatcagtgattcaaaatcttacagctgccagttccaaaagaagcaaggttgaacaaaaaaactggtgatgggttgagcaactccagtcaaatgaaattaaaaaatattaactgtgcgaggaacaacttttggcggtcaatgcatgaagactcagtacgggagaatgctgattcagaatttaaggccactgtttcacagtatatcactgcgggtagccttactaatcaccaggaggataagatgcttgacaacactaaagtttctcaagcgtcaatctatagaaacttgtggattgaagcagaagcttcagcttgtaaactcaaatatgagcttcaacatgctcacctgggcttgagacagcaaaaggcctcaatgtcacagtagaaggaagctggagggagtagcaagatggatatataaattaatattttcacataagagtctcaggaaccgtgcctaatctcctctccagttgaccagtatggcggttcacctacaaaatgggagcatgttctgaaggagaatttcttccatccaggcaaataggtgaaatctgaaccataaaccagaaagctatggtttcagctcatgttgcttcaaaatgttgatgcttcttgtaaatatgatatatacatcctctcctccccaacctttatcagtatgttcaataatctgcatatcggtgatcatgtaacccctcatggtgctatacggaagtaatctggtttttctgcttgggtctatgccaaagtttgtctataaacgacactatggtctggactggaccgagagttcgcctgcttgttgtcaaccttacatatctgttagggcatgtttgtttaggat

SEQ ID NO: 83813 - DNA, 2638 bp, Zea Mays
aggcgcatgggatggcagtggcattggggcagtaccgcagtagagctcgggaagaagcagtttgctcaaagctgaataggaccctggccattcaatctccatccagtggccagaacatggggtgctggaagagatttttttaccagaataatattgtatagacagatcctttgatttactagtgttgacgagttacaggtgaagttcattttaggctctcacaatgagatgtaactggatttttagcatctgtttatgacaattacagttttggatagataacttggcagctagattagccttttggttttgtgttgggtgtgggtgggtggtaatggaggatcatggtaggctctgccaaaaggttttaactgtatatttagtaggcttgcaggcagggcgggttttttatgggaacccgcatatccaccccacaaaatcatgctttgtggcagatgcagaccagctgcagcagtttttcggcatcatgtctgttgtttcattaagcccatcggtacccttttgtttctacttatgacaaatacatgacacagctttcgtcatgttcaacagatacacaacctcacatctcttctacacaatatgtcaattcatctaaaatggccaatacaaccattccattgatgaatgacactattggcgaaagttcctttttttttccttatatgaattcttgcaaaaatcaagctttattattttgattccgtgtggaatgaacaaaagggtcttagataccaaactactgataagcagtatggaaaatggagtaaccctgatgacaaggcaacagtggggaactatttcctcaattcttgtggagagatccaccttaatccggagcatttagggaatgagagactaatgtggggatcttctgaaatgaaacatgatctaggaagttttagttccaaggtttcttcggctgagtctagatttattcagacttgtgaaggttcatctgagtttcctgatgtcaataacactagtgttgattcgccttgttggaagggcacaccagcctcgtaccagtgttcgtttgggattatggaaaataacggtgttcctcctgtggcgataagaacagcaggctacatcaattcacataaaaaccagaagccccctgagttgggttctgggtatccatggcgattctgtgaacaccaagtagcattgagttctgagattgacccttttaaggtgttcaagttgcccgaaagatgtaaaatctccaaagatcataaagaagttccaccaattgatgtcaaggttcttaatgacatgactactcatgcttgttgtttgcctgacaaacagcattccgcaacacagaaatgctatgattctagagaagattctcagaatgtgataacttcaagtcaacgggaaagtttgtgtcctgccagcaagccaaaacttttaggtgaacatggtggcaaccttatagcaagcataaatgaactaatgaataaaagtgtgatgaattctattgctattactcctagaattcatactgatcatttaacaacaggaagccaacatggaatattttttctgcagttgtggagaaggaagaaagcactcacacaagaggtgaagacccttctcaatgttatccaggtgttgaggggaatatgatgaatatggcttctgaatccagctctagcactcgggcaatatttctgaaactaatgcacaacctatcagtagtgcttctattgacatgcaagggtggttctttgttgcacgaagatgaagaggaccttctgcaatcagtgattcaaaatcttacagctgccagttccaaaagaagcaaggttgaacaaaaaaactggtgatgggttgagcaactccagtcaaatgaaattaaaaaatattaactgtgcgaggaacaacttttggcggtcaatgcatgaagactcagtacgggagaatgctgattcagaatttaaggccactgtttcacaggtatatcactgcgggtagccttactaatcaccaggaggataagatgcttgacaacactaaagtttctcaagcgtcaatctatagaaacttgtggattgaagcagaagcttcagcttgtaaactcaaatatgagcttcaacatgctcacctgggcttgagacagcaaaaggcctcaatgtcacagtagaagaaggaagctggagggagtagcaagatggatatataaattaatattttcacataagagtctcaggaaccgtgcctaatctcctctccagttgaccagtatggcggttcacctacaaaatgggagcatgttctgaaggagaatttcttccatccaggcaaataggtgaaatctgaaccataaaccagaaagctatggtttcagctcatgttgcttcaaaatgttgatgcttcttgtaaatatgatatatacatcctctcctccccaacctttatcagtatgttcaataatctgcatatcggtgatcatgtaacccctcatggtgctatacggaagtaatctggtttttctgcttgggtctatgccaaagtttgtctataaacgacactatggtctggactggaccgagagttcgcctgcttgttgtcaaccttacatatctgttagggcatgtttgtttaggat

SEQ ID NO: 83814 - DNA, 1485 bp, Zea Mays
aggcgcatgggatggcagtggcattggggcagtaccgcagtagagctcgggaagaagcagtttgctcaaagctgaataggaccctggccattcaatctccatccagtggccagaacatggggtgctggaagagatttttttaccagaataatattgtatagacagatcctttgatttactagtgttgacgagttacaggtgaagttcattttaggctctcacaatgagatgtaactggatttttagcatctgtttatgacaattacagttttggatagataacttggcagctagattagccttttggttttgtgttgggtgtgggtgggtggtaatggaggatcatggtaggctctgccaaaaggttttaactgtatatttagtaggcttgcaggcagggcgggttttttatgggaacccgcatatccaccccacaaaatcatgctttgtggcagatgcagaccagctgcagcagtttttcggcatcatgtctgttgtttcattaagcccatcgttgtggagaaggaagaaagcactcacacaagaggtgaagacccttctcaatgttatccaggtgttgaggggaatatgatgaatatggcttctgaatccagctctagcactcgggcaatatttctgaaactaatgcacaacctatcagtagtgcttctattgacatgcaagggtggttctttgttgcacgaagatgaagaggaccttctgcaatcagtgattcaaaatcttacagctgccagttccaaaagaagcaaggttgaacaaaaaaactggtgatgggttgagcaactccagtcaaatgaaattaaaaaatattaactgtgcgaggaacaacttttggcggtcaatgcatgaagactcagtacgggagaatgctgattcagaatttaaggccactgtttcacagtatatcactgcgggtagccttactaatcaccaggaggataagatgcttgacaacactaaagtttctcaagcgtcaatctatagaaacttgtggattgaagcagaagcttcagcttgtaaactcaaatatgagcttcaacatgctcacctgggcttgagacagcaaaaggcctcaatgtcacagtagaagttgaccagtatggcggttcacctacaaaatgggagcatgttctgaaggagaatttcttccatccaggcaaataggtgaaatctgaaccataaaccagaaagctatggtttcagctcatgttgcttcaaaatgttgatgcttcttgtaaatatgatatatacatcctctcctccccaacctttatcagtatgttcaataatctgcatatcggtgatcatgtaacccctcatggtgctatacggaagtaatctggtttttctgcttgggtctatgccaaagtttgtctataaacgacactatggtctggactggaccgagagttcgcctgcttgttgtcaaccttacatatctgttagggcatgtttgtttaggat

SEQ ID NO: 83815 - DNA, 3456 bp, Zea Mays
cgaaggttacacattgccgaaggagttgcacacgatatgttagccttttgcaccattaatctagctggggagtcgcatctgctattgccttctatttcatgtcctgtgtgcaattcatgtgattgttaggtgagacgaaccagccaccaccgtatcagagcgagtatgcttttcaaaccagtttgggatgggtaactgaaacttcccagctagctagattaatggattttcacctttacacacgttgatggataactgaaacttcccaactagattaatggattttcatctttacacccctaggatagataagggtgtccccaacgggttcaccaaatcgccagtgaagttgaaagctgaaaataataataaaaagaagtgaagagcgtaggtatgcagactgcagagcaacggagctgagagagggagcttactgtggcagcagcagcactagctcattgctctatctcctattcgcccaatagaatttcacaagagctggcaatttaagcactgttggttacgcccttataatcttggggctagattggacgtttggtttggactttggagaatgctagggtgtttcgtctggtggcagttggcacccagttgtatttggcaaataaacgaatggcacaaccttgtcctccccaaatctggtgagatctctattgagattatactattagagtttggtgtttggtctttggggttgggttttggggatggacaatgggagtttcttgcctgacggcttttgctgggctggcagcgaggcaaagcagcaatgacaccactagcccagcaggaggatttctgtctagtggagttgaggcttggggaacaccggcggtggagtgagggataaggaggtggttgccgcatgcgggttaatttcttgctggagttccatgctggcttcagcaaaaccctagcctgctgcggcagggtgaaggcgcatgggatggcagtggcattggggcagtaccgcagtagagctcgggaagaagcagtttgctcaaagctgaataggaccctggccattcaatctccatccagtggccagaacatggggtgctggaagagatttttttaccagaataatattgtatagacagatcctttgatttactagtgttgacgagttacaggtgaagttcattttaggctctcacaatgagatgtaactggatttttagcatctgtttatgacaattacagttttggatagataacttggcagctagattagccttttggttttgtgttgggtgtgggtgggtggtaatggaggatcatggtaggctctgccaaaaggttttaactgtatatttagtaggcttgcaggcagggcgggttttttatgggaacccgcatatccaccccacaaaatcatgctttgtggcagatgcagaccagctgcagcagtttttcggcatcatgtctgttgtttcattaagcccatcggtacccttttgtttctacttatgacaaatacatgacacagctttcgtcatgttcaacagatacacaacctcacatctcttctacacaatatgtcaattcatctaaaatggccaatacaaccattccattgatgaatgacactattggcgaaagttcctttttttttccttatatgaattcttgcaaaaatcaagctttattattttgattccgtgtggaatgaacaaaagggtcttagataccaaactactgataagcagtatggaaaatggagtaaccctgatgacaaggcaacagtggggaactatttcctcaattcttgtggagagatccaccttaatccggagcatttagggaatgagagactaatgtggggatcttctgaaatgaaacatgatctaggaagttttagttccaaggtttcttcggctgagtctagatttattcagacttgtgaaggttcatctgagtttcctgatgtcaataacactagtgttgattcgccttgttggaagggcacaccagcctcgtaccagtgttcgtttgggattatggaaaataacggtgttcctcctgtggcgataagaacagcaggctacatcaattcacataaaaaccagaagccccctgagttgggttctgggtatccatggcgattctgtgaacaccaagtagcattgagttctgagattgacccttttaaggtgttcaagttgcccgaaagatgtaaaatctccaaagatcataaagaagttccaccaattgatgtcaaggttcttaatgacatgactactcatgcttgttgtttgcctgacaaacagcattccgcaacacagaaatgctatgattctagagaagattctcagaatgtgataacttcaagtcaacgggaaagtttgtgtcctgccagcaagccaaaacttttagttgtggagaaggaagaaagcactcacacaagaggtgaagacccttctcaatgttatccaggtgttgaggggaatatgatgaatatggcttctgaatccagctctagcactcgggcaatatttctgaaactaatgcacaacctatcagtagtgcttctattgacatgcaagggtggttctttgttgcacgaagatgaagaggaccttctgcaatcagtgattcaaaatcttacagctgccagttccaaaagaagcaaggttgaacaaaaaaactggtgatgggttgagcaactccagtcaaatgaaattaaaaaatattaactgtgcgaggaacaacttttggcggtcaatgcatgaagactcagtacgggagaatgctgattcagaatttaaggccactgtttcacagtatatcactgcgggtagccttactaatcaccaggaggataagatgcttgacaacactaaagtttctcaagcgtcaatctatagaaacttgtggattgaagcagaagcttcagcttgtaaactcaaatatgagcttcaacatgctcacctgggcttgagacagcaaaaggcctcaatgtcacagtagaagaaggaagctggagggagtagcaagatggatatataaattaatattttcacataagagtctcaggaaccgtgcctaatctcctctccagttgaccagtatggcggttcacctacaaaatgggagcatgttctgaaggagaatttcttccatccaggcaaataggtgaaatctgaaccataaaccagaaagctatggtttcagctcatgttgcttcaaaatgttgatgcttcttgtaaatatgatatatacatcctctcctccccaacctttatcagtatgttcaataatctgcatatcggtgatcatgtaacccctcatggtgctatacggaagtaatctggtttttctgcttgggtctatgccaaagtttgtctataaacgacactatggtctggactggaccgagagttcgcctgcttgttgtcaaccttacatatctgttagggcatgtttgtttaggat

SEQ ID NO: 83816 - DNA, 4090 bp, Zea Mays
acgagcgctctctgccatcgctgtcaccgccacgagttgtgttctcctcctccctcgccccatccgccgcgcccttccccgccgttgacccggtgggcccgggccaaggcctcggccgtgatctgcccaccgccccgacgccccgtccgtctacgcagcgggcggagactggcgcgctgcgtcgtggatggagcctcccgcgagctacatggccccgccgccacgccaccgagttataaagagcaacgagagggacgaacattccccacctgagaaacttaaactaataagggagggacaagaaagaaaaaaaaggcgaaggttacacattgccgaaggagttgcacacgatatgttagccttttgcaccattaatctagctggggagtcgcatctgctattgccttctatttcatgtcctgtgtgcaattcatgtgattgttaggtgagacgaaccagccaccaccgtatcagagcgagtatgcttttcaaaccagtttgggatgggtaactgaaacttcccagctagctagattaatggattttcacctttacacacgttgatggataactgaaacttcccaactagattaatggattttcatctttacacccctaggatagataagggtgtccccaacgggttcaccaaatcgccagtgaagttgaaagctgaaaataataataaaaagaagtgaagagcgtaggtatgcagactgcagagcaacggagctgagagagggagcttactgtggcagcagcagcactagctcattgctctatctcctattcgcccaatagaatttcacaagagctggcaatttaagcactgttggttacgcccttataatcttggggctagattggacgtttggtttggactttggagaatgctagggtgtttcgtctggtggcagttggcacccagttgtatttggcaaataaacgaatggcacaaccttgtcctccccaaatctggtgagatctctattgagattatactattagagtttggtgtttggtctttggggttgggttttggggatggacaatgggagtttcttgcctgacggcttttgctgggctggcagcgaggcaaagcagcaatgacaccactagcccagcaggaggatttctgtctagtggagttgaggcttggggaacaccggcggtggagtgagggataaggaggtggttgccgcatgcgggttaatttcttgctggagttccatgctggcttcagcaaaaccctagcctgctgcggcagggtgaaggcgcatgggatggcagtggcattggggcagtaccgcagtagagctcgggaagaagcagtttgctcaaagctgaataggaccctggccattcaatctccatccagtggccagaacatggggtgctggaagagatttttttaccagaataatattgtatagacagatcctttgatttactagtgttgacgagttacaggtgaagttcattttaggctctcacaatgagatgtaactggatttttagcatctgtttatgacaattacagttttggatagataacttggcagctagattagccttttggttttgtgttgggtgtgggtgggtggtaatggaggatcatggtaggctctgccaaaaggttttaactgtatatttagtaggcttgcaggcagggcgggttttttatgggaacccgcatatccaccccacaaaatcatgctttgtggcagatgcagaccagctgcagcagtttttcggcatcatgtctgttgtttcattaagcccatcggtacccttttgtttctacttatgacaaatacatgacacagctttcgtcatgttcaacagatacacaacctcacatctcttctacacaatatgtcaattcatctaaaatggccaatacaaccattccattgatgaatgacactattggcgaaagttcctttttttttccttatatgaattcttgcaaaaatcaagctttattattttgattccgtgtggaatgaacaaaagggtcttagataccaaactactgataagcagtatggaaaatggagtaaccctgatgacaaggcaacagtggggaactatttcctcaattcttgtggagagatccaccttaatccggagcatttagggaatgagagactaatgtggggatcttctgaaatgaaacatgatctaggaagttttagttccaaggtttcttcggctgagtctagatttattcagacttgtgaaggttcatctgagtttcctgatgtcaataacactagtgttgattcgccttgttggaagggcacaccagcctcgtaccagtgttcgtttgggattatggaaaataacggtgttcctcctgtggcgataagaacagcaggctacatcaattcacataaaaaccagaagccccctgagttgggttctgggtatccatggcgattctgtgaacaccaagtagcattgagttctgagattgacccttttaaggtgttcaagttgcccgaaagatgtaaaatctccaaagatcataaagaagttccaccaattgatgtcaaggttcttaatgacatgactactcatgcttgttgtttgcctgacaaacagcattccgcaacacagaaatgctatgattctagagaagattctcagaatgtgataacttcaagtcaacgggaaagtttgtgtcctgccagcaagccaaaacttttagttgtggagaaggaagaaagcactcacacaagaggtgaagacccttctcaatgttatccaggtgttgaggggaatatgatgaatatggcttctgaatccagctctagcactcgggcaatatttctgaaactaatgcacaacctatcagtagtgcttctattgacatgcaagggtggttctttgttgcacgaagatgaagaggaccttctgcaatcagtgattcaaaatcttacagctgccagttccaaaagaagcaaggttgaacaaaaaaactggtgatgggttgagcaactccagtcaaatgaaattaaaaaatattaactgtgcgaggaacaacttttggcggtcaatgcatgaagactcagtacgggagaatgctgattcagaatttaaggccactgtttcacagtatatcactgcgggtagccttactaatcaccaggaggataagatgcttgacaacactaaagtttctcaagcgtcaatctatagaaacttgtggattgaagcagaagcttcagcttgtaaactcaaatatgagcttcaacatgctcacctgggcttgagacagcaaaaggcctcaatgtcacagtagaaggtactccctcgcttcacaaatgtaagcatttctagcatttttgggccatttaggaggaagggaaatgactgtgatatccctcaatcaatcaccaagattacagagactcagttaatgccttgctttcgtatagatgccataaacgccaagtgctaattaaaactttaaacaccaagattgtattgatgctaaacatgcttgacaccaaaataaaactgcttccaaatattaatggtgagggagtgtcaggggttgattatgccagaaatgtttacgttcgtggacaattttgaatgctgaagttacatgtacctgtagaaggaagctggagggagtagcaagatggatatataaattaatattttcacataagagtctcaggaaccgtgcctaatctcctctccagttgaccagtatggcggttcacctacaaaatgggagcatgttctgaaggagaatttcttccatccaggcaaataggtgaaatctgaaccataaaccagaaagctatggtttcagctcatgttgcttcaaaatgttgatgcttcttgtaaatatgatatatacatcctctcctccccaacctttatcagtatgttcaataatctgcatatcggtgatcatgtaacccctcatggtgctatacggaagtaatctggtttttctgcttgggtctatgccaaagtttgtctataaacgacactatggtctggactggaccgagagttcgcctgcttgttgtcaaccttacatatctgttagggcatgtttgtttaggat

SEQ ID NO: 83817 - DNA, 1618 bp, Zea Mays
acgagcgctctctgccatcgctgtcaccgccacgagttgtgttctcctcctccctcgccccatccgccgcgcccttccccgccgttgacccggtgggcccgggccaaggcctcggccgtgatctgcccaccgccccgacgccccgtccgtctacgcagcgggcggagactggcgcgctgcgtcgtggatggagcctcccgcgagctacatggccccgccgccacgccaccgagttataaagttgtggagaaggaagaaagcactcacacaagaggtgaagacccttctcaatgttatccaggtgttgaggggaatatgatgaatatggcttctgaatccagctctagcactcgggcaatatttctgaaactaatgcacaacctatcagtagtgcttctattgacatgcaagggtggttctttgttgcacgaagatgaagaggaccttctgcaatcagtgattcaaaatcttacagctgccagttccaaaagaagcaaggttgaacaaaaaaactggtgatgggttgagcaactccagtcaaatgaaattaaaaaatattaactgtgcgaggaacaacttttggcggtcaatgcatgaagactcagtacgggagaatgctgattcagaatttaaggccactgtttcacagtatatcactgcgggtagccttactaatcaccaggaggataagatgcttgacaacactaaagtttctcaagcgtcaatctatagaaacttgtggattgaagcagaagcttcagcttgtaaactcaaatatgagcttcaacatgctcacctgggcttgagacagcaaaaggcctcaatgtcacagtagaaggtactccctcgcttcacaaatgtaagcatttctagcatttttgggccatttaggaggaagggaaatgactgtgatatccctcaatcaatcaccaagattacagagactcagttaatgccttgctttcgtatagatgccataaacgccaagtgctaattaaaactttaaacaccaagattgtattgatgctaaacatgcttgacaccaaaataaaactgcttccaaatattaatggtgagggagtgtcaggggttgattatgccagaaatgtttacgttcgtggacaattttgaatgctgaagttacatgtacctgtagaaggaagctggagggagtagcaagatggatatataaattaatattttcacataagagtctcaggaaccgtgcctaatctcctctccagttgaccagtatggcggttcacctacaaaatgggagcatgttctgaaggagaatttcttccatccaggcaaataggtgaaatctgaaccataaaccagaaagctatggtttcagctcatgttgcttcaaaatgttgatgcttcttgtaaatatgatatatacatcctctcctccccaacctttatcagtatgttcaataatctgcatatcggtgatcatgtaacccctcatggtgctatacggaagtaatctggtttttctgcttgggtctatgccaaagtttgtctataaacgacactatggtctggactggaccgagagttcgcctgcttgttgtcaaccttacatatctgttagggcatgtttgtttaggat

SEQ ID NO: 83818 - DNA, 3574 bp, Zea Mays
acgagcgctctctgccatcgctgtcaccgccacgagttgtgttctcctcctccctcgccccatccgccgcgcccttccccgccgttgacccggtgggcccgggccaaggcctcggccgtgatctgcccaccgccccgacgccccgtccgtctacgcagcgggcggagactggcgcgctgcgtcgtggatggagcctcccgcgagctacatggccccgccgccacgccaccgagttataaagagcaacgagagggacgaacattccccacctgagaaacttaaactaataagggagggacaagaaagaaaaaaaaggcgaaggttacacattgccgaaggagttgcacacgatatgttagccttttgcaccattaatctagctggggagtcgcatctgctattgccttctatttcatgtcctgtgtgcaattcatgtgattgttaggtgagacgaaccagccaccaccgtatcagagcgagtatgcttttcaaaccagtttgggatgggtaactgaaacttcccagctagctagattaatggattttcacctttacacacgttgatggataactgaaacttcccaactagattaatggattttcatctttacacccctaggatagataagggtgtccccaacgggttcaccaaatcgccagtgaagttgaaagctgaaaataataataaaaagaagtgaagagcgtaggtatgcagactgcagagcaacggagctgagagagggagcttactgtggcagcagcagcactagctcattgctctatctcctattcgcccaatagaatttcacaagagctggcaatttaagcactgttggttacgcccttataatcttggggctagattggacgtttggtttggactttggagaatgctagggtgtttcgtctggtggcagttggcacccagttgtatttggcaaataaacgaatggcacaaccttgtcctccccaaatctggtgagatctctattgagattatactattagagtttggtgtttggtctttggggttgggttttggggatggacaatgggagtttcttgcctgacggcttttgctgggctggcagcgaggcaaagcagcaatgacaccactagcccagcaggaggatttctgtctagtggagttgaggcttggggaacaccggcggtggagtgagggataaggaggtggttgccgcatgcgggttaatttcttgctggagttccatgctggcttcagcaaaaccctagcctgctgcggcagggtgaaggcgcatgggatggcagtggcattggggcagtaccgcagtagagctcgggaagaagcagtttgctcaaagctgaataggaccctggccattcaatctccatccagtggccagaacatggggtgctggaagagatttttttaccagaataatattgtatagacagatcctttgatttactagtgttgacgagttacaggtgaagttcattttaggctctcacaatgagatgtaactggatttttagcatctgtttatgacaattacagttttggatagataacttggcagctagattagccttttggttttgtgttgggtgtgggtgggtggtaatggaggatcatggtaggctctgccaaaaggttttaactgtatatttagtaggcttgcaggcagggcgggttttttatgggaacccgcatatccaccccacaaaatcatgctttgtggcagatgcagaccagctgcagcagtttttcggcatcatgtctgttgtttcattaagcccatcggtacccttttgtttctacttatgacaaatacatgacacagctttcgtcatgttcaacagatacacaacctcacatctcttctacacaatatgtcaattcatctaaaatggccaatacaaccattccattgatgaatgacactattggcgaaagttcctttttttttccttatatgaattcttgcaaaaatcaagctttattattttgattccgtgtggaatgaacaaaagggtcttagataccaaactactgataagcagtatggaaaatggagtaaccctgatgacaaggcaacagtggggaactatttcctcaattcttgtggagagatccaccttaatccggagcatttagggaatgagagactaatgtggggatcttctgaaatgaaacatgatctaggaagttttagttccaaggtttcttcggctgagtctagatttattcagacttgtgaaggttcatctgagtttcctgatgtcaataacactagtgttgattcgccttgttggaagggcacaccagcctcgtaccagtgttcgtttgggattatggaaaataacggtgttcctcctgtggcgataagaacagcaggctacatcaattcacataaaaaccagaagccccctgagttgggttctgggtatccatggcgattctgtgaacaccaagtagcattgagttctgagattgacccttttaaggtgttcaagttgcccgaaagatgtaaaatctccaaagatcataaagaagttccaccaattgatgtcaaggttcttaatgacatgactactcatgcttgttgtttgcctgacaaacagcattccgcaacacagaaatgctatgattctagagaagattctcagaatgtgataacttcaagtcaacgggaaagtttgtgtcctgccagcaagccaaaacttttagttgtggagaaggaagaaagcactcacacaagaggtgaagacccttctcaatgttatccagggtggttctttgttgcacgaagatgaagaggaccttctgcaatcagtgattcaaaatcttacagctgccagttccaaaagaagcaaggttgaacaaaaaaactggtgatgggttgagcaactccagtcaaatgaaattaaaaaatattaactgtgcgaggaacaacttttggcggtcaatgcatgaagactcagtacgggagaatgctgattcagaatttaaggccactgtttcacagtatatcactgcgggtagccttactaatcaccaggaggataagatgcttgacaacactaaagtttctcaagcgtcaatctatagaaacttgtggattgaagcagaagcttcagcttgtaaactcaaatatgagcttcaacatgctcacctgggcttgagacagcaaaaggcctcaatgtcacagtagaagttgaccagtatggcggttcacctacaaaatgggagcatgttctgaaggagaatttcttccatccaggcaaataggtgaaatctgaaccataaaccagaaagctatggtttcagctcatgttgcttcaaaatgttgatgcttcttgtaaatatgatatatacatcctctcctccccaacctttatcagtatgttcaataatctgcatatcggtgatcatgtaacccctcatggtgctatacggaagtaatctggtttttctgcttgggtctatgccaaagtttgtctataaacgacactatggtctggactggaccgagagttcgcctgcttgttgtcaaccttacatatctgttagggcatgtttgtttaggat

SEQ ID NO: 83819 - DNA, 3887 bp, Zea Mays
acgagcgctctctgccatcgctgtcaccgccacgagttgtgttctcctcctccctcgccccatccgccgcgcccttccccgccgttgacccggtgggcccgggccaaggcctcggccgtgatctgcccaccgccccgacgccccgtccgtctacgcagcgggcggagactggcgcgctgcgtcgtggatggagcctcccgcgagctacatggccccgccgccacgccaccgagttataaagagcaacgagagggacgaacattccccacctgagaaacttaaactaataagggagggacaagaaagaaaaaaaaggcgaaggttacacattgccgaaggagttgcacacgatatgttagccttttgcaccattaatctagctggggagtcgcatctgctattgccttctatttcatgtcctgtgtgcaattcatgtgattgttaggtgagacgaaccagccaccaccgtatcagagcgagtatgcttttcaaaccagtttgggatgggtaactgaaacttcccagctagctagattaatggattttcacctttacacacgttgatggataactgaaacttcccaactagattaatggattttcatctttacacccctaggatagataagggtgtccccaacgggttcaccaaatcgccagtgaagttgaaagctgaaaataataataaaaagaagtgaagagcgtaggtatgcagactgcagagcaacggagctgagagagggagcttactgtggcagcagcagcactagctcattgctctatctcctattcgcccaatagaatttcacaagagctggcaatttaagcactgttggttacgcccttataatcttggggctagattggacgtttggtttggactttggagaatgctagggtgtttcgtctggtggcagttggcacccagttgtatttggcaaataaacgaatggcacaaccttgtcctccccaaatctggtgagatctctattgagattatactattagagtttggtgtttggtctttggggttgggttttggggatggacaatgggagtttcttgcctgacggcttttgctgggctggcagcgaggcaaagcagcaatgacaccactagcccagcaggaggatttctgtctagtggagttgaggcttggggaacaccggcggtggagtgagggataaggaggtggttgccgcatgcgggttaatttcttgctggagttccatgctggcttcagcaaaaccctagcctgctgcggcagggtgaaggcgcatgggatggcagtggcattggggcagtaccgcagtagagctcgggaagaagcagtttgctcaaagctgaataggaccctggccattcaatctccatccagtggccagaacatggggtgctggaagagatttttttaccagaataatattgtatagacagatcctttgatttactagtgttgacgagttacaggtgaagttcattttaggctctcacaatgagatgtaactggatttttagcatctgtttatgacaattacagttttggatagataacttggcagctagattagccttttggttttgtgttgggtgtgggtgggtggtaatggaggatcatggtaggctctgccaaaaggttttaactgtatatttagtaggcttgcaggcagggcgggttttttatgggaacccgcatatccaccccacaaaatcatgctttgtggcagatgcagaccagctgcagcagtttttcggcatcatgtctgttgtttcattaagcccatcggtacccttttgtttctacttatgacaaatacatgacacagctttcgtcatgttcaacagatacacaacctcacatctcttctacacaatatgtcaattcatctaaaatggccaatacaaccattccattgatgaatgacactattggcgaaagttcctttttttttccttatatgaattcttgcaaaaatcaagctttattattttgattccgtgtggaatgaacaaaagggtcttagataccaaactactgataagcagtatggaaaatggagtaaccctgatgacaaggcaacagtggggaactatttcctcaattcttgtggagagatccaccttaatccggagcatttagggaatgagagactaatgtggggatcttctgaaatgaaacatgatctaggaagttttagttccaaggtttcttcggctgagtctagatttattcagacttgtgaaggttcatctgagtttcctgatgtcaataacactagtgttgattcgccttgttggaagggcacaccagcctcgtaccagtgttcgtttgggattatggaaaataacggtgttcctcctgtggcgataagaacagcaggctacatcaattcacataaaaaccagaagccccctgagttgggttctgggtatccatggcgattctgtgaacaccaagtagcattgagttctgagattgacccttttaaggtgttcaagttgcccgaaagatgtaaaatctccaaagatcataaagaagttccaccaattgatgtcaaggttcttaatgacatgactactcatgcttgttgtttgcctgacaaacagcattccgcaacacagaaatgctatgattctagagaagattctcagaatgtgataacttcaagtcaacgggaaagtttgtgtcctgccagcaagccaaaacttttagttgtggagaaggaagaaagcactcacacaagaggtgaagacccttctcaatgttatccaggtgttgaggggaatatgatgaatatggcttctgaatccagctctagcactcgggcaatatttctgaaactaatgcacaacctatcagtagtgcttctattgacatgcaagggtggttctttgttgcacgaagatgaagaggaccttctgcaatcagtgattcaaaatcttacagctgccagttccaaaagaagcaaggtatgatcttgaaatgcttttatttaaatattttttactatttcataatgcaatgtaaaccaaacttataatatgaatcaagacatgggcatatctcctcgctttctatgacgttttctgatctccatggtccagacattaaattaaatatagatagatgagccctttttgtttcaagccttaactcatttcatgtctccaaggttgaacaaaaaaactggtgatgggttgagcaactccagtcaaatgaaattaaaaaatattaactgtgcgaggaacaacttttggcggtcaatgcatgaagactcagtacgggagaatgctgattcagaatttaaggccactgtttcacagtatatcactgcgggtagccttactaatcaccaggaggataagatgcttgacaacactaaagtttctcaagcgtcaatctatagaaacttgtggattgaagcagaagcttcagcttgtaaactcaaatatgagcttcaacatgctcacctgggcttgagacagcaaaaggcctcaatgtcacagtagaagttgaccagtatggcggttcacctacaaaatgggagcatgttctgaaggagaatttcttccatccaggcaaataggtgaaatctgaaccataaaccagaaagctatggtttcagctcatgttgcttcaaaatgttgatgcttcttgtaaatatgatatatacatcctctcctccccaacctttatcagtatgttcaataatctgcatatcggtgatcatgtaacccctcatggtgctatacggaagtaatctggtttttctgcttgggtctatgccaaagtttgtctataaacgacactatggtctggactggaccgagagttcgcctgcttgttgtcaaccttacatatctgttagggcatgtttgtttaggat

SEQ ID NO: 83820 - DNA, 4180 bp, Zea Mays
acgagcgctctctgccatcgctgtcaccgccacgagttgtgttctcctcctccctcgccccatccgccgcgcccttccccgccgttgacccggtgggcccgggccaaggcctcggccgtgatctgcccaccgccccgacgccccgtccgtctacgcagcgggcggagactggcgcgctgcgtcgtggatggagcctcccgcgagctacatggccccgccgccacgccaccgagttataaagagcaacgagagggacgaacattccccacctgagaaacttaaactaataagggagggacaagaaagaaaaaaaaggcgaaggttacacattgccgaaggagttgcacacgatatgttagccttttgcaccattaatctagctggggagtcgcatctgctattgccttctatttcatgtcctgtgtgcaattcatgtgattgttaggtgagacgaaccagccaccaccgtatcagagcgagtatgcttttcaaaccagtttgggatgggtaactgaaacttcccagctagctagattaatggattttcacctttacacacgttgatggataactgaaacttcccaactagattaatggattttcatctttacacccctaggatagataagggtgtccccaacgggttcaccaaatcgccagtgaagttgaaagctgaaaataataataaaaagaagtgaagagcgtaggtatgcagactgcagagcaacggagctgagagagggagcttactgtggcagcagcagcactagctcattgctctatctcctattcgcccaatagaatttcacaagagctggcaatttaagcactgttggttacgcccttataatcttggggctagattggacgtttggtttggactttggagaatgctagggtgtttcgtctggtggcagttggcacccagttgtatttggcaaataaacgaatggcacaaccttgtcctccccaaatctggtgagatctctattgagattatactattagagtttggtgtttggtctttggggttgggttttggggatggacaatgggagtttcttgcctgacggcttttgctgggctggcagcgaggcaaagcagcaatgacaccactagcccagcaggaggatttctgtctagtggagttgaggcttggggaacaccggcggtggagtgagggataaggaggtggttgccgcatgcgggttaatttcttgctggagttccatgctggcttcagcaaaaccctagcctgctgcggcagggtgaaggcgcatgggatggcagtggcattggggcagtaccgcagtagagctcgggaagaagcagtttgctcaaagctgaataggaccctggccattcaatctccatccagtggccagaacatggggtgctggaagagatttttttaccagaataatattgtatagacagatcctttgatttactagtgttgacgagttacaggtgaagttcattttaggctctcacaatgagatgtaactggatttttagcatctgtttatgacaattacagttttggatagataacttggcagctagattagccttttggttttgtgttgggtgtgggtgggtggtaatggaggatcatggtaggctctgccaaaaggttttaactgtatatttagtaggcttgcaggcagggcgggttttttatgggaacccgcatatccaccccacaaaatcatgctttgtggcagatgcagaccagctgcagcagtttttcggcatcatgtctgttgtttcattaagcccatcggtacccttttgtttctacttatgacaaatacatgacacagctttcgtcatgttcaacagatacacaacctcacatctcttctacacaatatgtcaattcatctaaaatggccaatacaaccattccattgatgaatgacactattggcgaaagttcctttttttttccttatatgaattcttgcaaaaatcaagctttattattttgattccgtgtggaatgaacaaaagggtcttagataccaaactactgataagcagtatggaaaatggagtaaccctgatgacaaggcaacagtggggaactatttcctcaattcttgtggagagatccaccttaatccggagcatttagggaatgagagactaatgtggggatcttctgaaatgaaacatgatctaggaagttttagttccaaggtttcttcggctgagtctagatttattcagacttgtgaaggttcatctgagtttcctgatgtcaataacactagtgttgattcgccttgttggaagggcacaccagcctcgtaccagtgttcgtttgggattatggaaaataacggtgttcctcctgtggcgataagaacagcaggctacatcaattcacataaaaaccagaagccccctgagttgggttctgggtatccatggcgattctgtgaacaccaagtagcattgagttctgagattgacccttttaaggtgttcaagttgcccgaaagatgtaaaatctccaaagatcataaagaagttccaccaattgatgtcaaggttcttaatgacatgactactcatgcttgttgtttgcctgacaaacagcattccgcaacacagaaatgctatgattctagagaagattctcagaatgtgataacttcaagtcaacgggaaagtttgtgtcctgccagcaagccaaaacttttagttgtggagaaggaagaaagcactcacacaagaggtgaagacccttctcaatgttatccaggtgttgaggggaatatgatgaatatggcttctgaatccagctctagcactcgggcaatatttctgaaactaatgcacaacctatcagtagtgcttctattgacatgcaagggtggttctttgttgcacgaagatgaagaggaccttctgcaatcagtgattcaaaatcttacagctgccagttccaaaagaagcaaggttgaacaaaaaaactggtgatgggttgagcaactccagtcaaatgaaattaaaaaatattaactgtgcgaggaacaacttttggcggtcaatgcatgaagactcagtacgggagaatgctgattcagaatttaaggccactgtttcacaggtagctttagtcattatttggaacatcatgcttctgcttaatttgaattaatacagccatttcttccggagaatgtaccttagtaccttacgttgcacctttcgtttcaggttcttaggctatccgcactcattctactctaaatttctactctaaaagaaatattctatcctcatcatcaagattctctaccctatatcataatctactgcagtcatatttactccatacatcaactctataccaatcaccacatatattatatatcttttttttgtcccctactgccacaccggctgatggcgctcggcaccgtacctgctgcatggacgtgtggactgatagagtaaaaaagcatcgatagagtaaaaaagcatcgacgctgtaaataacgttttgtttgccccccataagtttacagctacctatagagtactccactgcagtaaaattttactctatacctagccttatattggtggcgtcttctttacagtatatcactgcgggtagccttactaatcaccaggaggataagatgcttgacaacactaaagtttctcaagcgtcaatctatagaaacttgtggattgaagcagaagcttcagcttgtaaactcaaatatgagcttcaacatgctcacctgggcttgagacagcaaaaggcctcaatgtcacagtagaagttgaccagtatggcggttcacctacaaaatgggagcatgttctgaaggagaatttcttccatccaggcaaataggtgaaatctgaaccataaaccagaaagctatggtttcagctcatgttgcttcaaaatgttgatgcttcttgtaaatatgatatatacatcctctcctccccaacctttatcagtatgttcaataatctgcatatcggtgatcatgtaacccctcatggtgctatacggaagtaatctggtttttctgcttgggtctatgccaaagtttgtctataaacgacactatggtctggactggaccgagagttcgcctgcttgttgtcaaccttacatatctgttagggcatgtttgtttaggat

SEQ ID NO: 83821 - DNA, 3215 bp, Zea Mays
acgagcgctctctgccatcgctgtcaccgccacgagttgtgttctcctcctccctcgccccatccgccgcgcccttccccgccgttgacccggtgggcccgggccaaggcctcggccgtgatctgcccaccgccccgacgccccgtccgtctacgcagcgggcggagactggcgcgctgcgtcgtggatggagcctcccgcgagctacatggccccgccgccacgccaccgagttataaagagcaacgagagggacgaacattccccacctgagaaacttaaactaataagggagggacaagaaagaaaaaaaaggcgaaggttacacattgccgaaggagttgcacacgatatgttagccttttgcaccattaatctagctggggagtcgcatctgctattgccttctatttcatgtcctgtgtgcaattcatgtgattgttaggtgagacgaaccagccaccaccgtatcagagcgagtatgcttttcaaaccagtttgggatgggtaactgaaacttcccagctagctagattaatggattttcacctttacacacgttgatggataactgaaacttcccaactagattaatggattttcatctttacacccctaggatagataagggtgtccccaacgggttcaccaaatcgccagtgaagttgaaagctgaaaataataataaaaagaagtgaagagcgtaggtatgcagactgcagagcaacggagctgagagagggagcttactgtggcagcagcagcactagctcattgctctatctcctattcgcccaatagaatttcacaagagctggcaatttaagcactgttggttacgcccttataatcttggggctagattggacgtttggtttggactttggagaatgctagggtgtttcgtctggtggcagttggcacccagttgtatttggcaaataaacgaatggcacaaccttgtcctccccaaatctggtgagatctctattgagattatactattagagtttggtgtttggtctttggggttgggttttggggatggacaatgggagtttcttgcctgacggcttttgctgggctggcagcgaggcaaagcagcaatgacaccactagcccagcaggaggatttctgtctagtggagttgaggcttggggaacaccggcgctttattattttgattccgtgtggaatgaacaaaagggtcttagataccaaactactgataagcagtatggaaaatggagtaaccctgatgacaaggcaacagtggggaactatttcctcaattcttgtggagagatccaccttaatccggagcatttagggaatgagagactaatgtggggatcttctgaaatgaaacatgatctaggaagttttagttccaaggtttcttcggctgagtctagatttattcagacttgtgaaggttcatctgagtttcctgatgtcaataacactagtgttgattcgccttgttggaagggcacaccagcctcgtaccagtgttcgtttgggattatggaaaataacggtgttcctcctgtggcgataagaacagcaggctacatcaattcacataaaaaccagaagccccctgagttgggttctgggtatccatggcgattctgtgaacaccaagtagcattgagttctgagattgacccttttaaggtgttcaagttgcccgaaagatgtaaaatctccaaagatcataaagaagttccaccaattgatgtcaaggttcttaatgacatgactactcatgcttgttgtttgcctgacaaacagcattccgcaacacagaaatgctatgattctagagaagattctcagaatgtgataacttcaagtcaacgggaaagtttgtgtcctgccagcaagccaaaacttttaggtgaacatggtggcaaccttatagcaagcataaatgaactaatgaataaaagtgtgatgaattctattgctattactcctagaattcatactgatcatttaacaacaggaagccaacatggaatattttttctgcagttgtggagaaggaagaaagcactcacacaagaggtgaagacccttctcaatgttatccaggtgttgaggggaatatgatgaatatggcttctgaatccagctctagcactcgggcaatatttctgaaactaatgcacaacctatcagtagtgcttctattgacatgcaagggtggttctttgttgcacgaagatgaagaggaccttctgcaatcagtgattcaaaatcttacagctgccagttccaaaagaagcaaggtatgatcttgaaatgcttttatttaaatattttttactatttcataatgcaatgtaaaccaaacttataatatgaatcaagacatgggcatatctcctcgctttctatgacgttttctgatctccatggtccagacattaaattaaatatagatagatgagccctttttgtttcaagccttaactcatttcatgtctccaaggttgaacaaaaaaactggtgatgggttgagcaactccagtcaaatgaaattaaaaaatattaactgtgcgaggaacaacttttggcggtcaatgcatgaagactcagtacgggagaatgctgattcagaatttaaggccactgtttcacagtatatcactgcgggtagccttactaatcaccaggaggataagatgcttgacaacactaaagtttctcaagcgtcaatctatagaaacttgtggattgaagcagaagcttcagcttgtaaactcaaatatgagcttcaacatgctcacctgggcttgagacagcaaaaggcctcaatgtcacagtagaagttgaccagtatggcggttcacctacaaaatgggagcatgttctgaaggagaatttcttccatccaggcaaataggtgaaatctgaaccataaaccagaaagctatggtttcagctcatgttgcttcaaaatgttgatgcttcttgtaaatatgatatatacatcctctcctccccaacctttatcagtatgttcaataatctgcatatcggtgatcatgtaacccctcatggtgctatacggaagtaatctggtttttctgcttgggtctatgccaaagtttgtctataaacgacactatggtctggactggaccgagagttcgcctgcttgttgtcaaccttacatatctgttagggcatgtttgtttaggat

SEQ ID NO: 83822 - DNA, 2875 bp, Zea Mays
acgagcgctctctgccatcgctgtcaccgccacgagttgtgttctcctcctccctcgccccatccgccgcgcccttccccgccgttgacccggtgggcccgggccaaggcctcggccgtgatctgcccaccgccccgacgccccgtccgtctacgcagcgggcggagactggcgcgctgcgtcgtggatggagcctcccgcgagctacatggccccgccgccacgccaccgagttataaagagcaacgagagggacgaacattccccacctgagaaacttaaactaataagggagggacaagaaagaaaaaaaaggcgaaggttacacattgccgaaggagttgcacacgatatgttagccttttgcaccattaatctagctggggagtcgcatctgctattgccttctatttcatgtcctgtgtgcaattcatgtgattgttaggtgagacgaaccagccaccaccgtatcagagcgagtatgcttttcaaaccagtttgggatgggtaactgaaacttcccagctagctagattaatggattttcacctttacacacgttgatggataactgaaacttcccaactagattaatggattttcatctttacacccctaggatagataagggtgtccccaacgggttcaccaaatcgccagtgaagttgaaagctgaaaataataataaaaagaagtgaagagcgtaggtatgcagactgcagagcaacggagctgagagagggagcttactgtggcagcagcagcactagctcattgctctatctcctattcgcccaatagaatttcacaagagctggcaatttaagcactgttggttacgcccttataatcttggggctagattggacgtttggtttggactttggagaatgctagggtgtttcgtctggtggcagttggcacccagttgtatttggcaaataaacgaatggcacaaccttgtcctccccaaatctggtgagatctctattgagattatactattagagtttggtgtttggtctttggggttgggttttggggatggacaatgggagtttcttgcctgacggcttttgctgggctggcagcgaggcaaagcagcaatgacaccactagcccagcaggaggatttctgtctagtggagttgaggcttggggaacaccggcgctttattattttgattccgtgtggaatgaacaaaagggtcttagataccaaactactgataagcagtatggaaaatggagtaaccctgatgacaaggcaacagtggggaactatttcctcaattcttgtggagagatccaccttaatccggagcatttagggaatgagagactaatgtggggatcttctgaaatgaaacatgatctaggaagttttagttccaaggtttcttcggctgagtctagatttattcagacttgtgaaggttcatctgagtttcctgatgtcaataacactagtgttgattcgccttgttggaagggcacaccagcctcgtaccagtgttcgtttgggattatggaaaataacggtgttcctcctgtggcgataagaacagcaggctacatcaattcacataaaaaccagaagccccctgagttgggttctgggtatccatggcgattctgtgaacaccaagtagcattgagttctgagattgacccttttaaggtgttcaagttgcccgaaagatgtaaaatctccaaagatcataaagaagttccaccaattgatgtcaaggttcttaatgacatgactactcatgcttgttgtttgcctgacaaacagcattccgcaacacagaaatgctatgattctagagaagattctcagaatgtgataacttcaagtcaacgggaaagtttgtgtcctgccagcaagccaaaacttttagttgtggagaaggaagaaagcactcacacaagaggtgaagacccttctcaatgttatccaggtgttgaggggaatatgatgaatatggcttctgaatccagctctagcactcgggcaatatttctgaaactaatgcacaacctatcagtagtgcttctattgacatgcaagggtggttctttgttgcacgaagatgaagaggaccttctgcaatcagtgattcaaaatcttacagctgccagttccaaaagaagcaaggttgaacaaaaaaactggtgatgggttgagcaactccagtcaaatgaaattaaaaaatattaactgtgcgaggaacaacttttggcggtcaatgcatgaagactcagtacgggagaatgctgattcagaatttaaggccactgtttcacagtatatcactgcgggtagccttactaatcaccaggaggataagatgcttgacaacactaaagtttctcaagcgtcaatctatagaaacttgtggattgaagcagaagcttcagcttgtaaactcaaatatgagcttcaacatgctcacctgggcttgagacagcaaaaggcctcaatgtcacagtagaagttgaccagtatggcggttcacctacaaaatgggagcatgttctgaaggagaatttcttccatccaggcaaataggtgaaatctgaaccataaaccagaaagctatggtttcagctcatgttgcttcaaaatgttgatgcttcttgtaaatatgatatatacatcctctcctccccaacctttatcagtatgttcaataatctgcatatcggtgatcatgtaacccctcatggtgctatacggaagtaatctggtttttctgcttgggtctatgccaaagtttgtctataaacgacactatggtctggactggaccgagagttcgcctgcttgttgtcaaccttacatatctgttagggcatgtttgtttaggat

SEQ ID NO: 83823 - DNA, 3667 bp, Zea Mays
acgagcgctctctgccatcgctgtcaccgccacgagttgtgttctcctcctccctcgccccatccgccgcgcccttccccgccgttgacccggtgggcccgggccaaggcctcggccgtgatctgcccaccgccccgacgccccgtccgtctacgcagcgggcggagactggcgcgctgcgtcgtggatggagcctcccgcgagctacatggccccgccgccacgccaccgagttataaagagcaacgagagggacgaacattccccacctgagaaacttaaactaataagggagggacaagaaagaaaaaaaaggcgaaggttacacattgccgaaggagttgcacacgatatgttagccttttgcaccattaatctagctggggagtcgcatctgctattgccttctatttcatgtcctgtgtgcaattcatgtgattgttaggtgagacgaaccagccaccaccgtatcagagcgagtatgcttttcaaaccagtttgggatgggtaactgaaacttcccagctagctagattaatggattttcacctttacacacgttgatggataactgaaacttcccaactagattaatggattttcatctttacacccctaggatagataagggtgtccccaacgggttcaccaaatcgccagtgaagttgaaagctgaaaataataataaaaagaagtgaagagcgtaggtatgcagactgcagagcaacggagctgagagagggagcttactgtggcagcagcagcactagctcattgctctatctcctattcgcccaatagaatttcacaagagctggcaatttaagcactgttggttacgcccttataatcttggggctagattggacgtttggtttggactttggagaatgctagggtgtttcgtctggtggcagttggcacccagttgtatttggcaaataaacgaatggcacaaccttgtcctccccaaatctggtgagatctctattgagattatactattagagtttggtgtttggtctttggggttgggttttggggatggacaatgggagtttcttgcctgacggcttttgctgggctggcagcgaggcaaagcagcaatgacaccactagcccagcaggaggatttctgtctagtggagttgaggcttggggaacaccggcgctttattattttgattccgtgtggaatgaacaaaagggtcttagataccaaactactgataagcagtatggaaaatggagtaaccctgatgacaaggcaacagtggggaactatttcctcaattcttgtggagagatccaccttaatccggagcatttagggaatgagagactaatgtggggatcttctgaaatgaaacatgatctaggaagttttagttccaaggtttcttcggctgagtctagatttattcagacttgtgaaggttcatctgagtttcctgatgtcaataacactagtgttgattcgccttgttggaagggcacaccagcctcgtaccagtgttcgtttgggattatggaaaataacggtgttcctcctgtggcgataagaacagcaggctacatcaattcacataaaaaccagaagccccctgagttgggttctgggtatccatggcgattctgtgaacaccaagtagcattgagttctgagattgacccttttaaggtgttcaagttgcccgaaagatgtaaaatctccaaagatcataaagaagttccaccaattgatgtcaaggttcttaatgacatgactactcatgcttgttgtttgcctgacaaacagcattccgcaacacagaaatgctatgattctagagaagattctcagaatgtgataacttcaagtcaacgggaaagtttgtgtcctgccagcaagccaaaacttttagttgtggagaaggaagaaagcactcacacaagaggtgaagacccttctcaatgttatccagggtggttctttgttgcacgaagatgaagaggaccttctgcaatcagtgattcaaaatcttacagctgccagttccaaaagaagcaaggttgaacaaaaaaactggtgatgggttgagcaactccagtcaaatgaaattaaaaaatattaactgtgcgaggaacaacttttggcggtcaatgcatgaagactcagtacgggagaatgctgattcagaatttaaggccactgtttcacaggtagctttagtcattatttggaacatcatgcttctgcttaatttgaattaatacagccatttcttccggagaatgtaccttagtaccttacgttgcacctttcgtttcaggttcttaggctatccgcactcattctactctaaatttctactctaaaagaaatattctatcctcatcatcaagattctctaccctatatcataatctactgcagtcatatttactccatacatcaactctataccaatcaccacatatattatatatcttttttttgtcccctactgccacaccggctgatggcgctcggcaccgtacctgctgcatggacgtgtggactgatagagtaaaaaagcatcgatagagtaaaaaagcatcgacgctgtaaataacgttttgtttgccccccataagtttacagctacctatagagtactccactgcagtaaaattttactctatacctagccttatattggtggcgtcttctttacagtatatcactgcgggtagccttactaatcaccaggaggataagatgcttgacaacactaaagtttctcaagcgtcaatctatagaaacttgtggattgaagcagaagcttcagcttgtaaactcaaatatgagcttcaacatgctcacctgggcttgagacagcaaaaggcctcaatgtcacagtagaaggtactccctcgcttcacaaatgtaagcatttctagcatttttgggccatttaggaggaagggaaatgactgtgatatccctcaatcaatcaccaagattacagagactcagttaatgccttgctttcgtatagatgccataaacgccaagtgctaattaaaactttaaacaccaagattgtattgatgctaaacatgcttgacaccaaaataaaactgcttccaaatattaatggtgagggagtgtcaggggttgattatgccagaaatgtttacgttcgtggacaattttgaatgctgaagttacatgtacctgtagaaggaagctggagggagtagcaagatggatatataaattaatattttcacataagagtctcaggaaccgtgcctaatctcctctccagttgaccagtatggcggttcacctacaaaatgggagcatgttctgaaggagaatttcttccatccaggcaaataggtgaaatctgaaccataaaccagaaagctatggtttcagctcatgttgcttcaaaatgttgatgcttcttgtaaatatgatatatacatcctctcctccccaacctttatcagtatgttcaataatctgcatatcggtgatcatgtaacccctcatggtgctatacggaagtaatctggtttttctgcttgggtctatgccaaagtttgtctataaacgacactatggtctggactggaccgagagttcgcctgcttgttgtcaaccttacatatctgttagggcatgtttgtttaggat

SEQ ID NO: 83824 - DNA, 1797 bp, Zea Mays
acgagcgctctctgccatcgctgtcaccgccacgagttgtgttctcctcctccctcgccccatccgccgcgcccttccccgccgttgacccggtgggcccgggccaaggcctcggccgtgatctgcccaccgccccgacgccccgtccgtctacgcagcgggcggagactggcgcgctgcgtcgtggatggagcctcccgcgagctacatggccccgccgccacgccaccgagttataaagttgtggagaaggaagaaagcactcacacaagaggtgaagacccttctcaatgttatccagggtggttctttgttgcacgaagatgaagaggaccttctgcaatcagtgattcaaaatcttacagctgccagttccaaaagaagcaagccatttcttccggagaatgtaccttagtaccttacgttgcacctttcgtttcaggttcttaggctatccgcactcattctactctaaatttctactctaaaagaaatattctatcctcatcatcaagattctctaccctatatcataatctactgcagtcatatttactccatacatcaactctataccaatcaccacatatattatatatcttttttttgtcccctactgccacaccggctgatggcgctcggcaccgtacctgctgcatggacgtgtggactgatagagtaaaaaagcatcgatagagtaaaaaagcatcgacgctgtaaataacgttttgtttgccccccataagtttacagctacctatagagtactccactgcagtaaaattttactctatacctagccttatattggtggcgtcttctttacagtatatcactgcgggtagccttactaatcaccaggaggataagatgcttgacaacactaaagtttctcaagcgtcaatctatagaaacttgtggattgaagcagaagcttcagcttgtaaactcaaatatgagcttcaacatgctcacctgggcttgagacagcaaaaggcctcaatgtcacagtagaaggtactccctcgcttcacaaatgtaagcatttctagcatttttgggccatttaggaggaagggaaatgactgtgatatccctcaatcaatcaccaagattacagagactcagttaatgccttgctttcgtatagatgccataaacgccaagtgctaattaaaactttaaacaccaagattgtattgatgctaaacatgcttgacaccaaaataaaactgcttccaaatattaatggtgagggagtgtcaggggttgattatgccagaaatgtttacgttcgtggacaattttgaatgctgaagttacatgtacctgtagaaggaagctggagggagtagcaagatggatatataaattaatattttcacataagagtctcaggaaccgtgcctaatctcctctccagttgaccagtatggcggttcacctacaaaatgggagcatgttctgaaggagaatttcttccatccaggcaaataggtgaaatctgaaccataaaccagaaagctatggtttcagctcatgttgcttcaaaatgttgatgcttcttgtaaatatgatatatacatcctctcctccccaacctttatcagtatgttcaataatctgcatatcggtgatcatgtaacccctcatggtgctatacggaagtaatctggtttttctgcttgggtctatgccaaagtttgtctataaacgacactatggtctggactggaccgagagttcgcctgcttgttgtcaaccttacatatctgttagggcatgtttgtttaggat

SEQ ID NO: 83825 - DNA, 1919 bp, Zea Mays
gctactgcccctgaagcgcacatggcaaggaagacaagagtccctgaagaaggtgcaagcatggaaattccaacacgatgtcgtcgatcccatcgttcttctaacacaaccacggggaccctaccacaagaggttcttgcagccctgacgtctgccttcaacctcgatgggtcggcgaaggagaacttcgaggatgctttgcttgcgatgctttggcccttcgctgatagagtggcaaccttcaagtcgggcctagtggcaccagaggagggattacgctgctatggagcaccatccatgtggaactttctgattttttttgtgggtgatttccacatttctgtcaagattggttcgtctcttcggctcctccttggcttcgcaagagtggtgccgccagtagctcctccgcgctccgccgggaccgacttgccgctggccgccaggggctccctcgcccaggaccggctccgccgtccaaccgtcctatcccctccggcctccgcccagattttattcagtattcactatatggcatttggttgtaaatagactacgatcacgatgactcttgaataagtgcgggaagcctacaacactgggtacacccttttttaaagaagggtgggcctagcgcagcggtagagcctaccgtctgtaactggaaggtcctgggttcgagccacaacctcatattatgcgggtaaggcttgacgcttaaagatacccttctccagaccccgcacagtgcgggaagcctacggcacttggtacgccctttatattgcaggtgcgcatcttgttatcctccactcgtagatgtcgctagctggtcagtaatccgctgcaaggtgattcatatcaaagatctgattcacataattaccaagttcagcagttttgcctctgacgatatgggttcttgggagggccaagctaggcagcttttgttggatgaggaagaagacgatgaagagtttttctttcttcttctccctgctatactttcattcctctctgaagagcaaagcgaaactggagcagctattgaaagtttcgtggaattcaagaggagcaccgcagccaaaacgctcgaagctcttgaagaaaagaagaagcatgatgaagatttctctattaaaaagtgtctagaggagttggatacaattgatgggctgacagatgaggatagatcatatgcaatggaagtctttgaatctgggttcaacagagaagtgtttatgagttcaaaaaaccacaatgttaggttgttttggctcaagagagaaattaaagcgcttgctgctatcatgtgatgtgaagtgaatgtggttgtgaagagataggcttacaggtattcacagggtttgcatgatagatgttgcatctgtactttgtatgatagaaaacttgtagagctcttgctgttgctgggagtatcaatttatgctaggcagcaacttaaactgaaatgaaaccgaagaaatccaactgctagtaccgttccagcgagaagacttcagccctgctttctgagtgcttggtgaacgatggaaggcctaggatgctgtttttgtttatgttgcttagagacggatattggaacgaggatataccttgtttgtacggtatcgtgctgccaaaattaatgcgttttaagcaatattttgctaggctaaccacggtttcttttaacggaacttgcctgacgtgatggagcctgctctgtctctagccagaaccccgcgtgttgtcaaggcgaactgtcatactgatcctaaatttagaagcgtcaatgttgagttatcagaacttgaaacaagacagcgtacatatactctacatggataatctcattcgagcaagggaaatggggcactgtgttatagacccagttaaaacaatctagtaggaaaaac

SEQ ID NO: 83826 - DNA, 1458 bp, Zea Mays
gctactgcccctgaagcgcacatggcaaggaagacaagagtccctgaagaaggtgcaagcatggaaattccaacacgatgtcgtcgatcccatcgttcttctaacacaaccacggggaccctaccacaagaggttcttgcagccctgacgtctgccttcaacctcgatgggtcggcgaaggagaacttcgaggatgctttgcttgcgatgctttggcccttcgctgatagagtggcaaccttcaagtcgggcctagtggcaccagaggagggattacgctgctatggagcaccatccatgtggaactttctgattttttttgtgggtgatttccacatttctgtcaagattggttcgtctcttcggctcctccttggcttcgcaagagtggtgccgccagtagctcctccgcgctccgccgggaccgacttgccgctggccgccaggggctccctcgcccaggaccggctccgccgtccaaccgtcctatcccctccggcctccgcccaggtgattcatatcaaagatctgattcacataattaccaagttcagcagttttgcctctgacgatatgggttcttgggagggccaagctaggcagcttttgttggatgaggaagaagacgatgaagagtttttctttcttcttctccctgctatactttcattcctctctgaagagcaaagcgaaactggagcagctattgaaagtttcgtggaattcaagaggagcaccgcagccaaaacgctcgaagctcttgaagaaaagaagaagcatgatgaagatttctctattaaaaagtgtctagaggagttggatacaattgatgggctgacagatgaggatagatcatatgcaatggaagtctttgaatctgggttcaacagagaagtgtttatgagttcaaaaaaccacaatgttaggttgttttggctcaagagagaaattaaagcgcttgctgctatcatgtgatgtgaagtgaatgtggttgtgaagagataggcttacagaaaccgaagaaatccaactgctagtaccgttccagcgagaagacttcagccctgctttctgagtgcttggtgaacgatggaaggcctaggatgctgtttttgtttatgttgcttagagacggatattggaacgaggatataccttgtttgtacggtatcgtgctgccaaaattaatgcgttttaagcaatattttgctaggctaaccacggtttcttttaacggaacttgcctgacgtgatggagcctgctctgtctctagccagaaccccgcgtgttgtcaaggcgaactgtcatactgatcctaaatttagaagcgtcaatgttgagttatcagaacttgaaacaagacagcgtacatatactctacatggataatctcattcgagcaagggaaatggggcactgtgttatagacccagttaaaacaatctagtaggaaaaac

SEQ ID NO: 83827 - DNA, 2074 bp, Zea Mays
gctactgcccctgaagcgcacatggcaaggaagacaagagtccctgaagaaggtgcaagcatggaaattccaacacgatgtcgtcgatcccatcgttcttctaacacaaccacggggaccctaccacaagaggttcttgcagccctgacgtctgccttcaacctcgatgggtcggcgaaggagaacttcgaggatgctttgcttgcgatgctttggcccttcgctgatagagtggcaaccttcaagtcgggcctagtggcaccagaggagggattacgctgctatggagcaccatccatgtggaactttctgattttttttgtgggtgatttccacatttctgtcaagattggttcgtctcttcggctcctccttggcttcgcaagagtggtgccgccagtagctcctccgcgctccgccgggaccgacttgccgctggccgccaggggctccctcgcccaggaccggctccgccgtccaaccgtcctatcccctccggcctccgcccagtgcgggaagcctacaacactgggtacacccttttttaaagaagggtgggcctagcgcagcggtagagcctaccgtctgtaactggaaggtcctgggttcgagccacaacctcatattatgcgggtaaggcttgacgcttaaagatacccttctccagaccccgcacagtgcgggaagcctacggcacttggtacgccctttatattgcaggtgcgcatcttgttatcctccactcgtagatgtcgctagctggtcagtaatccgctgcaaggtacttactctattatgtgtaaaatgtcagtagaactttggtacgccatacatacagcaagtgtcaaatggaccatcctccactgcagttgagtcggatagctttgcctcgatttcctcttgtcttataaagttctccacttgctgtgccaaggcctaccctgcctgaaagcaaatttcatctcttggtttccaagcagaccaaagaactgacaaaaaaattatatttgtaagcttgtgatgtctgttagcaacccagaaccgagcaatcgattgaactctgatatagttaaccacacattgctgaccattcaacaataaaaaaaatgcaacatacttttttcaggtgattcatatcaaagatctgattcacataattaccaagttcagcagttttgcctctgacgatatgggttcttgggagggccaagctaggcagcttttgttggatgaggaagaagacgatgaagagtttttctttcttcttctccctgctatactttcattcctctctgaagagcaaagcgaaactggagcagctattgaaagtttcgtggaattcaagaggagcaccgcagccaaaacgctcgaagctcttgaagaaaagaagaagcatgatgaagatttctctattaaaaagtgtctagaggagttggatacaattgatgggctgacagatgaggatagatcatatgcaatggaagtctttgaatctgggttcaacagagaagtgtttatgagttcaaaaaaccacaatgttaggttgttttggctcaagagagaaattaaagcgcttgctgctatcatgtgatgtgaagtgaatgtggttgtgaagagataggcttacagaaaccgaagaaatccaactgctagtaccgttccagcgagaagacttcagccctgctttctgagtgcttggtgaacgatggaaggcctaggatgctgtttttgtttatgttgcttagagacggatattggaacgaggatataccttgtttgtacggtatcgtgctgccaaaattaatgcgttttaagcaatattttgctaggctaaccacggtttcttttaacggaacttgcctgacgtgatggagcctgctctgtctctagccagaaccccgcgtgttgtcaaggcgaactgtcatactgatcctaaatttagaagcgtcaatgttgagttatcagaacttgaaacaagacagcgtacatatactctacatggataatctcattcgagcaagggaaatggggcactgtgttatagacccagttaaaacaatctagtaggaaaaac

SEQ ID NO: 83828 - DNA, 1943 bp, Zea Mays
gctactgcccctgaagcgcacatggcaaggaagacaagagtccctgaagaaggtgcaagcatggaaattccaacacgatgtcgtcgatcccatcgttcttctaacacaaccacggggaccctaccacaagaggttcttgcagccctgacgtctgccttcaacctcgatgggtcggcgaaggagaacttcgaggatgctttgcttgcgatgctttggcccttcgctgatagagtggcaaccttcaagtcgggcctagtggcaccagaggagggattacgctgctatggagcaccatccatgtggaactttctgattttttttgtgggtgatttccacatttctgtcaagattggttcgtctcttcggctcctccttggcttcgcaagagtggtgccgccagtagctcctccgcgctccgccgggaccgacttgccgctggccgccaggggctccctcgcccaggaccggctccgccgtccaaccgtcctatcccctccggcctccgcccagcactagtcattgccctcttgcctacttgctgacgttgggcgactgtacatcgtccagacggtcacatgtgaaagccatcaatggaacgcatcattcaagatgatcttgactgacccctcttcctctttcgttttcccctatagatggttcatatccctctaatcctcatttcaaatgccatcttggggagaagaaacctgttctgattttattcagtattcactatatggcatttggttgtaaatagactacgatcacgatgactcttgaataagtgcgggaagcctacaacactgggtacacccttttttaaagaagggtgggcctagcgcagcggtagagcctaccgtctgtaactggaaggtcctgggttcgagccacaacctcatattatgcgggtaaggcttgacgcttaaagatacccttctccagaccccgcacagtgcgggaagcctacggcacttggtacgccctttatattgcaggtgattcatatcaaagatctgattcacataattaccaagttcagcagttttgcctctgacgatatgggttcttgggagggccaagctaggcagcttttgttggatgaggaagaagacgatgaagagtttttctttcttcttctccctgctatactttcattcctctctgaagagcaaagcgaaactggagcagctattgaaagtttcgtggaattcaagaggagcaccgcagccaaaacgctcgaagctcttgaagaaaagaagaagcatgatgaagatttctctattaaaaagtgtctagaggagttggatacaattgatgggctgacagatgaggatagatcatatgcaatggaagtctttgaatctgggttcaacagagaagtgtttatgagttcaaaaaaccacaatgttaggttgttttggctcaagagagaaattaaagcgcttgctgctatcatgtgatgtgaagtgaatgtggttgtgaagagataggcttacagaaaccgaagaaatccaactgctagtaccgttccagcgagaagacttcagccctgctttctgagtgcttggtgaacgatggaaggcctaggatgctgtttttgtttatgttgcttagagacggatattggaacgaggatataccttgtttgtacggtatcgtgctgccaaaattaatgcgttttaagcaatattttgctaggctaaccacggtttcttttaacggaacttgcctgacgtgatggagcctgctctgtctctagccagaaccccgcgtgttgtcaaggcgaactgtcatactgatcctaaatttagaagcgtcaatgttgagttatcagaacttgaaacaagacagcgtacatatactctacatggataatctcattcgagcaagggaaatggggcactgtgttatagacccagttaaaacaatctagtaggaaaaac

SEQ ID NO: 83829 - DNA, 2144 bp, Zea Mays
gctactgcccctgaagcgcacatggcaaggaagacaagagtccctgaagaaggtgcaagcatggaaattccaacacgatgtcgtcgatcccatcgttcttctaacacaaccacggggaccctaccacaagaggttcttgcagccctgacgtctgccttcaacctcgatgggtcggcgaaggagaacttcgaggatgctttgcttgcgatgctttggcccttcgctgatagagtggcaaccttcaagtcgggcctagtggcaccagaggagggattacgctgctatggagcaccatccatgtggaactttctgattttttttgtgggtgatttccacatttctgtcaagattggttcgtctcttcggctcctccttggcttcgcaagagtggtgccgccagtagctcctccgcgctccgccgggaccgacttgccgctggccgccaggggctccctcgcccaggaccggctccgccgtccaaccgtcctatcccctccggcctccgcccagattttattcagtattcactatatggcatttggttgtaaatagactacgatcacgatgactcttgaataagtgcgggaagcctacaacactgggtacacccttttttaaagaagggtgggcctagcgcagcggtagagcctaccgtctgtaactggaaggtcctgggttcgagccacaacctcatattatgcgggtaaggcttgacgcttaaagatacccttctccagaccccgcacagtgcgggaagcctacggcacttggtacgccctttatattgcaggtgcgcatcttgttatcctccactcgtagatgtcgctagctggtcagtaatccgctgcaaggtacttactctattatgtgtaaaatgtcagtagaactttggtacgccatacatacagcaagtgtcaaatggaccatcctccactgcagttgagtcggatagctttgcctcgatttcctcttgtcttataaagttctccacttgctgtgccaaggcctaccctgcctgaaagcaaatttcatctcttggtttccaagcagaccaaagaactgacaaaaaaattatatttgtaagcttgtgatgtctgttagcaacccagaaccgagcaatcgattgaactctgatatagttaaccacacattgctgaccattcaacaataaaaaaaatgcaacatacttttttcaggtgattcatatcaaagatctgattcacataattaccaagttcagcagttttgcctctgacgatatgggttcttgggagggccaagctaggcagcttttgttggatgaggaagaagacgatgaagagtttttctttcttcttctccctgctatactttcattcctctctgaagagcaaagcgaaactggagcagctattgaaagtttcgtggaattcaagaggagcaccgcagccaaaacgctcgaagctcttgaagaaaagaagaagcatgatgaagatttctctattaaaaagtgtctagaggagttggatacaattgatgggctgacagatgaggatagatcatatgcaatggaagtctttgaatctgggttcaacagagaagtgtttatgagttcaaaaaaccacaatgttaggttgttttggctcaagagagaaattaaagcgcttgctgctatcatgtgatgtgaagtgaatgtggttgtgaagagataggcttacagaaaccgaagaaatccaactgctagtaccgttccagcgagaagacttcagccctgctttctgagtgcttggtgaacgatggaaggcctaggatgctgtttttgtttatgttgcttagagacggatattggaacgaggatataccttgtttgtacggtatcgtgctgccaaaattaatgcgttttaagcaatattttgctaggctaaccacggtttcttttaacggaacttgcctgacgtgatggagcctgctctgtctctagccagaaccccgcgtgttgtcaaggcgaactgtcatactgatcctaaatttagaagcgtcaatgttgagttatcagaacttgaaacaagacagcgtacatatactctacatggataatctcattcgagcaagggaaatggggcactgtgttatagacccagttaaaacaatctagtaggaaaaac

SEQ ID NO: 83830 - DNA, 1800 bp, Zea Mays
gctactgcccctgaagcgcacatggcaaggaagacaagagtccctgaagaaggtgcaagcatggaaattccaacacgatgtcgtcgatcccatcgttcttctaacacaaccacggggaccctaccacaagaggttcttgcagccctgacgtctgccttcaacctcgatgggtcggcgaaggagaacttcgaggatgctttgcttgcgatgctttggcccttcgctgatagagtggcaaccttcaagtcgggcctagtggcaccagaggagggattacgctgctatggagcaccatccatgtggaactttctgattttttttgtgggtgatttccacatttctgtcaagattggttcgtctcttcggctcctccttggcttcgcaagagtggtgccgccagtagctcctccgcgctccgccgggaccgacttgccgctggccgccaggggctccctcgcccaggaccggctccgccgtccaaccgtcctatcccctccggcctccgcccagatggttcatatccctctaatcctcatttcaaatgccatcttggggagaagaaacctgttctgattttattcagtattcactatatggcatttggttgtaaatagactacgatcacgatgactcttgaataagtgcgggaagcctacaacactgggtacacccttttttaaagaagggtgggcctagcgcagcggtagagcctaccgtctgtaactggaaggtcctgggttcgagccacaacctcatattatgcgggtaaggcttgacgcttaaagatacccttctccagaccccgcacagtgcgggaagcctacggcacttggtacgccctttatattgcaggtgattcatatcaaagatctgattcacataattaccaagttcagcagttttgcctctgacgatatgggttcttgggagggccaagctaggcagcttttgttggatgaggaagaagacgatgaagagtttttctttcttcttctccctgctatactttcattcctctctgaagagcaaagcgaaactggagcagctattgaaagtttcgtggaattcaagaggagcaccgcagccaaaacgctcgaagctcttgaagaaaagaagaagcatgatgaagatttctctattaaaaagtgtctagaggagttggatacaattgatgggctgacagatgaggatagatcatatgcaatggaagtctttgaatctgggttcaacagagaagtgtttatgagttcaaaaaaccacaatgttaggttgttttggctcaagagagaaattaaagcgcttgctgctatcatgtgatgtgaagtgaatgtggttgtgaagagataggcttacagaaaccgaagaaatccaactgctagtaccgttccagcgagaagacttcagccctgctttctgagtgcttggtgaacgatggaaggcctaggatgctgtttttgtttatgttgcttagagacggatattggaacgaggatataccttgtttgtacggtatcgtgctgccaaaattaatgcgttttaagcaatattttgctaggctaaccacggtttcttttaacggaacttgcctgacgtgatggagcctgctctgtctctagccagaaccccgcgtgttgtcaaggcgaactgtcatactgatcctaaatttagaagcgtcaatgttgagttatcagaacttgaaacaagacagcgtacatatactctacatggataatctcattcgagcaagggaaatggggcactgtgttatagacccagttaaaacaatctagtaggaaaaac

SEQ ID NO: 83831 - DNA, 1872 bp, Zea Mays
gtccattatgtattcttcaatacgtgtatcttttccaacccccaaaccttcaactagaagagccatttcccccctaaacccaggtaaccaacaagtttctacaggacttctttagggcacccacgccgccgattctgcctggcgctactgcccctgaagcgcacatggcaaggaagacaagagtccctgaagaaggtgcaagcatggaaattccaacacgatgtcgtcgatcccatcgttcttctaacacaaccacggggaccctaccacaagaggttcttgcagccctgacgtctgccttcaacctcgatgggtcggcgaaggagaacttcgaggatgctttgcttgcgatgctttggcccttcgctgatagagtggcaaccttcaagtcgggcctagtggcaccagaggagggattacgctgctatggagcaccatccatgtggaactttctgattttttttgtgggtgatttccacatttctgtcaagattggttcgtctcttcggctcctccttggcttcgcaagagtggtgccgccagtagctcctccgcgctccgccgggaccgacttgccgctggccgccaggggctccctcgcccaggaccggctccgccgtccaaccgtcctatcccctccggcctccgcccagtgcgggaagcctacaacactgggtacacccttttttaaagaagggtgggcctagcgcagcggtagagcctaccgtctgtaactggaaggtcctgggttcgagccacaacctcatattatgcgggtaaggcttgacgcttaaagatacccttctccagaccccgcacagtgcgggaagcctacggcacttggtacgccctttatattgcaggtgcgcatcttgttatcctccactcgtagatgtcgctagctggtcagtaatccgctgcaaggtgattcatatcaaagatctgattcacataattaccaagttcagcagttttgcctctgacgatatgggttcttgggagggccaagctaggcagcttttgttggatgaggaagaagacgatgaagagtttttctttcttcttctccctgctatactttcattcctctctgaagagcaaagcgaaactggagcagctattgaaagtttcgtggaattcaagaggagcaccgcagccaaaacgctcgaagctcttgaagaaaagaagaagcatgatgaagatttctctattaaaaagtgtctagaggagttggatacaattgatgggctgacagatgaggatagatcatatgcaatggaagtctttgaatctgggttcaacagagaagtgtttatgagttcaaaaaaccacaatgttaggttgttttggctcaagagagaaattaaagcgcttgctgctatcatgtgatgtgaagtgaatgtggttgtgaagagataggcttacagaaaccgaagaaatccaactgctagtaccgttccagcgagaagacttcagccctgctttctgagtgcttggtgaacgatggaaggcctaggatgctgtttttgtttatgttgcttagagacggatattggaacgaggatataccttgtttgtacggtatcgtgctgccaaaattaatgcgttttaagcaatattttgctaggctaaccacggtttcttttaacggaacttgcctgacgtgatggagcctgctctgtctctagccagaaccccgcgtgttgtcaaggcgaactgtcatactgatcctaaatttagaagcgtcaatgttgagttatcagaacttgaaacaagacagcgtacatatactctacatggataatctcattcgagcaagggaaatggggcactgtgttatagacccagttaaaacaatctagtaggaaaaac

SEQ ID NO: 83832 - DNA, 1815 bp, Zea Mays
cagggtccattatgtattcttcaatacgtgtatcttttccaacccccaaaccttcaactagaagagccatttcccccctaaacccaggtaaccaacaagtttctacaggacttctttagggcacccacgccgccgattctgcctggcgctactgcccctgaagcgcacatggcaaggaagacaagagtccctgaagaaggtgcaagcatggaaattccaacacgatgtcgtcgatcccatcgttcttctaacacaaccacggggaccctaccacaagaggttcttgcagccctgacgtctgccttcaacctcgatgggtcggcgaaggagaacttcgaggatgctttgcttgcgatgctttggcccttcgctgatagagtggcaaccttcaagtcgggcctagtggcaccagaggagggattacgctgctatggagcaccatccatgtggaactttctgattttttttgtgggtgatttccacatttctgtcaagattggttcgtctcttcggctcctccttggcttcgcaagagtggtgccgccagtagctcctccgcgctccgccgggaccgacttgccgctggccgccaggggctccctcgcccaggaccggctccgccgtccaaccgtcctatcccctccggcctccgcccagtgcgggaagcctacaacactgggtacacccttttttaaagaagggtgggcctagcgcagcggtagagcctaccgtctgtaactggaaggtcctgggttcgagccacaacctcatattatgcgggtaaggcttgacgcttaaagatacccttctccagaccccgcacagtgcgggaagcctacggcacttggtacgccctttatattgcaggtgattcatatcaaagatctgattcacataattaccaagttcagcagttttgcctctgacgatatgggttcttgggagggccaagctaggcagcttttgttggatgaggaagaagacgatgaagagtttttctttcttcttctccctgctatactttcattcctctctgaagagcaaagcgaaactggagcagctattgaaagtttcgtggaattcaagaggagcaccgcagccaaaacgctcgaagctcttgaagaaaagaagaagcatgatgaagatttctctattaaaaagtgtctagaggagttggatacaattgatgggctgacagatgaggatagatcatatgcaatggaagtctttgaatctgggttcaacagagaagtgtttatgagttcaaaaaaccacaatgttaggttgttttggctcaagagagaaattaaagcgcttgctgctatcatgtgatgtgaagtgaatgtggttgtgaagagataggcttacagaaaccgaagaaatccaactgctagtaccgttccagcgagaagacttcagccctgctttctgagtgcttggtgaacgatggaaggcctaggatgctgtttttgtttatgttgcttagagacggatattggaacgaggatataccttgtttgtacggtatcgtgctgccaaaattaatgcgttttaagcaatattttgctaggctaaccacggtttcttttaacggaacttgcctgacgtgatggagcctgctctgtctctagccagaaccccgcgtgttgtcaaggcgaactgtcatactgatcctaaatttagaagcgtcaatgttgagttatcagaacttgaaacaagacagcgtacatatactctacatggataatctcattcgagcaagggaaatggggcactgtgttatagacccagttaaaacaatctagtaggaaaaac

SEQ ID NO: 83833 - DNA, 1828 bp, Zea Mays
tggatctggggctagcccttcatcagaaagctcgtcatcagggtccattatgacttctttagggcacccacgccgccgattctgcctggcgctactgcccctgaagcgcacatggcaaggaagacaagagtccctgaagaaggtgcaagcatggaaattccaacacgatgtcgtcgatcccatcgttcttctaacacaaccacggggaccctaccacaagaggttcttgcagccctgacgtctgccttcaacctcgatgggtcggcgaaggagaacttcgaggatgctttgcttgcgatgctttggcccttcgctgatagagtggcaaccttcaagtcgggcctagtggcaccagaggagggattacgctgctatggagcaccatccatgtggaactttctgattttttttgtgggtgatttccacatttctgtcaagattggttcgtctcttcggctcctccttggcttcgcaagagtggtgccgccagtagctcctccgcgctccgccgggaccgacttgccgctggccgccaggggctccctcgcccaggaccggctccgccgtccaaccgtcctatcccctccggcctccgcccagattttattcagtattcactatatggcatttggttgtaaatagactacgatcacgatgactcttgaataagtgcgggaagcctacaacactgggtacacccttttttaaagaagggtgggcctagcgcagcggtagagcctaccgtctgtaactggaaggtcctgggttcgagccacaacctcatattatgcgggtaaggcttgacgcttaaagatacccttctccagaccccgcacagtgcgggaagcctacggcacttggtacgccctttatattgcaggtgattcatatcaaagatctgattcacataattaccaagttcagcagttttgcctctgacgatatgggttcttgggagggccaagctaggcagcttttgttggatgaggaagaagacgatgaagagtttttctttcttcttctccctgctatactttcattcctctctgaagagcaaagcgaaactggagcagctattgaaagtttcgtggaattcaagaggagcaccgcagccaaaacgctcgaagctcttgaagaaaagaagaagcatgatgaagatttctctattaaaaagtgtctagaggagttggatacaattgatgggctgacagatgaggatagatcatatgcaatggaagtctttgaatctgggttcaacagagaagtgtttatgagttcaaaaaaccacaatgttaggttgttttggctcaagagagaaattaaagcgcttgctgctatcatgtgatgtgaagtgaatgtggttgtgaagagataggcttacagaaaccgaagaaatccaactgctagtaccgttccagcgagaagacttcagccctgctttctgagtgcttggtgaacgatggaaggcctaggatgctgtttttgtttatgttgcttagagacggatattggaacgaggatataccttgtttgtacggtatcgtgctgccaaaattaatgcgttttaagcaatattttgctaggctaaccacggtttcttttaacggaacttgcctgacgtgatggagcctgctctgtctctagccagaaccccgcgtgttgtcaaggcgaactgtcatactgatcctaaatttagaagcgtcaatgttgagttatcagaacttgaaacaagacagcgtacatatactctacatggataatctcattcgagcaagggaaatggggcactgtgttatagacccagttaaaacaatctagtaggaaaaac

SEQ ID NO: 83834 - DNA, 1691 bp, Zea Mays
cttctttagggcacccacgccgccgattctgcctggcgctactgcccctgaagcgcacatggcaaggaagacaagagtccctgaagaaggtgcaagcatggaaattccaacacgatgtcgtcgatcccatcgttcttctaacacaaccacggggaccctaccacaagaggttcttgcagccctgacgtctgccttcaacctcgatgggtcggcgaaggagaacttcgaggatgctttgcttgcgatgctttggcccttcgctgatagagtggcaaccttcaagtcgggcctagtggcaccagaggagggattacgctgctatggagcaccatccatgtggaactttctgattttttttgtgggtgatttccacatttctgtcaagattggttcgtctcttcggctcctccttggcttcgcaagagtggtgccgccagtagctcctccgcgctccgccgggaccgacttgccgctggccgccaggggctccctcgcccaggaccggctccgccgtccaaccgtcctatcccctccggcctccgcccagtgcgggaagcctacaacactgggtacacccttttttaaagaagggtgggcctagcgcagcggtagagcctaccgtctgtaactggaaggtcctgggttcgagccacaacctcatattatgcgggtaaggcttgacgcttaaagatacccttctccagaccccgcacagtgcgggaagcctacggcacttggtacgccctttatattgcaggtgcgcatcttgttatcctccactcgtagatgtcgctagctggtcagtaatccgctgcaaggtacttactctattatgtgtaaaatgtcagtagaactttggtacgccatacatacagcaagtgtcaaatggaccatcctccactgcagttgagtcggatagctttgcctcgatttcctcttgtcttataaagttctccacttgctgtgccaaggcctaccctgcctgaaagcaaatttcatctcttggtttccaagcagaccaaagaactgacaaaaaaattatatttgtaagcttgtgatgtctgttagcaacccagaaccgagcaatcgattgaactctgatatagttaaccacacattgctgaccattcaacaataaaaaaaatgcaacatacttttttcaggtgattcatatcaaagatctgattcacataattaccaagttcagcagttttgcctctgacggtatatgggttcttgggagggccaagctaggcagcttttgttggatgaggaagaagacgatgaagagtttttctttcttcttctccctgctatactttcattcctctctgaagagcaaagcgaaactggagcagctattgaaagtttcgtggaattcaagaggagcaccgcagccaaaacgctcgaagctcttgaagaaaagaagaagcatgatgaagatttctctattaaaaagtgtctagaggagttggatacaattgatgggctgacagatgaggatagatcatatgcaatggaagtctttgaatctgggttcaacagagaagtgtttatgagttcaaaaaaccacaatgttaggttgttttggctcaagagagaaattaaagcgcttgctgctatcatgtgatgtgaagtgaatgtggttgtgaagagataggcttacagaaattcctaatagatgcaactgc

SEQ ID NO: 83835 - DNA, 810 bp, Zea Mays
cacggctataaaaatagcaccaatttttcttttatatttggggtttctgattatgaatacatgccaaaatagatattaaattgattattctaactggacagaccaacagtattatcaaccttgttgaggccgagcttgtagggaacgtctttcatcttgttgaactcgccgatgtgcctagagttcgccttgaacgcctcgaacctgctctgcttctccgtgaggtcccgcgacacggtgtgcacgctgctccaccgctcgtacatgctctcctccgactccaggtccttatccgtcagcagcagggcaaccgtggccgggttggtctgcgaacgatggggccacacgctgtcgacgttgtcgataccccatggcgatggtgtggtgcctcgatgtggggaagcgccgaaccggggcaggaattggggacacgaacgtcgacgcgcggaagcgccgtccgcgaacgggaagggagaggaacctgggatttggggacgccatgggtcgagggctcggaagcgccatccgcgaacaggaagggaggggaaccggggatttggggacgcgtacgtcaacgcgcggaagcgtcgtccgcgaacgggaagggagaggaaccgggggcgggatttggggatgccatgggtcgagggcgcgcacgtggtttgtgccggcgaggagccggggctagatctgcgcgccacggggatttcggggaggagaatagagtcgggcatgctgtgtgcggtggagacggtggaggggtggtggggaatggcgggggaactgaagagctactaccttgggttgtga

SEQ ID NO: 83836 - DNA, 651 bp, Zea Mays
ttcgtcattcttgcctaccacagtccttttacttcaaaatacggggaaatagaagtccttcatcagctcttctcatcttggctcacatgcagtacttgaataccagtttcttcctgagcagccaagtgatgcatatgagaggggaagccagttgcgcttctatgatgctctaggagaagtgttaaactcgagggtagattcgttgtctatagaatcacactttatccatgtagttgagtaggcacctagctatacatttaacacagtaaatcatctggttctagctgtttgtcaaatattattgctagcatggctcaaatccacggtcaaaaattggcatccctcaagttgtcggatttgaaagctccctcacatcccctaaaagattgggttatcatgatgaagatacatgtcacatggacagaaaacacaagaactatatttatggatataatatttttcttcttttgtattattatattcatatccttttttacctttgtattattattttttgatatatgttgtatttgtctaatgttacttcgtcataatgagaacgctaagattgctagggaggttgaggctcatgaaaagagaattaaaaaggagcttgagagttgagaagcaaggtctactaaatagaaagaa

SEQ ID NO: 83837 - DNA, 825 bp, Zea Mays
attccaacactacacacccacctagcctggcaaccagccgccgacctcctatctaccatggatatgtgccttggagccaaaagatccatcaccaatcttttccctcttctatacctcctcatgccgcggcatggatctccttgttcgtttgtcatctaggagtatctggctaggtcgccggccggaggaggaggaggagaaagaaatggaagtgtaactatggtgttggctcggctcactcagaagttgaagccgaatccaaatgacaccagtcgtttggcgatgcagaaatcgctcgacagatcgagcaggagaaatagaaagagagacagcaggcagccaagcacatatgcaaattagcattcggttcaagctagccgcgcttcagagagctcagaagcatcatgaacgtcatagttgaaaccaacgccctaatttcattgcattgcgcccagccaatctattgcatggaatatgaaccaactgaagccacttccgagcagtttcttttcaggaaggacatggccggacgatatgatcaagctactagcatgtgtagtagtatatacttcgattagtttctgtaaccacatcatgcatgtgcccgtttcttaacttcttgagggagaaaaggagaaatgcataaattatggatgatctctgtacgttcatcatgtaccatcagttgtgagcatctgttgattctcttatgtattgcctgcagtagtcgtacacttgtactccatacatacaaaattcagtacaatatgaatttgttttcagtgtgcatccatacatacatatacaagacatgtctgttcgctt
